United States Patent Application Publication US 2025/0320254 A1 - sequence listing, part 9

SEQ ID NO: 42726 - protein, 833 aa, Homo sapiens
MLRLRAICPFSWRVFQFRPISCEPLIIQMNKCTDEEQMFGFIERNKAILSEKQVGCAFDMLWKLQKQKTSLLKNAEYVRDHPQFLTLHNLATNKFKLMNDDTLVNVLYVTQQFAGEAHDPLVEALVTEAWRRLERFDIKLLSEFSSCLADQHLYFSPLMGKIADIVHRNLETTQDLSSLSVLMVNISSLISRHFQQQLVNKTELLFDTIDSSEVNVAKSIAKFLRNVRYRYQPLLERCNNVFLSNVDHLDLDSISKILSVYKFLQFNSFEFIIMAKKKLTEMIPLCNHPASFVKLFVALGPIAGPEEKKQLKSTMLLMSEDLTGEQALAVLGAMGDMESRNSCLIKRVTSVLHKHLDGYKPLELLKITQELTFLHFQRKEFFAKLRELLLSYLKNSFIPTEVSVLVRAISLLPSPHLDEVGISRIEAVLPQCDLNNLSSFATSVLRWIQHDHMYLDNMTAKQLKLLQKLDHYGRQRLQHSNSLDLLRKELKSLKGNTFPESLLEEMIATLQHFMDDINYINVGEIASFISSTDYLSTLLLDRIASVAVQQIEKIHPFTIPAIIRPFSVLNYDPPQRDEFLGTCVQHLNSYLGILDPFILVFLGFSLATLEYFPEDLLKAIFNIKFLARLDSQLEILSPSRSARVQFHLMELNRSVCLECPEFQIPWFHDRFCQQYNKGIGGMDGTQQQIFKMLAEVLGGINCVKASVLTPYYHKVDFECILDKRKKPLPYGSHNIALGQLPEMPWESNIEIVGSRLPPGAERIALEFLDSKALCRNIPHMKGKSAMKKRHLEILGYRVIQISQFEWNSMALSTKDARMDYLRECIFGEVKSCL

SEQ ID NO: 42727 - protein, 74 aa, Homo sapiens; identical to SEQ ID NO: 13238

SEQ ID NO: 42728 - protein, 843 aa, Homo sapiens
MESRNRDREKRRERERDTDRKRSRKSPSPGRRNPETSVTQSSSAQDEPATKKKKDELDPLLTRTGGAYIPPAKLRMMQEQITDKNSLAYQRMSWEALKKSINGLINKVNISNISIIIQELLQENIVRGRGLLSRSVLQAQSASPIFTHVYAALVAIINSKFPQIGELILKRLILNFRKGYRRNDKQLCLTASKFVAHLINQNVAHEVLCLEMLTLLLERPTDDSVEVAIGFLKECGLKLTQVSPRGINAIFERLRNILHESEIDKRVQYMIEVMFAVRKDGFKDHPIILEGLDLVEEDDQFTHMLPLEDDYNPEDVLNVFKMDPNFMENEEKYKAIKKEILDEGDTDSNTDQDAGSSEEDEEEEEEEGEEDEEGQKVTIHDKTEINLVSFRRTIYLAIQSSLDFEECAHKLLKMEFPESQTKELCNMILDCCAQQRTYEKFFGLLAGRFCMLKKEYMESFEGIFKEQYDTIHRLETNKLRNVAKMFAHLLYTDSLPWSVLECIKLSEETTTSSSRIFVKIFFQELCEYMGLPKLNARLKDETLQPFFEGLLPRDNPRNTRFAINFFTSIGLGGLTDELREHLKNTPKVIVAQKPDVEQNKSSPSSSSSASSSSESDSSDSDSDSSDSSSESSSEESDSSSISSHSSASANDVRKKGHGKTRSKEVDKLIRNQQTNDRKQKERRQEHGHQETRTERERRSEKHRDQNSSGSNWRDPITKYTSDKDVPSERNNYSRVANDRDQEMHIDLENKHGDPKKKRGERRNSFSENEKHTHRIKDSENFRRKDRSKSKEMNRKHSGSRSDEDRYQNGAERRWEKSSRYSEQSRESKKNQDRRREKSPAKQK

SEQ ID NO: 42729 - protein, 694 aa, Homo sapiens [sequence omitted]

SEQ ID NO: 42730 - protein, 24 aa, Homo sapiens
MDMLRLTLQTTSDGVMLDKDLFKK

SEQ ID NO: 42731 - protein, 464 aa, Homo sapiens [sequence omitted]

SEQ ID NO: 42732 - protein, 127 aa, Homo sapiens
MASPCSAMAYHHDSRRIFVGQDNGAVMEFHVSEDFNKMNFIKTYPAHQNRVSAIIFSLATEWVISTGHDKCVSWMCTRSGNMLGRHFFTSWASCLQYPSEPRTSPSPGLCFSVFGSESHPKWLRSKD

SEQ ID NO: 42733 - protein, 145 aa, Homo sapiens
MVRPGDLTGHSDFHLFKEGIKPMWEDDANKNGGKWIIRLRKGLASRCWENLILAMLGEQFMVGEEICGAVVSVRFQEDIISIWNKTASDQATTARIRDTLRRVLNLPPNTIMEYKTHTDSIKMPGRLGPQRLLFQNLWKPRLNVP

SEQ ID NO: 42734 - protein, 136 aa, Homo sapiens
MVRPGDLTGHSDFHLFKEGIKPMWEDDANKNGGKWIIRLRKGLASRCWENLILAMLGEQFMVGEEICGAVVSVRFQEDIISIWNKTASDQATTARIRDTLRRVLNLPPNTIMEYKTHTDSIKAWEEFHGLVNSSGR

SEQ ID NO: 42735 - protein, 460 aa, Homo sapiens
MLATQLRSFDDHFQHLLNDSERTLQATFPGAFGELYTQNARAFRDLYSELRLYYRGANLHLEETLAEFWARLLERLFKQLHPQLLLPDDYLDCLGKQAEALRPFGEAPRELRLRATRAFVAARSFVQGLGVASDVVRKVAQVPLGPECSRAVMKLVYCAHCLGVPGARPCPDYCRNVLKGCLANQADLDAEWRNLLDSMVLITDKFWGTSGVESVIGSVHTWLAEAINALQDNRDTLTAKVIQGCGNPKVNPQGPGPEEKRRRGKLAPRERPPSGTLEKLVSEAKAQLRDVQDFWISLPGTLCSEKMALSTASDDRCWNGMARGRYLPEVMGDGLANQINNPEVEVDITKPDMTIRQQIMQLKIMTNRLRSAYNGNDVDFQDASDDGSGSGSGDGCLDDLCSRKVSRKSSSSRTPLTHALPGLSEQEGQKTSAASCPQPPTFLLPLLLFLALTVARPRWR

SEQ ID NO: 42736 - protein, 492 aa, Homo sapiens
MSLPGSRRTSAGSRRRTSPPVSVRDAYGTSSLSSSSNSGSYKGSDSSPTPRRSMKYTLCSDNHGIKPPTPEQYLTPLQQKEVCIRHLKARLKDTQDRLQDRDTEIDDLKTQLSRMQEDWIEEECHRVEAQLALKEARKEIKQLKQVIDTVKNNLIDKDKGLQKYFVDINIQNKKLETLLHSMEVAQNGMAKEDGTGESAGGSPARSLTRSSTYTKLSDPAVCGDRQPGDPSSGSAEDGADSGFAAADDTLSRTDALEASSLLSSGVDCGTEETSLHSSFGLGPRFPASNTYEKLLCGMEAGVQASCMQERAIQTDFVQYQPDLDTILEKVTQAQVCGTDPESGDRCPELDAHPSGPRDPNSAVVVTVGDELEAPEPITRGPTPQRPGANPNPGQSVSVVCPMEEEEEAAVAEKEPKSYWSRHYIVDLLAVVVPAVPTVAWLCRSQRRQGQPIYNISSLLRGCCTVALHSIRRISCRSLSQPSPSPAGGGSQL

SEQ ID NO: 42737 - protein, 162 aa, Homo sapiens [sequence omitted]

SEQ ID NO: 42738 - protein, 459 aa, Homo sapiens
MYTSASSSRVSWNTPQCRTLGPAEPSVPDKEAFTLVGKVLLKNQSQVVFSHRGFKARPPFGAMEATLPSPAVVAQELWNKGALSLSHVAHLRICITHVTGGGIPCIKRLEVWGQPAKTCSQEVIDSILLVTSENLPQDVALQAPALPMESDCDPGDQPESQQAPSSLQKLAEIIQDVPEEFLDPITLEIMPCPMLLPSGKVIDQSTLEKCNRSEATWGRVPSDPFTGVAFTPHSQPLPHPSLKARIDHFLLQHSIPGCHLLGRAQTALAVIPSSIVLPSQKRKIEQAEHVPDSNFGVNASCFSATSPLVLPTTSEHTAKKMKATNEPSLTHMDCSTGPLSHEQKLSQSLEIALASTLGSMPSFTARLTRGQLQHLGTRGSNTSWRPGTGSEQPGSILGPECASCKRVFSPYFKKEPVYQLPCGHLLCRPCLGEKQRSLPMTCTACQRPVASQDVLRVHF

SEQ ID NO: 42739 - protein, 119 aa, Homo sapiens [sequence omitted]

SEQ ID NO: 42740 - protein, 372 aa, Homo sapiens
MLAVSLTVPLLGAMMLLESPIDPQPLSFKEPPLLLGVLHPNTKLRQAERLFENQLVGPESIAHIGDVMFTGTADGRVVKLENGEIETIARFGSGPCKTRDDEPVCGRPLGIRAGPNGTLFVADAYKGLFEVNPWKREVKLLLSSETPIEGKNMSFVNDLTVTQDGRKIYFTDSSSKWQRRDYLLLVMEGTDDGRLLEYDTVTREVKVLLDQLRFPNGVQLSPAEDFVLVAETTMARIRRVYVSGLMKGGADLFVENMPGFPDNIRPSSSGGYWVGMSTIRPNPGFSMLDFLSERPWIKRMIFKLFSQETVMKFVPRYSLVLELSDSGAFRRSLHDPDGLVATYISEVHEHDGHLYLGSFRSPFLCRLSLQAV

SEQ ID NO: 42741 - protein, 638 aa, Homo sapiens [sequence omitted]

SEQ ID NO: 42742 - protein, 1432 aa, Homo sapiens
METASFKKKRSKSADIWREDSLEFSLSDLSQEHLTSNEEILGSAEEKDCEEARGMETRASPRQLSTCQRANSLGDLYAQKNSGVTANGGPGSKFAGYCRNLVSDIPNLANHKMPPAAAEETPPYSNYNTLPCRKSHCLSEGATNPQISHSNSMQGRRAKTTQDVNAGEGSEFADSGIEGATTDTDLLSRRSNATNSSYSPTTGRAFVGSDSGSSSTGDAARQGVYENFRRELEMSTTNSESLEEAGSAHSDEQSSGTLSSPGQSDILLTAAQGTVRKAGALAVKNFLVHKKNKKVESATRRKWKHYWVSLKGCTLFFYESDGRSGIDHNSIPKHAVWVENSIVQAVPEHPKKDFVFCLSNSLGDAFLFQTTSQTELENWITAIHSACATAVARHHHKEDTLRLLKSEIKKLEQKIDMDEKMKKMGEMQLSSVTDSKKKKTILDQIFVWEQNLEQFQMDLFRFRCYLASLQGGELPNPKRLLAFASRPTKVAMGRLGIFSVSSFHALVAARTGETGVRRRTQAMSRSASKRRSRFSSLWGLDTTSKKKQGRPSINQVFGEGTEAVKKSLEGIFDDIVPDGKREKEVVLPNVHQHNPDCDIWVHEYFTPSWFCLPNNQPALTVVRPGDTARDTLELICKTHQLDHSAHYLRLKFLIENKMQLYVPQPEEDIYELLYKEIEICPKVTQSIHIEKSDTAADTYGFSLSSVEEDGIRRLYVNSVKETGLASKKGLKAGDEILEINNRAADALNSSMLKDFLSQPSLGLLVRTYPELEEGVELLESPPHRVDGPADLGESPLAFLTSNPGHSLCSEQGSSAETAPEETEGPDLESSDETDHSSKSTEQVAAFCRSLHEMNPSDQSPSPQDSTGPQLATMRQLSDADKLRKVICELLETERTYVKDLNCLMERYLKPLQKETFLTQDELDVLFGNLTEMVEFQVEFLKTLEDGVRLVPDLEKLEKVDQFKKVLFSLGGSFLYYADRFKLYSAFCASHTKVPKVLVKAKTDTAFKAFLDAQNPKQQHSSTLESYLIKPIQRILKYPLLLRELFALTDAESEEHYHLDVAIKTMNKVASHINEMQKIHEEFGAVFDQLIAEQTGEKKEVADLSMGDLLLHTTVIWLNPPASLGKWKKEPELAAFVFKTAVVLVYKDGSKQKKKLVGSHRLSIYEDWDPFRFRHMIPTEALQVRALASADAEANAVCEIVHVKSESEGRPERVFHLCCSSPESRKDFLKAVHSILRDKHRRQLLKTESLPSSQQYVPFGGKRLCALKGARPAMSRAVSAPSKSLGRRRRRLARNRFTIDSDAVSASSPEKESQQPPGGGDTDRWVEEQFDLAQYEEQDDIKETDILSDDDEFCESVKGASVDRDLQERLQATSISQRERGRKTLDSHASRMAQLKKQAALSGINGGLESASEEVIWVRREDFAPSRKLNTEI

SEQ ID NO: 42743 - protein, 729 aa, Homo sapiens
MESEKEEEKPKTGGAFSNALSSLNVLRPGEIPDAAFIHAARKKRQMARELGDFTPHDNEPGKGRLVREDENDASDDEDDDEKRRIVFSVKEKSQRQKIAEEIGIEGSDDDALVTGEQDEELSRWEQEQIRKGINIPQVQASQPAEVNMYYQNTYQTMPYGSSYGIPYSYTAYGSSDAKSQKTDNTVPFKTPSNEMTPVTIDLVKKQLKDRLDSMKELHKTNRQQHEKHLQSRVDSTRAIERLEGSSGGIGERYKFLQEMRGYVQDLLECFSEKVPLINELESAIHQLYKQRASRLVQRRQDDIKDESSEFSSHSNKALMAPNLDSFGRDRALYQEHAKRRIAEREARRTRRRQAREQTGKMADHLEGLSSDDEETSTDITNFNLEKDRISKESGKVFEDVLESFYSIDCIKSQFEAWRSKYYTSYKDAYIGLCLPKLFNPLIRLQLLTWTPLEAKCRDFENMLWFESLLFYGCEEREQEKDDVDVALLPTIVEKVILPKLTVIAENMWDPFSTTQTSRMVGITLKLINGYPSVVNAENKNTQVYLKALLLRMRRTLDDDVFMPLYPKNVLENKNSGPYLFFQRQFWSSVKLLGNFLQWYGIFSNKTLQELSIDGLLNRYILMAFQNSEYGDDSIKKAQNVINCFPKQWFMNLKGERTISQLENFCRYLVHLADTIYRNSIGCSDVEKRNARENIKQIVKLLASVRALDHAMSVASDHNVKEFKSLIEGK

SEQ ID NO: 42744 - protein, 439 aa, Homo sapiens
MVDNLQGDSGRGYYLEMLIGTPPQKLQILVDTGSSNFAVAGTPHSYIDTYFDTERSSTYRSKGFDVTVKYTQGSWTGFVGEDLVTIPKGFNTSFLVNIATIFESENFFLPGIKWNGILGLAYATLAKPSSSLETFFDSLVTQANIPNVFSMQMCGAGLPVAGSGTNGGSLVLGGIEPSLYKGDIWYTPIKEEWYYQIEILKLEIGGQSLNLDCREYNADKAIVDSGTTLLRLPQKVFDAVVEAVARASLIPEFSDGFWTGSQLACWTNSETPWSYFPKISIYLRDENSSRSFRITILPQLYIQPMMGAGLNYECYRFGISPSTNALVIGATVMEGFYVIFDRAQKRVGFAASPCAEIAGAAVSEISGPFSTEDVASNCVPAQSLSEPILWIVSYALMSVCGAILLVLIVLLLLPFRCQRRPRDPEVVNDESSLVRHRWK

SEQ ID NO: 42745 - protein, 26 aa, Homo sapiens
MWGSTWMSTTPRTRGRMKSTSAAMEL

SEQ ID NO: 42746 - protein, 1994 aa, Homo sapiens
MNPAHVLFDRFVQATTCKGTLKAFQELCDHLELKPKDYRSFYHKLKSKLNYWKAKALWAKLDKRGSHKDYKKGKACTNTKCLIIGAGPCGLRTAIDLSLLGAKVVVIEKRDAFSRNNVLHLWPFTIHDLRGLGAKKFYGKFCAGAIDHISIRQLQLILLKVALILGIEIHVNVEFQGLIQPPEDQENERIGWRALVHPKTHPVSEYEFEVIIGGDGRRNTLEGFRRKEFRGKLAIAITANFINRNTTAEAKVEEISGVAFIFNQKFFQELREATGIDLENIVYYKDDTHYFVMTAKKQSLLDKGVILHDYADTELLLSRENVDQEALLSYAREAADFSTQQQLPSLDFAINHYGQPDVAMFDFTCMYASENAALVREQNGHQLLVALVGDSLLEPFWPMGTGIARGFLAAMDSAWMVRSWSLGTSPLEVLAERESIYRLLPQTTPENVSKNFSQYSIDPVTRYPNINVNFLRPSQVRHLYDTGETKDIHLEMESLVNSRTTPKLTRNESVARSSKLLGWCQRQTDGYAGVNVTDLTMSWKSGLALCAIIHRYRPDLIDFDSLDEQNVEKNNQLAFDIAEKELGISPIMTGKEMASVGEPDKLSMVMYLTQFYEMFKDSLPSSDTLDLNAEEKAVLIASTRSPISFLSKLGQTISRKRSPKDKKEKDLDGAGKRRKTSQSEEEEAPRGHRGERPTLVSTLTDRRMDVAVGNQNKVKYMATQLLAKFEENAPAQSIGIRRQGSMKKEFPQNLGGSDTCYFCQKRVYVMERLSAEGKFFHRSCFKCEYCATTLRLSAYAYDIEDGKFYCKPHYCYRLSGYAQRKRPAVAPLSGKEAKGPLQDGATTDANGRANAVASSTERTPGSGVNGLEEPSIAKRLRGTPERIELENYRLSLRQAEALQEVPEETQAEHNLSSVLDTGAEEDVASSSSESEMEEEGEEEEEEPRLPPSDLGGVPWKEAVRIHALLKGKSEEELEASKSFGPGNEEEEEEEEEYEEEEEEDYDEEEEESSEAGNQRLQQVMHAADPLEIQADVHWTHIREREEEERMAPASESSASGAPLDENDLEEDVDSEPAEIEGEAAEDGDPGDTGAELDDDQHWSDSPSDADRELRLPCPAEGEAELELRVSEDEEKLPASPKHQERGPSQATSPIRSPQESALLFIPVHSPSTEGPQLPPVPAATQEKSPEERLFPEPLLPKEKPKADAPSDLKAVHSPIRSQPVTLPEARTPVSPGSPQPQPPVAASTPPPSPLPICSQPQPSTEATVPSPTQSPIRFQPAPAKTSTPLAPLPVQSQSDTKDRLGSPLAVDEALRRSDLVEEFWMKSAEIRRSLGLTPVDRSKGPEPSFPTPAFRPVSLKSYSVEKSPQDEGLHLLKPLSIPKRLGLPKPEGEPLSLPTPRSPSDRELRSAQEERRELSSSSGLGLHGSSSNMKTLGSQSFNTSDSAMLTPPSSPPPPPPPGEEPATLRRKLREAEPNASVVPPPLPATWMRPPREPAQPPREEVRKSFVESVEEIPFADDVEDTYDDKTEDSSLQEKFFTPPSCWPRPEKPRHPPLAKENGRLPALEGTLQPQKRGLPLVSAEAKELAEERMRAREKSVKSQALRDAMARQLSRMQQMELASGAPRPRKASSAPSQGKERRPDSPTRPTLRGSEEPTLKHEATSEEVLSPPSDSGGPDGSFTSSEGSSGKSKKRSSLFSPRRNKKEKKSKGEGRPPEKPSSNLLEEAAAKPKSLWKSVFSGYKKDKKKKADDKSCPSTPSSGATVDSGKHRVLPVVRAELQLRRQLSFSEDSDLSSDDVLEKSSQKSRREPRTYTEEELNAKLTRRVQKAARRQAKQEELKRLHRAQIIQRQLQQVEERQRRLEERGVAVEKALRGEAGMGKKDDPKLMQEWFKLVQEKNAMVRYESELMIFARELELEDRQSRLQQELRERMAVEDHLKTEEELSEEKQILNEMLEVVEQRDSLVALLEEQRLREREEDKDLEAAMLSKGFSLNWS

SEQ ID NO: 42747 - protein, 570 aa, Homo sapiens
MGGHDASCPAQVEPLLLLKAARILQTCQRSPHILAGCILYKGLIVSTQLPPSLTAKVLLHRTAPQEQRLPTGEDAPQEHGKWMLWSFKNRVTHQNPNGAALPPNVQIIPVFVTKEEAISLHEFPVEQMTRSLASPAGLQDGSAQHHPKGGSTSALKENATGHVESMAWTTPDPTSPDEACPDGRKENGCLSGHDLESIRPAGLHNSARGEVLGLSSSLGKELVFLQEELDLSEIHIPEAQEVEMASGHFAFLHVPVPDGRAPYCKASLSASSSLEPTPPEDTAISSLRPPSAPEMLTQHGAQEQLEDHPGHSSQAPIPRADPLPRRTRRPLLLPRLDPGQRGNKLPTGEQGLDEDVDGVCESHAAPGLECSSGSANCQGAGPSADGISSRLTPAESCMGLVRMNLYTHCVKGLVLSLLAEEPLLGDSAAIEEVYHSSLASLNGLEVHLKETLPRDEAASTSSTYNFTHYDRIQSLLMANLPQVATPQDRRFLQAVSLMHSEFAQLPALYEMTVRNASTAVYACCNPIQETYFQQLAPAARSSGFPNPQDGAFSLSGKAKQKLLKHGVNLL

SEQ ID NO: 42748 - protein, 2379 aa, Homo sapiens
MKIQQYDKALDDAIKARLLNPKWPKAYFRQGVALQYLGRHADALAAFASGLAQDPKSLQLLVGMVEAAMKSPMRDSLEPTYQQLQKMKLDKSPFVVVSVVGQELLTAGHHGASVVVLEAALKIGTCSLKLRGSVFSALSSAYWSLGNTEKSTGYMQQDLDVAKTLGDQTGECRAHGNLGSAFFSKGNYREALTNHRHQLVLAMKLKDREAASSALSSLGHVYTAIGDYPNALASHKQCVLLAKQSKDELSEARELGNMGAVYIAMGDFENAVQCHEQHLKIAKDLGNKREEARAYSNLGSAYHYRRNFDKAMSYHNYVLELAQELMEKAIEMRAYAGLGHAARCMQDLERAKQYHEQQLGIAEDLKDRAAEGRASSNLGIIHQMKGDYDTALKLHKTHLCIAQELSDYAAQGRAYGNMGNAYNALGMYDQAVKYHRQELQISMEVNDRASQASTHGNLAVAYQALGAHDRALQHYQNHLNIARELRDIQSEARALSNLGNFHCSRGEYVQAAPYYEQYLRLAPDLQDMEGEGKVCHNLGYAHYCLGNYQEAVKYYEQDLALAKDLHDKLSQAKAYCNLGLAFKALLNFSKAEECQKYLLSLAQSLNNSQAKFRALGNLGDIFICKKDINGAIKFYEQQLGLAHQVKDRRLEASAYAALGTAYRMIQKYDKALGYHTQELEVYQELSDLPGECRAHGHLAAVYMALGKYTMAFKCYEEQLDLGQKLKDPSLEAQVYGNMGITKMNMNVMEEAIGYFEQQLAMLQQLSGNESVLDRGRAYGNLGDCYEALGDYEEAIKYYEQYLSVAQSLNRMQDQAKAYRGLGNGHRAMGSLQQALVCFEKRLVVAHELGEAFNKAQAYGELGSLHSQLGNYEQAISCLERQLNIARDMKDRALESDAACGLGGVYQQMGEYDTALQYHQLDLQIAEETNNPTCQGRAYGNLGLTYESLGTFERAVVYQEQHLSIAAQMNDLAAKTVSYSSLGRTHHALQNYSQAVMYLQEGLRLAEQLGRREDEAKIRHGLGLSLWASGNLEEAQHQLYRASALFETIRHEAQLSTDYKLSLFDLQTSSYQALQRVLVSLGHHDEALAVAERGRTRAFADLLVERQTGQQDSDPYSPVTIDQILEMVNGQRGLVLYYSLAAGYLYSWLLAPGAGIVKFHEHYLGENTVENSSDFQASSSVTLPTATGSALEQHIASVREALGVESHYSRACASSETESEAGDIMDQQFEEMNNKLNSVTDPTGFLRMVRRNNLFNRSCQSMTSLFSNTVSPTQDGTSSLPRRQSSFAKPPLRALYDLLIAPMEGGLMHSSGPVGRHRQLILVLEGELYLIPFALLKGSSSNEYLYERFGLLAVPSIRSLSVQSKSHLRKNPPTYSSSTSMAAVIGNPKLPSAVMDRWLWGPMPSAEEEAYMVSELLGCQPLVGSVATKERVMSALTQAECVHFATHISWKLSALVLTPSMDGNPASSKSSFGHPYTIPESLRVQDDASDGESISDCPPLQELLLTAADVLDLQLPVKLVVLGSSQESNSKVTADGVIALTRAFLAAGAQCVLVSLWPVPVAASKMFIHAFYSSLLNGLKASAALGEAMKVVQSSKAFSHPSNWAGFMLIGSDVKLNSPSSLIGQALTEILQHPERARDALRVLLHLVEKSLQRIQNGQRNAMYTSQQSVENKVGGIPGWQALLTAVGFRLDPPTSGLPAAVFFPTSDPGDRLQQCSSTLQSLLGLPNPALQALCKLITASETGEQLISRAVKNMVGMLHQVLVQLQAGEKEQDLASAPIQVSISVQLWRLPGCHEFLAALGFDLCEVGQEEVILKTGKQANRRTVHFALQSLLSLFDSTELPKRLSLDSSSSLESLASAQSVSNALPLGYQQPPFSPTGADSIASDAISVYSLSSIASSMSFVSKPEGGSEGGGPGGRQDHDRSKNAYLQRSTLPRSQLPPQTRPAGNKDEEEYEGFSIISNEPLATYQENRNTCFSPDHKQPQPGTAGGMRVSVSSKGSISTPNSPVKMTLIPSPNSPFQKVGKLASSDTGESDQSSTETDSTVKSQEESNPKLDPQELAQKILEETQSHLIAVERLQRSGGQVSKSNNPEDGVQAPSSTAVFRASETSAFSRPVLSHQKSQPSPVTVKPKPPARSSSLPKVSSGYSSPTTSEMSIKDSPSQHSGRPSPGCDSQTSQLDQPLFKLKYPSSPYSAHISKSPRNMSPSSGHQSPAGSAPSPALSYSSAGSARSSPADAPDIDKLKMAAIDEKVQAVHNLKMFWQSTPQHSTGPMKIFRGAPGTMTSKRDVLSLLNLSPRHNKKEEGVDKLELKELSLQQHDGAPPKAPPNGHWRTETTSLGSLPLPAGPPATAPARPLRLPSGNGYKFLSPGRFFPSSKC

SEQ ID NO: 42749 - protein, 567 aa, Homo sapiens [sequence omitted]

SEQ ID NO: 42750 - protein, 562 aa, Homo sapiens [sequence omitted]

SEQ ID NO: 42751 - protein, 224 aa, Homo sapiens [sequence omitted]

SEQ ID NO: 42752 - protein, 430 aa, Homo sapiens
MKRESELELPVPGAGGDGADPGLSKRPRTEEAAADGGGGMQNEPLTPGYHGFPARDSQGNQEPTTTPDAMVQPFTTIPFPPPPQNGIPTEYGVPHTQDYAGQTGEHNLTLYGSTQAHGEQSSNSPSTQNGSLTQTEGGAQTDGQQSQTQSSENSESKSTPKRLHVSNIPFRFRDPDLRQMFGQFGKILDVEIIFNERGSKGFGFVTFENSADADRAREKLHGTVVEGRKIEVNNATARVMTNKKMVTPYANGWKLSPVVGAVYGPELYAASSFQADVSLGNDAAVPLSGRGGINTYIPLISLPLVPGFPYPTAATTAAAFRGAHLRGRGRTVYGAVRAVPPTAIPAYPGVVYQDGFYGADLYGGYAAYRYAQPATATAATAAAAAAAAYSDGYGRVYTADPYHALAPAASYGVGAVASLYRGGYSRFAPY

SEQ ID NO: 42753 - protein, 635 aa, Homo sapiens [sequence omitted]

SEQ ID NO: 42754 - protein, 693 aa, Homo sapiens
MRQLAQTGSLGRTPETAEFLGEDLLQVEQRLEPAKRAAHNIHKRLQACLQGQSGADMDKRVKKLPLMALSTTMAESFKELDPDSSMGKALEMSCAIQNQLARILAEFEMTLERDVLQPLSRLSEEELPAILKHKKSLQKLVSDWNTLKSRLSQATKNSGSSQGLGGSPGSHSHTTMANKVETLKEEEEELKRKVEQCRDEYLADLYHFVTKEDSYANYFIRLLEIQADYHRRSLSSLDTALAELRENHGQADHSPSMTATHFPRVYGVSLATHLQELGREIALPIEACVMMLLSEGMKEEGLFRLAAGASVLKRLKQTMASDPHSLEEFCSDPHAVAGALKSYLRELPEPLMTFDLYDDWMRAASLKEPGARLQALQEVCSRLPPENLSNLRYLMKFLARLAEEQEVNKMTPSNIAIVLGPNLLWPPEKEGDQAQLDAASVSSIQVVGVVEALIQSADTLFPGDINFNVSGLFSAVTLQDTVSDRLASEELPSTAVPTPATTPAPAPAPAPAPAPALASAATKERTESEVPPRPASPKVTRSPPETAAPVEDMARRTKRPAPARPTMPPPQVSGSRSSPPAPPLPPGSGSPGTPQALPRRLVGSSLRAPTVPPPLPPTPPQPARRQSRRSPASPSPASPGPASPSPVSLSNPAQVDLGAATAEGGAPEAISGVPTPPAIPPQPRPRSLASETN

SEQ ID NO: 42755 - protein, 372 aa, Homo sapiens
MELLGPSLEDLFNFCSRKFSLKTVLLLADQMISRIEYIHSKNFIHRDVKPDNFLMGLGKKGNLVYIIDFGLAKKYRDARTHQHIPYRENKNLTGTARYASINTHLGIEQSRRDDLESLGYVLMYFNLGSLPWQGLKAATKRQKYERISEKKMSTPIEVLCKGYPSEFSTYLNFCRSLRFDDKPDYSYLRQLFRNLFHRQGFSYDYVFDWNMLKFVSHLEAKAGLGDWMGKALTQRARVSWWREGLPTDGRYELDSVVDLTGVPEPSSLIRADSLCHHGQQGPGRALSPVGTRRIWLHLGSLLGARSRAWVVLAAPPAALIAAYTVLLLLFCTSQVATCTMAPRASLDPVMVLAFFLVMGPWVWLGSCSVSLF

SEQ ID NO: 42756 - protein, 682 aa, Homo sapiens
MEDAPQRLRWQAHLEFTHNHDVGDLTWDKIAVSLPRSEKLRSLVLAGIPHGMRPQLWMRLSGALQKKRNSELSYREIVKNSSNDETIAAKQIEKDLLRTMPSNACFASMGSIGVPRLRRVLRALAWLYPEIGYCQGTGMVAACLLLFLEEEDAFWMMSAIIEDLLPASYFSTTLLGVQTDQRVLRHLIVQYLPRLDKLLQEHDIELSLITLHWFLTAFASVVDIKLLLRIWDLFFYEGSRVLFQLTLGMLHLKEEELIQSENSASIFNTLSDIPSQMEDAELLLGVAMRLAGSLTDVAVETQRRKHLAYLIADQGQLLGAGTLTNLSQVVRRRTQRRKSTITALLFGEDDLEALKAKNIKQTELVADLREAILRVARHFQCTDPKNCSVELTPDYSMESHQRDHENYVACSRSHRRRAKALLDFERHDDDELGFRKNDIITIVSQKDEHCWVGELNGLRGWFPAKFVEVLDERSKEYSIAGDDSVTEGVTDLVRGTLCPALKALFEHGLKKPSLLGGACHPWLFIEEAAGREVERDFASVYSRLVLCKTFRLDEDGKVLTPEELLYRAVQSVNVTHDAVHAQMDVKLRSLICVGLNEQVLHLWLEVLCSSLPTVEKWYQPWSFLRSPGWVQIKCELRVLCCFAFSLSQDWELPAKREAQQPLKEGVRDMLVKHHLFSWDVDG

SEQ ID NO: 42757 - protein, 753 aa, Homo sapiens
MEDAPQRLRWQAHLEFTHNHDVGDLTWDKIAVSLPRSEKLRSLVLAGIPHGMRPQLWMRLSGALQKKRNSELSYREIVKNSSNDETIAAKQIEKDLLRTMPSNACFASMGSIGVPRLRRVLRALAWLYPEIGYCQGTGMVAACLLLFLEEEDAFWMMSAIIEDLLPASYFSTTLLGVQTDQRVLRHLIVQYLPRLDKLLQEHDIELSLITLHWFLTAFASVVDIKLLLRIWDLFFYEGSRVLFQLTLGMLHLKEEELIQSENSASIFNTLSDIPSQMEDAELLLGVAMRLAGSLTDVAVETQRRKHLAYLIADQGQLLGAGTLTNLSQVVRRRTQRRKSTITALLFGESSASARQCGHAGVCPHAHVDVELPPRGPGVGCGHHGSLGLLGEDDLEALKAKNIKQTELVADLREAILRVARHFQCTDPKNCSVVSRQLPGLLPNTALTPPTPLVGLCSLWQELTPDYSMESHQRDHENYVACSRSHRRRAKALLDFERHDDDELGFRKNDIITIVSQKDEHCWVGELNGLRGWFPAKFVEVLDERSKEYSIAGDDSVTEGVTDLVRGTLCPALKALFEHGLKKPSLLGGACHPWLFIEEAAGREVERDFASVYSRLVLCKTFRLDEDGKVLTPEELLYRAVQSVNVTHDAVHAQMDVKLRSLICVGLNEQVLHLWLEVLCSSLPTVEKWYQPWSFLRSPGWVQIKCELRVLCCFAFSLSQDWELPAKREAQQPLKEGVRDMLVKHHLFSWDVDG

SEQ ID NO: 42758 - protein, 293 aa, Homo sapiens [sequence omitted]

SEQ ID NO: 42759 - protein, 1006 aa, Homo sapiens
MLERKYGGRLVTRHAARTIQTAFRQYQMNKNFERLRSSMSENRMSRRIVLSNMRMQFSFEGPEKVHSSYFEGKQVSVTNDGSQLGALVSPECGDLSEPTTLKSPAPSSDFADAITELEDAFSRQVKSLAESIDDALNCRSLHTEEAPALDAARARDTEPQTALHGMDHRKLDEMTASYSDVTLYIDEEELSPPLPLSQAGDRPSSTESDLRLRAGGAAPDYWALAHKEDKADTDTSCRSTPSLERQEQRLRVEHLPLLTIEPPSDSSVDLSDRSERGSLKRQSAYERSLGGQQGSPKHGPHSGAPKSLPREEPELRPRPPRPLDSHLAINGSANRQSKSESDYSDGDNDSINSTSNSNDTINCSSESSSRDSLREQTLSKQTYHKEARNSWDSPAFSNDVIRKRHYRIGLNLFNKKPEKGVQYLIERGFVPDTPVGVAHFLLQRKGLSRQMIGEFLGNRQKQFNRDVLDCVVDEMDFSTMELDEALRKFQAHIRVQGEAQKVERLIEAFSQRYCICNPGVVRQFRNPDTIFILAFAIILLNTDMYSPNVKPERKMKLEDFIKNLRGVDDGEDIPREMLMGIYERIRKRELKTNEDHVSQVQKVEKLIVGKKPIGSLHPGLGCVLSLPHRRLVCYCRLFEVPDPNKPQKLGLHQREIFLFNDLLVVTKIFQKKKNSVTYSFRQSFSLYGMQVLLFENQYYPNGIRLTSSVPGADIKVLINFNAPNPQDRKKFTDDLRESIAEVQEMEKHRIESELEKQKGVVRPSMSQCSSLKKESGNGTLSRACLDDSYASGEGLKRSALSSSLRDLSEAGKRGRRSSAGSLESNVEGSIISSPHMRRRATSTRECPSRPHQTMPNSSSLLGSLFGSKRGKPPPQAHLPSAPALPPPHPPVVLPHLQHSVAGHHLGPPEGLPQAAMHGHHTQYCHMQNPPPYHHHHHHHPPQHIQHAHQYHHGPHGGHPAYGAHAHGHPPLPSAHVGHTVHHHGQPPAPPPPTSSKAKPSGISTIV

SEQ ID NO: 42760 - protein, 97 aa, Homo sapiens
MLIFVLSAVHPDKMHLVLQNIYKCHGCSSELRQPWDKDDFAVTWDPWSPAIRLLGEGLRHVHETLKQALYCTIFTQHLEGTDLAPALEELTSLLWCQ

SEQ ID NO: 42761 - protein, 522 aa, Homo sapiens
MRNEQAACYAASAIGYLTSRPGVCLVVSGPGLIHALGGMANANMNCWPLLVIGGSSERNQETMGAFQEFPQVEACRLYTKFSARPSSIEAIPFVIEKAVRSSIYGRPGACYVDIPADFVNLQVNVNSIKYMERCMSPPISMAETSAVCTAASVIRNAKQPLLIIGKGAAYAHAEESIKKLVEQYKLPFLPTPMGKGVVPDNHPYCVGAARSRALQFADVIVLFGARLNWILHFGLPPRYQPDVKFIQVDICAEELGNNVKPAVTLLGNIHAVTKQLLEELDKTPWQYPPESKWWKTLREKMKSNEAASKELASKKSLPMNYYTVFYHVQEQLPRDCFVVSEGANTMDIGRTVLQNYLPRHRLDAGTFGTMGVGLGFAIAAAVVAKDRSPGQWIICVEGDSAFGFSGMEVETICRYNLPIILLVVNNNGIYQGFDTDTWKEMLKFQDATAVVPPMCLLPNSHYEQVMTAFGGKGYFVQTPEELQKSLRQSLADTTKPSLINIMIEPQATRKAQDFHWLTRSNM

SEQ ID NO: 42762 - protein, 722 aa, Homo sapiens
MIENCLDAKSTSIQVIVKEGGLKLIQIQDNGTGIRKEDLDIVCERFTTSKLQSFEDLASISTYGFRGEALASISHVAHVTITTKTADGKCAYRASYSDGKLKAPPKPCAGNQGTQITVEDLFYNIATRRKALKNPSEEYGKILEVVGRYSVHNAGISFSVKKQGETVADVRTLPNASTVDNIRSIFGNAVSRELIEIGCEDKTLAFKMNGYISNANYSVKKCIFLLFINHRLVESTSLRKAIETVYAAYLPKNTHPFLYLSLEISPQNVDVNVHPTKHEVHFLHEESILERVQQHIESKLLGSNSSRMYFTQTLLPGLAGPSGEMVKSTTSLTSSSTSGSSDKVYAHQMVRTDSREQKLDAFLQPLSKPLSSQPQAIVTEDKTDISSGRARQQDEEMLELPAPAEVAAKNQSLEGDTTKGTSEMSEKRGPTSSNPRKRHREDSDVEMVEDDSRKEMTAACTPRRRIINLTSVLSLQEEINEQGHEVLREMLHNHSFVGCVNPQWALAQHQTKLYLLNTTKLSEELFYQILIYDFANFGVLRLSEPAPLFDLAMLALDSPESGWTEEDGPKEGLAEYIVEFLKKKAEMLADYFSLEIDEEGNLIGLPLLIDNYVPPLEGLPIFILRLATEVNWDEEKECFESLSKECAMFYSIRKQYISEESTLSGQQSEVPGSIPNSWKWTVEHIVYKALRSHILPPKHFTEDGNILQLANLPDLYKVFERC

SEQ ID NO: 42763 - protein, 282 aa, Homo sapiens [sequence omitted]

SEQ ID NO: 42764 - protein, 784 aa, Homo sapiens
MKDELLQFYTSAAEESEPESVCSTPLKRNESSSSVQNYFHLDSLQKKLKDLEEENVVLRSEASQLKTETITYEEKEQQLVNDCVKELRDANVQIASISEELAKKTEDAARQQEEITHLLSQIVDLQKKAKACAVENEELVQHLGAAKDAQRQLTAELRELEDKYAECMEMLHEAQEELKNLRNKTMPNTTSRRYHSLGLFPMDSLAAEIEGTMRKELQLEEAESPDITHQKRVFETVRNINQVVKQRSLTPSPMNIPGSNQSSAMNSLLSSCVSTPRSSFYGSDIGNVVLDNKTNSIILETEAADLGNDERSKKPGTPGTPGSHDLETALRRLSLRRENYLSERRFFEEEQERKLQELAEKGELRSGSLTPTESIMSLGTHSRFSEFTGFSGMSFSSRSYLPEKLQIVKPLEGSATLHHWQQLAQPHLGGILDPRPGVVTKGFRTLDVDLDEVYCLNDFEEDDTGDHISLPRLATSTPVQHPETSAHHPGKCMSQTNSTFTFTTCRILHPSDELTRVTPSLNSAPTPACGSTSHLKSTPVATPCTPRRLSLAESFTNTRESTTTMSTSLGLVWLLKERGISAAVYDPQSWDRAGRGSLLHSYTPKMAVIPSTPPNSPMQTPTSSPPSFEFKCTSPPYDNFLASKPASSILREVREKNVRSSESQTDVSVSNLNLVDKVRRFGVAKVVNSGRAHVPTLTEEQGPLLCGPPGPAPALVPRGLVPEGLPLRCPTVTSAIGGLQLNSGIRRNRSFPTMVGSSMQMKAPVTLTSGILMGAKLSKQTSLR

SEQ ID NO: 42765 - protein, 2520 aa, Homo sapiens
MFKGVASSRFLPKGTKTKVNLEEQGRQKVSFSFSLTKKTLQNRFLTALGNEKQSDTPNPPAVPLQVDSTPKMKMEIGDTLSTAEESSPPKSRVELGKIHFKKHLLHVTSRPLLATTTAVASPPTHAAPLPAVIAESTTVDSPPSSPPPPPPPAQATTLSSPAPVTEPVALPHTPITVLMAAPVPLPVDVAVRSLKEPPIIIVPESLEADTKQDTISNSLEEHVTQILNEQADISSKKEDSHIGKDEEIPDSSKISLSCKKTGSKKKSSQSEGIFLGSESDEDSVRTSSSQRSHDLKFSASIEKERDFKKSSAPLKSEDLGKPSRSKTDRDDKYFSYSKLERDTRYVSSRCRSERERRRSRSHSRSERGSRTNLSYSRSERSHYYDSDRRYHRSSPYRERTRYSRPYTDNRARESSDSEEEYKKTYSRRTSSHSSSYRDLRTSSYSKSDRDCKTETSYLEMERRGKYSSKLERESKRTSENEAIKRCCSPPNELGFRRGSSYSKHDSSASRYKSTLSKPIPKSDKFKNSFCCTELNEEIKQSHSFSLQTPCSKGSELRMINKNPEREKAGSPAPSNRLNDSPTLKKLDELPIFKSEFITHDSHDSIKELDSLSKVKNDQLRSFCPIELNINGSPGAESDLATFCTSKTDAVLMTSDDSVTGSELSPLVKACMLSSNGFQNISRCKEKDLDDTCMLHKKSESPFRETEPLVSPHQDKLMSMPVMTVDYSKTVVKEPVDTRVSCCKTKDSDIYCTLNDSNPSLCNSEAENIEPSVMKISSNSFMNVHLESKPVICDSRNLTDHSKFACEEYKQSIGSTSSASVNHFDDLYQPIGSSGIASSLQSLPPGIKVDSLTLLKCGENTSPVLDAVLKSKKSSEFLKHAGKETIVEVGSDLPDSGKGFASRENRRNNGLSGKCLQEAQEEGNSILPERRGRPEISLDERGEGGHVHTSDDSEVVFSSCDLNLTMEDSDGVTYALKCDSSGHAPEIVSTVHEDYSGSSESSNDESDSEDTDSDDSSIPRNRLQSVVVVPKNSTLPMEETSPCSSRSSQSYRHYSDHWEDERLESRRHLYEEKFESIASKACPQTDKFFLHKGTEKNPEISFTQSSRKQIDNRLPELSHPQSDGVDSTSHTDVKSDPLGHPNSEETVKAKIPSRQQEELPIYSSDFEDVPNKSWQQTTFQNRPDSRLGKTELSFSSSCEIPHVDGLHSSEELRNLGWDFSQEKPSTTYQQPDSSYGACGGHKYQQNAEQYGGTRDYWQGNGYWDPRSGRPPGTGVVYDRTQGQVPDSLTDDREEEENWDQQDGSHFSDQSDKFLLSLQKDKGSVQAPEISSNSIKDTLAVNEKKDFSKNLEKNDIKDRGPLKKRRQEIESDSESDGELQDRKKVRVEVEQGETSVPPGSALVGPSCVMDDFRDPQRWKECAKQGKMPCYFDLIEENVYLTERKKNKSHRDIKRMQCECTPLSKDERAQGEIACGEDCLNRLLMIECSSRCPNGDYCSNRRFQRKQHADVEVILTEKKGWGLRAAKDLPSNTFVLEYCGEVLDHKEFKARVKEYARNKNIHYYFMALKNDEIIDATQKGNCSRFMNHSCEPNCETQKWTVNGQLRVGFFTTKLVPSGSELTFDYQFQRYGKEAQKCFCGSANCRGYLGGENRVSIRAAGGKMKKERSRKKDSVDGELEALMENGEGLSDKNQVLSLSRLMVRIETLEQKLTCLELIQNTHSQSCLKSFLERHGLSLLWIWMAELGDGRESNQKLQEEIIKTLEHLPIPTKNMLEESKVLPIIQRWSQTKTAVPPLSEGDGYSSENTSRAHTPLNTPDPSTKLSTEADTDTPKKLMFRRLKIISENSMDSAISDATSELEGKDGKEDLDQLENVPVEEEEELQSQQLLPQQLPECKVDSETNIEASKLPTSEPEADAEIEPKESNGTKLEEPINEETPSQDEEEGVSDVESERSQEQPDKTVDISDLATKLLDSWKDLKEVYRIPKKSQTEKENTTTERGRDAVGFRDQTPAPKTPNRSRERDPDKQTQNKEKRKRRSSLSPPSSAYERGTKRPDDRYDTPTSKKKVRIKDRNKLSTEERRKLFEQEVAQREAQKQQQQMQNLGMTSPLPYDSLGYNAPHHPFAGYPPGYPMQAYVDPSNPNAGKVLLPTPSMDPVCSPAPYDHAQPLVGHSTEPLSAPPPVPVVPHVAAPVEVSSSQYVAQSDGVVHQDSSVAVLPVPAPGPVQGQNYSVWDSNQQSVSVQQQYSPAQSQATIYYQGQTCPTVYGVTSPYSQTTPPIVQSYAQPSLQYIQGQQIFTAHPQGVVVQPAAAVTTIVAPGQPQPLQPSEMVVTNNLLDLPPPSPPKPKTIVLPPNWKTARDPEGKIYYYHVITRQTQWDPPTWESPGDDASLEHEAEMDLGTPTYDENPMKASKKPKTAEADTSSELAKKSKEVFRKEMSQFIVQCLNPYRKPDCKVGRITTTEDFKHLARKLTHGVMNKELKYCKNPEDLECNENVKHKTKEYIKKYMQKFGAVYKPKEDTELE

SEQ ID NO: 42766 - protein, 677 aa, Homo sapiens
MNYRDRDAHAVDFRGRDAPPSDFRGRGTYDLDFRGRDGSHADFRGRDLSDLDFRAREQSRSDFRNRDVSDLDFRDKDGTQVDFRGRGSGTTDLDFRDRDTPHSDFRGRHRSRTDQDFRGREMGSCMEFKDREMPPVDPNILDYIQPSTQDREHSGMNVNRREESTHDHTIERPAFGIQKGEFEHSETREGETQGVAFEHESPADFQNSQSPVQDQDKSQLSGREEQSSDAGLFKEEGGLDFLGRQDTDYRSMEYRDVDHRLPGSQMFGYGQSKSFPEGKTARDAQRDLQDQDYRTGPSEEKPSRLIRLSGVPEDATKEEILNAFRTPDGMPVKNLQLKEYNTGYDYGYVCVEFSLLEDAIGCMEANQGTLMIQDKEVTLEYVSSLDFWYCKRCKANIGGHRSSCSFCKNPREVTEAKQELITYPQPQKTSIPAPLEKQPNQPLRPADKEPEPRKREEGQESRLGHQKREAERYLPPSRREGPTFRRDRERESWSGETRQDGESKTIMLKRIYRSTPPEVIVEVLEPYVRLTTANVRIIKNRTGPMGHTYGFIDLDSHAEALRVVKILQNLDPPFSIDGKMVAVNLATGKRRNDSGDHSDHMHYYQGKKYFRDRRGGGRNSDWSSDTNRQGQQSSSDCYIYDSATGYYYDPLAGTYYDPNTQVSLGLFFFFFFFYLCQ

SEQ ID NO: 42767 - protein, 260 aa, Homo sapiens [sequence omitted]

SEQ ID NO: 42768 - protein, 193 aa, Homo sapiens
MERPLTLTRGSSWAHCSYCHRGATGPWPLTFQVAPGYVVTVLTWPGTNPTLSSILLNSHTDVVPVFKEHWSHDPFEAFKDSEGYIYARGAQDMKCVSIQYLEAVRRLKVEGHRFPRTIHMTFVPDEEVGGHQGMELFVQRPEFHALRAGFALDEGEQVGKPMSSQAGSRRLLVGTELLHPLNPLSLLRHSQSH

SEQ ID NO: 42769 - protein, 650 aa, Homo sapiens
MFFAHQLIPNSCATHALLSVLLNCSSVDLGPTLSRMKDFTKGFSPESKGYAIGNAPELAKAHNSHARPEPRHLPEKQNGLSAVRTMEAFHFVSYVPITGRLFELDGLKVYPIDHGPWGEDEEWTDKARRVIMERIGLATAGEPYHDIRFNLMAVVPDRRIKYEARLHVLKVNRQTVLEALQQLIRVTQPELIQTHKSQESQLPEESKSASNKSPLVLEANRAPAASEGNHTDGAEEAAGSCAQAPSHSPPNKPKLVVKPPGSSLNGVHPNPTPIVQRLPAFLDNHNYAKSPMQEEEDLAAGVGRSRVPVRPPQQYSDDEDDYEDDEEDDVQNTNSALRYKGKGTGKPGALSGSADGQLSVLQPNTINVLAEKLKESQKDLSIPLSIKTSSGAGSPAVAVPTHSQPSPTPSNESTDTASEIGSAFNSPLRSPIRSANPTRPSSPVTSHISKVLFGEDDSLLRVDCIRYNRAVRDLGPVISTGLLHLAEDGVLSPLALTEGGKGSSPSIRPIQGSQGSSSPVEKEVVEATDSREKTGMVRPGEPLSGEKYSPKELLALLKCVEAEIANYEACLKEEVEKRKKFKIDDQRRTHNYDEFICTFISMLAQEGMLANLVEQNISVRRRQGVSIGRLHKQRKPDRRKRSRPYKAKRQ

SEQ ID NO: 42770 - protein, 120 aa, Homo sapiens
MTFLNVLNFGDQGVYDIVNNLGSLVARLIFQPIEESFYIFFAKVLERGKDATLQKQEDVAVAAAVLESLLKLALLAGLTITVFGFAYSQLALDIYGGTMLSSGSGTHKSFSGFFLISQHK

SEQ ID NO: 42771 - protein, 631 aa, Homo sapiens
MYSQELFQLSQYLQEALHREQMLEQKLATLQRLLAITQEASDTSWQALIDEDRLLSRLEVMGNQLQACSKNQTEDSLRKELIALQEDKHNYETTAKESLRRVLQEKIEVVRKLSEVERSLSNTEDECTHLKEMNERTQEELRELANKYNGAVNEIKDLSDKLKVAEGKQEEIQQKGQAEKKELQHKIDEMEEKEQELQAKIEALQADNDFTNERLTALQEKLIVEGHLTKAVEETKLSKENQTRAKESDFSDTLSPSKEKSSDDTTDAQMDEQDLNEPLAKVSLLKDDLQGAQSEIEAKQEIQHLRKELIEAQELARTSKQKCFELQALLEEERKAYRNQVEESTKQIQVLQAQLQRLHIDTENLREEKDSEITSTRDELLSARDEILLLHQAAAKVASERDTDIASLQEELKKVRAELERWRKAASEYEKEITSLQNSFQLRCQQCEDQQREEATRLQGELEKLRKEWNALETECHSLKRENVLLSSELQRQEKELHNSQKQSLELTSDLSILQMSRKELENQVGSLKEQHLRDSADLKTLLSKAENQAKDVQKEYEKTQTVLSELKLKFEMTEQEKQSITDELKQCKNNLKLLREKGNNKPWPWMPMLAALVAVTAIVLYVPGLARASP

SEQ ID NO: 42772 - protein, 69 aa, Homo sapiens [sequence omitted]

SEQ ID NO: 42773 - protein, 729 aa, Homo sapiens [sequence omitted]

SEQ ID NO: 42774 - protein, 157 aa, Homo sapiens
MKEEDVLKFLTAGTHLGGTNLDFQMEQYIYKRRSDGIYIINLKRTWEKLLLAARAIVAIENPAVVSVISSRNTGQRAVLKFAAVTGATPIAGRFTPGNFTNQIHSFLWLLTPGLTTSLSWRHLMLTYLPLLCVTQILLCTLWTLPSHATTRELTEWV

SEQ ID NO: 42775 - protein, 3225 aa, Homo sapiens
MEFNNTTQEDVQERLAYAEQLVVELKDIIRQKDVQLQQKDEALQEERKAADNKIKKLKLHAKAKLTSLNKYIEEMKAQGGTVLPTEPQSEEQLSKHDKSSTEEEMEIEKIKHKLQEKEELISTLQAQLTQAQAEQPAQSSTEMEEFVMMKQQLQEKEEFISTLQAQLSQTQAEQAAQLSSMQQVVREKDARFETQVRLHEDELLQLVTQADVETEMQQKLRVLQRKLEEHEESLVGRAQVVDLLQQELTAAEQRNQILSQQLQQMEAEHNTLRNTVETEREESKILLEKMELEVAERKLSFHNLQEEMHHLLEQFEQAGQAQAELESRYSALEQKHKAEMEEKTSHILSLQKTGQELQSACDALKDQNSKLLQDKNEQAVQSAQTIQQLEDQLQQKSKEISQFLNRLPLQQHETASQTSFPDVYNEGTQAVTEENIASLQKRVVELENEKGALLLSSIELEELKAENEKLSSQITLLEAQNRTGEADREVSEISIVDIANKRSSSAEESGQDVLENTFSQKHKELSVLLLEMKEAQEEIAFLKLQLQGKRAEEADHEVLDQKEMKQMEGEGIAPIKMKVFLEDTGQDFPLMPNEESSLPAVEKEQASTEHQSRTSEEISLNDAGVELKSTKQDGDKSLSAVPDIGQCHQDELERLKSQILELELNFHKAQEIYEKNLDEKAKEISNLNQLIEEFKKNADNNSSAFTALSEERDQLLSQVKELSMVTELRAQVKQLEMNLAEAERQRRLDYESQTAHDNLLTEQIHSLSIEAKSKDVKIEVLQNELDDVQLQFSEQSTLIRSLQSQLQNKESEVLEGAERVRHISSKVEELSQALSQKELEITKMDQLLLEKKRDVETLQQTIEEKDQQVTEISFSMTEKMVQLNEEKFSLGVEIKTLKEQLNLLSRAEEAKKEQVEEDNEVSSGLKQNYDEMSPAGQISKEELQHEFDLLKKENEQRKRKLQAALINRKELLQRVSRLEEELANLKDESKKEIPLSETERGEVEEDKENKEYSEKCVTSKCQEIEIYLKQTISEKEVELQHIRKDLEEKLAAEEQFQALVKQMNQTLQDKTNQIDLLQAEISENQAIIQKLITSNTDASDGDSVALVKETVVISPPCTGSSEHWKPELEEKILALEKEKEQLQKKLQEALTSRKAILKKAQEKERHLREELKQQKDDYNRLQEQFDEQSKENENIGDQLRQLQIQVRESIDGKLPSTDQQESCSSTPGLEEPLFKATEQHHTQPVLESNLCPDWPSHSEDASALQGGTSVAQIKAQLKEIEAEKVELELKVSSTTSELTKKSEEVFQLQEQINKQGLEIESLKTVSHEAEVHAESLQQKLESSQLQIAGLEHLRELQPKLDELQKLISKKEEDVSYLSGQLSEKEAALTKIQTEIIEQEDLIKALHTQLEMQAKEHDERIKQLQVELCEMKQKPEEIGEESRAKQQIQRKLQAALISRKEALKENKSLQEELSLARGTIERLTKSLADVESQVSAQNKEKDTVLGRLALLQEERDKLITEMDRSLLENQSLSSSCESLKLALEGLTEDKEKLVKEIESLKSSKIAESTEWQEKHKELQKEYEILLQSYENVSNEAERIQHVVEAVRQEKQELYGKLRSTEANKKETEKQLQEAEQEMEEMKEKMRKFAKSKQQKILELEEENDRLRAEVHPAGDTAKECMETLLSSNASMKEELERVKMEYETLSKKFQSLMSEKDSLSEEVQDLKHQIEGNVSKQANLEATEKHDNQTNVTEEGTQSIPGETEEQDSLSMSTRPTCSESVPSAKSANPAVSKDFSSHDEINNYLQQIDQLKERIAGLEEEKQKNKEFSQTLENEKNTLLSQISTKDGELKMLQEEVTKMNLLNQQIQEELSRVTKLKETAEEEKDDLEERLMNQLAELNGSIGNYCQDVTDAQIKNELLESEMKNLKKCVSELEEEKQQLVKEKTKVESEIRKEYLEKIQGAQKEPGNKSHAKELQELLKEKQQEVKQLQKDCIRYQEKISALERTVKALEFVQTESQKDLEITKENLAQAVEHRKKAQAELASFKVLLDDTQSEAARVLADNLKLKKELQSNKESVKSQMKQKDEDLERRLEQAEEKHLKEKKNMQEKLDALRREKVHLEETIGEIQVTLNKKDKEVQQLQENLDSTVTQLAAFTKSMSSLQDDRDRVIDEAKKWERKFSDAIQSKEEEIRLKEDNCSVLKDQLRQMSIHMEELKINISRLEHDKQIWESKAQTEVQLQQKVCDTLQGENKELLSQLEETRHLYHSSQNELAKLESELKSLKDQLTDLSNSLEKCKEQKGNLEGIIRQQEADIQNSKFSYEQLETDLQASRELTSRLHEEINMKEQKIISLLSGKEEAIQVAIAELRQQHDKEIKELENLLSQEEEENIVLEEENKKAVDKTNQLMETLKTIKKENIQQKAQLDSFVKSMSSLQNDRDRIVGDYQQLEERHLSIILEKDQLIQEAAAENNKLKEEIRGLRSHMDDLNSENAKLDAELIQYREDLNQVITIKDSQQKQLLEVQLQQNKELENKYAKLEEKLKESEEANEDLRRSFNALQEEKQDLSKEIESLKVSISQLTRQVTALQEEGTLGLYHAQLKVKEEEVHRLSALFSSSQKRIAELEEELVCVQKEAAKKVGEIEDKLKKELKHLHHDAGIMRNETETAEERVAELARDLVEMEQKLLMVTKENKGLTAQIQSFGRSMSSLQNSRDHANEELDELKRKYDASLKELAQLKEQGLLNRERDALLSETAFSMNSTEENSLSHLEKLNQQLLSKDEQLLHLSSQLEDSYNQVQSFSKAMASLQNERDHLWNELEKFRKSEEGKQRSAAQPSTSPAEVQSLKKAMSSLQNDRDRLLKELKNLQQQYLQINQEITELHPLKAQLQEYQDKTKAFQIMQEELRQENLSWQHELHQLRMEKSSWEIHERRMKEQYLMAISDKDQQLSHLQNLIRELRSSSSQTQPLKVQYQRQASPETSASPDGSQNLVYETELLRTQLNDSLKEIHQKELRIQQLNSNFSQLLEEKNTLSIQLCDTSQSLRENQQHYGDLLNHCAVLEKQVQELQAGPLNIDVAPGAPQEKNGVHRKSDPEELREPQQSFSEAQQQLCNTRQEVNELRKLLEEERDQRVAAENALSVAEEQIRRLEHSEWDSSRTPIIGSCGTQEQALLIDLTSNSCRRTRSGVGWKRVLRSLCHSRTRVPLLAAIYFLMIHVLLILCFTGHL

SEQ ID NO: 42776 - protein, 933 aa, Homo sapiens
MIPVLTSKKASELPVSEVASILQADLQNGLNKCEVSHRRAFHGWNEFDISEDEPLWKKYISQFKNPLIMLLLASAVISVLMHQFDDAVSITVAILIVVTVAFVQEYRSEKSLEELSKLVPPECHCVREGKLEHTLARDLVPGDTVCLSVGDRVPADLRLFEAVDLSIDESSLTGETTPCSKVTAPQPAATNGDLASRSNIAFMGTLVRCGKAKGVVIGTGENSEFGEVFKMMQAEEAPKTPLQKSMDLLGKQLSFYSFGIIGIIMLVGWLLGKDILEMFTISVSLAVAAIPEGLPIVVTVTLALGVMRMVKKRAIVKKLPIVETLGCCNVICSDKTGTLTKNEMTVTHIFTSDGLHAEVTGVGYNQFGEVIVDGDVVHGFYNPAVSRIVEAGCVCNDAVIRNNTLMGKPTEGALIALAMKMGLDGLQQDYIRKAEYPFSSEQKWMAVKCVHRTQQDRPEICFMKGAYEQVIKYCTTYQSKGQTLTLTQQQRDVYQQEKARMGSAGLRVLALASGPELGQLTFLGLVGIIDPPRTGVKEAVTTLIASGVSIKMITGDSQETAVAIASRLGLYSKTSQSVSGEEIDAMDVQQLSQIVPKVAVFYRASPRHKMKIIKSLQKNGSVVAMTGDGVNDAVALKAADIGVAMGQTGTDVCKEAADMILVDDDFQTIMSAIEEGKGIYNNIKNFVRFQLSTSIAALTLISLATLMNFPNPLNAMQILWINIIMDGPPAQSLGVEPVDKDVIRKPPRNWKDSILTKNLILKILVSSIIIVCGTLFVFWRELRDNVITPRDTTMTFTCFVFFDMFNALSSRSQTKSVFEIGLCSNRMFCYAVLGSIMGQLLVIYFPPLQKVFQTESLSILDLLFLLGLTSSVCIVAEIIKKVERSREKIQKHVSSTSSSFLEVWLWERSGQQLVEIHPHLETGLPLTEDVSCV

SEQ ID NO: 42777 - protein, 791 aa, Homo sapiens [sequence omitted]

SEQ ID NO: 42778 - protein, 922 aa, Homo sapiens [sequence omitted]

SEQ ID NO: 42779 - protein, 655 aa, Homo sapiens
METTEPEPDCVVQPPSPPDDFSCQMRLSEKITPLKTCFKKKDQKRLGTGTLRSLRPILNTLLESGSLDGVFRSRNQSTDENSLHEPMMKKAMEINSSCPPAENNMSVLIPDRTNVGDQIPEAHPSTEAPERVVPIQDHSFPSETLSGTVADSTPAHFQTDLLHPVSSDVPTSPDCLDKVIDYVPGIFQENSFTIQYILDTSDKLSTELFQDKSEEASLDLVFELVNQLQYHTHQENGIEICMDFLQGTCIYGRDCLKHHTVLPYHWQIKRTTTQKWQSVFNDSQEHLERFYCNPENDRMRMKYGGQEFWADLNAMNVYETTEFDQLRRLSTPPSSNVNSIYHTVWKFFCRDHFGWREYPESVIRLIEEANSRGLKEVRFMMWNNHYILHNSFFRREIKRRPLFRSCFILLPYLQTLGGVPTQAPPPLEATSSSQIICPDGVTSANFYPETWVYMHPSQDFIQVPVSAEDKSYRIIYNLFHKTVPEFKYRILQILRVQNQFLWEKYKRKKEYMNRKMFGRDRIINERHLFHGTSQDVVDGICKHNFDPRVCGKHATMFGQGSYFAKKASYSHNFSKKSSKGVHFMFLAKVLTGRYTMGSHGMRRPPPVNPGSVTSDLYDSCVDNFFEPQIFVIFNDDQSYPYFVIQYEEVSNTVSI

SEQ ID NO: 42780 - protein, 427 aa, Homo sapiens
MPDVVQTRQQAYRDKLAQQQAAAAAAAAAAASQQGSAKNGENTANGEENGAHTIANNHTDMMEVDGDVEIPPNKAVVLRGHESEVFICAWNPVSDLLASGSGDSTARIWNLSENSTSGSTQLVLRHCIREGGQDVPSNKDVTSLDWNSEGTLLATGSYDGFARIWTKDGNLASTLGQHKGPIFALKWNKKGNFILSAGVDKTTIIWDAHTGEAKQQFPFHSAPALDVDWQSNNTFASCSTDMCIHVCKLGQDRPIKTFQGHTNEVNAIKWDPTGNLLASCSDDMTLKIWSMKQDNCVHDLQAHNKEIYTIKWSPTGPGTNNPNANLMLASASFDSTVRLWDVDRGICIHTLTKHQEPVYSVAFSPDGRYLASGSFDKCVHIWNTQTGALVHSYRGTGGIFEVCWNAAGDKVGASASDGSVCVLDLRK

SEQ ID NO: 42781 - protein, 454 aa, Homo sapiens
MPRIKALMTGSLPGFVDVIRNLNSPALLEDSVIRQAKAAGKRIVFYGDETWVKLFPKHFVEYDGTTSFFVSDYTEVDNNVTRHLDKVLKRGDWDILILHYLGLDHIGHISGPNSPLIGQKLSEMDSVLMKIHTSLQSKERETPLPNLLVLCGDHGMSETGSHGASSTEEVNTPLILISSAFERKPGDIRHPKHVQQTDVAATLAIALGLPIPKDSVGSLLFPVVEGRPMREQLRFLHLNTVQLSKLLQENVPSYEKDPGFEQFKMSERLHGNWIRLYLEEKHSEVLFNLGSKVLRQYLDALKTLSLSLSAQVAQYDIYSMMVGTVVVLEVLTLLLLSVPQALRRKAELEVPLSSPGFSLLFYLVILVLSAVHVIVCTSAESSCYFCGLSWLAAGGVMVLASALLCVIVSVLTNVLVGGNTPRKVRTAGSWECDVVLLLRLFLLFQAAFRLPDSG

SEQ ID NO: 42782 - protein, 112 aa, Homo sapiens
MSLIVVIILTFQLFLILQWTKEDGHRTSTSAVPNLFVPLNTNPKEVQEMRNKIREQNLQDIKTAGPQSQVLCGVVMDRSLVQVRAQSVSDFSGWWLCDRLLQSYSEIERVTL

SEQ ID NO: 42783 - protein, 343 aa, Homo sapiens [sequence omitted]

SEQ ID NO: 42784 - protein, 287 aa, Homo sapiens [sequence omitted]

SEQ ID NO: 42785 - protein, 1155 aa, Homo sapiens
MPKSEGGSGGGAAGGGAGGAGAGAGCGSGGSSVGVRVFAVGRHQVTLEESLAEGGFSTVFLVRTHGGIRCALKRMYVNNMPDLNVCKREITIMKELSGHKNIVGYLDCAVNSISDNVWEVLILMEYCRAGQVVNQMNKKLQTGFTEPEVLQIFCDTCEAVARLHQCKTPIIHRDLKVENILLNDGGNYVLCDFGSATNKFLNPQKDGVNVVEEEIKKYTTLSYRAPEMINLYGGKPITTKADIWALGCLLYKLCFFTLPFGESQVAICDGNFTIPDNSRYSRNIHCLIRFMLEPDPEHRPDIFQVSYFAFKFAKKDCPVSNINNSSIPSALPEPMTASEAAARKSQIKARITDTIGPTETSIAPRQRPKANSATTATPSVLTIQSSATPVKVLAPGEFGNHRPKGALRPGNGPEILLGQGPPQQPPQQHRVLQQLQQGDWRLQQLHLQHRHPHQQQQQQQQQQQQQQQQQQQQQQQQQQQHHHHHHHHLLQDAYMQQYQHATQQQQMLQQQFLMHSVYQPQPSASQYPTMMPQYQQAFFQQQMLAQHQPSQQQASPEYLTSPQEFSPALVSYTSSLPAQVGTIMDSSYSANRSVADKEAIANFTNQKNISNPPDMSGWNPFGEDNFSKLTEEELLDREFDLLRSNRLEERASSDKNVDSLSAPHNHPPEDPFGSVPFISHSGSPEKKAEHSSINQENGTANPIKNGKTSPASKDQRTGKKTSVQGQVQKGNDESESDFESDPPSPKSSEEEEQDDEEVLQGEQGDFNDDDTEPENLGHRPLLMDSEDEEEEEKHSSDSDYEQAKAKYSDMSSVYRDRSGSGPTQDLNTILLTSAQLSSDVAVETPKQEFDVFGAVPFFAVRAQQPQQEKNEKNLPQHRFPAAGLEQEEFDVFTKAPFSKKVNVQECHAVGPEAHTIPGYPKSVDVFGSTPFQPFLTSTSKSESNEDLFGLVPFDEITGSQQQKVKQRSLQKLSSRQRRTKQDMSKSNGKRHHGTPTSTKKTLKPTYRTPERARRHKKVGRRDSQSSNEFLTISDSKENISVALTDGKDRGNVLQPEESLLDPFGAKPFHSPDLSWHPPHQGLSDIRADHNTVLPGRPRQNSLHGSFHSADVLKMDDFGAVPFTELVVQSITPHQSQQSQPVELDPFGAAPFPSKQ

SEQ ID NO: 42786 - protein, 656 aa, Homo sapiens
MPKSEGGSGGGAAGGGAGGAGAGAGCGSGGSSVGVRVFAVGRHQVTLEESLAEGGFSTVFLVRTHGGIRCALKRMYVNNMPDLNVCKREITIMKELSGHKNIVGYLDCAVNSISDNVWEVLILMEYCRAGQVVNQMNKKLQTGFTEPEVLQIFCDTCEAVARLHQCKTPIIHRDLKVENILLNDGGNYVLCDFGSATNKFLNPQKDGVNVVEEEIKKYTTLSYRAPEMINLYGGKPITTKADIWALGCLLYKLCFFTLPFGESQVAICDGNFTIPDNSRYSRNIHCLIRFMLEPDPEHRPDIFQVSYFAFKFAKKDCPVSNINNSSIPSALPEPMTASEAAARKSQIKARITDTIGPTETSIAPRQRPKANSATTATPSVLTIQSSATPVKVLAPGEFGNHRPKGALRPGNGPEILLGQGPPQQPPQQHRVLQQLQQGDWRLQQLHLQHRHPHQQQQQQQQQQQQQQQQQQQQQQQQQQQHHHHHHHHLLQDAYMQQYQHATQQQQMLQQQFLMHSVYQPQPSASQYPTMMPQYQQAFFQQQMLAQHQPSQQQASPEYLTSPQEFSPALVSYTSSLPAQVGTIMDSSYSANRSVADKEAIANFTNQKNISNPPDMSGWNPFGEDNFSKLTEEELLDREFDLLRSSKGHLKAYFASQ

SEQ ID NO: 42787 - protein, 675 aa, Homo sapiens
MQGGSPLQASPDKVPLEVHRKTSGLVSLHSRRGAKAGVSAEPTTRTYDLNKPPEFSFEKARVRKDSSEKKLITDALNKNQFLKRLDPQQIKDMVECMYGRNYQQGSYIIKQGEPGNHIFVLAEGRLEVFQGEKLLSSIPMWTTFGELAILYNCTRTASVKAITNVKTWALDREVFQNIMRRTAQARDEQYRNFLRSVSLLKNLPEDKLTKIIDCLEVEYYDKGDYIIREGEEGSTFFILAKGKVKVTQSTEGHDQPQLIKTLQKGEYFGEKALISDDVRSANIIAEENDVACLVIDRETFNQTVGTFEELQKYLEGYVANLNRDDEKRHAKRSMSNWKLSKALSLEMIQLKEKVARFSSSSPFQNLEIIATLGVGGFGRVELVKVKNENVAFAMKCIRKKHIVDTKQQEHVYSEKRILEELCSPFIVKLYRTFKDNKYVYMLLEACLGGELWSILRDRGSFDEPTSKFCVACVTEAFDYLHRLGIIYRDLKPENLILDAEGYLKLVDFGFAKKIGSGQKTWTFCGTPEYVAPEVILNKGHDFSVDFWSLGILVYELLTGNPPFSGVDQMMTYNLILKGIEKMDFPRKITRRPEDLIRRLCRQNPTERLGNLKNGINDIKKHRWLNGFNWEGLKARSLPSPLQRELKGPIDHSYFDKYPPEKGMPPDELSGWDKDF

SEQ ID NO: 42788 - protein, 139 aa, Homo sapiens
MSSIVMKAESRDIPIWGTLIQYIRPVFVSRSDQDSRRKTVEEIKRRAQSNGKWPQIMIFPEGTCTNRTCLITFKPGAFIPGAPVQPVVLRYPNKLDTITWTWQGPGALEILWLTLCQFHNQVEIEVRMDTELHSALHSG

SEQ ID NO: 42789 - protein, 2265 aa, Homo sapiens
MPGETHSAAPGTAADLSRCQGCASLQQNLNEYVEALITLKQKIINTDNLLTEYQKKCDELQFARRENSNLHHQVEEMLQKISPLQKCQEELGSLKAELEEKKSSLKLYQDTHQEYARVKEECLKSDAQKKKLEAKVKKLQEAAVKQTQDFKQLRNEKKILEKEFKKTQERLDEFSKQKNEKELRHIGTQISSDSYGSIDKRKVKLLLKELWLCVNTTHRLPGEGSRCVPEKPAKAITSSRVPGEDGTLPPTQGSPLRTSNVQTCLTKLSMEIKEDFLCQNVEKQSSSGTNCSSDHVFNENGNLEVLVQSHRDGGSTEFVDHDHFFDEDLQAAIDFFKLPPPLLSPVPSPPPMSSPHPGSLPSSFAPETYFGEYTDSSDNDSVQLRNSAECVSEDDTTESQNYFGSLRKNKGSGTWEEKPKSHEAIQALNTWEVNKVTTSGLETFTATLRESSATHSLVGEKHWTTASRSMSDRKRDILHETKTQMEVREMDKSVQTEKTIHKLTRGLCIERLSASPAQEKEAAPGKSELCSSPLGKRPLNELMESEGKTVLSKMMGSPKSEFTKWTRINEITSEPDRITVSGHFHRLSRELEKEKEDTQGFTLGESPESEDDDSGDGMDVAGLDIETSFSSSSTLVALSVGSNPQSSSGLDCGNDTDITTKVFSTEPHHSEHKLQTKTLNTLHLQSEPPECSIGGNNLENSLCALSPELGASNFNDQKSSGIEYTKVVKGLTKIHSLPRSVFMKATKDGQCESQDPRIELTLNKPDFTSLIGSQAALIKSGLGFVKSTSWHHSDLLRKGGEESLRAKSEHEQKTSHQLQKAMPFLQNRGPTPKPDLLRENNNPVEFKTTASVLPNQVSVITKQTRPEKVQSAKLEHLRPHRVEPTLVTENSGNKTGMSTVAKCDGERDDTTQNITEVAAVKSISPEVSASRRKLDFNSPGGSSPVENSDCSTNSRLSFSPENILIQNQDIVREAAVQGDGQKQRQPQATDLDSSGTHGSEMLPATEVTVSGGFSVEETSCGDTGRSGGEALAVANDSTSTPQNANGLWKLKSTTPGGALPECFGTTDTTFSSAFCRKHGETQDTSQSSLPGTLHCYTGIREGGDDTEVESEAFSCSEGSEQQDAPDDSQKNLGDTDAAVAEVRPSLEVGYLTSALQDFNISTFSELDRLSTSEVVMFLESCQLGDYSSGDSVSECSSKGTLSKEMNKELKASEIGEKYRKQPCEEETLGTCEEWIESEEDDYSLKNTSQLTQCSLETLSEVLTKIRQELQTNSEDCNGKDTGSLLLLNVNNNMTTENLKEKSPFRETTGSSSHASEPTPQAAALDTEGSSPISGMPQNENPQSRPEARSDAGRQTDGGEEDLPEPVEPSALCSDSVMEPSIEQSSNCEAETTFQCQIATVTSEVINVLINKDQNLVIEKGDNWTIISGVAVLPHVDQVTLCDIPGDIPISQDQGELEAGCIPVTSAEKSPEASHTGPAFQEAPCGNNLSCPQEDVSSSGQSTNFDKSRLRNRPVKPSIWISSQIYDQNFETQIVASDHTYYNSKLEPSGKNKNRSKISNKDQSNKPVKTSASSRVETHQSEVAQSFSGEKANTKTQRSQTQTILANADTSTPTDCSPDTLSKIRQEVGPPLPPLLAPLIATPPRTSQPLSPLISSSSPSSPASPVGQVSPFRETPVPPAMSPWPEDPRRASPPDPSPSPSAASASERVVPSPLQFCAATPKHALPVPGRLPPCASGHAAVGGPQENSVKILDTMYPELSARARTLNILKGNIQLTRGPPADCKNLPGPASAMIGFKTITSAATAFVKTGSSSGGDCNQDKSRDLGTQQDSSGKRTLSTSTLRSAKRLRLDTGSPEPETRGVTAEGIHKNLPGNLPPAEVATTNEERSCSSPAVSAVSQLPLSPKETVESHDKAIANALKKIAEFSFDLLPVIRSHVYVGNISKKPVMRDQEKEVVYEFSTTKKHLAECLLHSILSELKIQKISMDHNYIHALCRVYVGICRQLGDLERARLFCYSLLKEDFPESEKLTLFIANMWHDIFLSQSVINKAMQLVARQRAKGEVLNCLRAFLNWEKNAPVDVGFMVSKLLLTIQLCPKTEFQPSEKFGEDLSDNTWEYIFAIDLLCCHQKWIWTHDNIISKELWPVMDKWIKYRKGHANIAYTPDIIIASILRLIGRLGQLGLKEGFPSAVKNISSVIGMFIQHAHDEDIPWGIQLAAVYALCDLSPSNPAEISKILEAWRREASKSVPSAIVSCLEEVSALSTEELG

SEQ ID NO: 42790 - protein, 852 aa, Homo sapiens [sequence omitted]

SEQ ID NO: 42791 - protein, 172 aa, Homo sapiens
MLRYIKKGHPKYRIGVGAPVYMAAVLEYLTAEILELAGNAARDNKKGRVTPRHILLAVANDEELNQLLKGVTIASGGVLPNIHPELLAKKRGSKGKLEAIITPPPAKKAKSPSQKKPVSKKAGGKKGARKSKKKQGEVSKAASADSTTEGTPADGFTVLSTKSLFLGQKPPQ

SEQ ID NO: 42792 - protein, 20 aa, Homo sapiens
MFLLKFLNKLAEERRQKKET

SEQ ID NO: 42793 - protein, 933 aa, Homo sapiens
MDVNSSKYPSLLLHSQEEKTSTATSKTQTRLEGEVTPNSLSTSYKTVSLPLSSPNIKLNLTSPKRGQKREEGWKEVVRRSKKLSVPASVVSRIMGRGGCNITAIQDVTGAHIDVDKQKDKNGERMITIRGGTESTRYAVQLINALIQDPAKELEDLIPKNHIRTPASTKSIHANFSSGVGTTAASSKNAFPLGAPTLVTSQATTLSTFQPANKLNKNVPTNVRSSFPVSLPLAYPHPHFALLAAQTMQQIRHPRLPMAQFGGTFSPSPNTWGPFPVRPVNPGNTNSSPKHNNTSRLPNQNGTVLPSESAGLATASCPITVSSVVAASQQLCVTNTRTPSSVRKQLFACVPKTSPPATVISSVTSTCSSLPSVSSAPITSGQAPTTFLPASTSQAQLSSQKMESFSAVPPTKEKVSTQDQPMANLCTPSSTANSCSSSASNTPGAPETHPSSSPTPTSSNTQEEAQPSSVSDLSPMSMPFASNSEPAPLTLTSPRMVAADNQDTSNLPQLAVPAPRVSHRMQPRGSFYSMVPNATIHQDPQSIFVTNPVTLTPPQGPPAAVQLSSAVNIMNGSQMHINPANKSLPPTFGPATLFNHFSSLFDSSQVPANQGWGDGPLSSRVATDASFTVQSAFLGNSVLGHLENMHPDNSKAPGFRPPSQRVSTSPVGLPSIDPSGSSPSSSSAPLASFSGIPGTRVFLQGPAPVGTPSFNRQHFSPHPWTSASNSCDSPIPSVSSGSSSPLSATSAPPTLGQPKGVSASQDRKIPPPIGTERLARIRQGGSVAQAPAGTSFVAPVGHSGIWSFGVNAVSEGLSGWSQSVMGNHPMHQQLSDPSTFSQHQPMERDDSGMVAPSNIFHQPMGLPISMYGGTIIPSHPQLADVPGGPLFNGLHNPDPAWNPMIKVIQNSTECTDAQQIWPGTWAPHIGNMHLKYVN

SEQ ID NO: 42794 - protein, 242 aa, Homo sapiens [sequence omitted]

SEQ ID NO: 42795 - protein, 189 aa, Homo sapiens [sequence omitted]

SEQ ID NO: 42796 - protein, 328 aa, Homo sapiens
MRAENDTIKGRLNYSYPGSDSSLLINGQSSLFPMEDGFLDDGRGDQPLHSGLGSPHCFSHQNGERVERYSRKVFVGGLPPDIDEDEITASFRRFGPLIVDWPHKAESKSYFPPKGYAFLLFQDESSVQALIDACIEEDGKLYLCVSSPTIKDKPVQIRPWNLSDSDFVMDGSQPLDPRKTIFVGGVPRPLRAVELAMIMDRLYGGVCYAGIDTDPELKYPKGAGRVAFSNQQSYIAAISARFVQLQHGEIDKRVEVKPYVLDDQLCDECQGARCGGKFAPFFCANVTCLQYYCEYCWAAIHSRAGREFHKPLVKEGGDRPRHISFRWN

SEQ ID NO: 42797 - protein, 599 aa, Homo sapiens
MCLMPASALVPATWLRWRSSSRCVSGASALGGGDSHQGLRAGVGMAGGWCRLSTAVFLRKGVDVIVNASSVEDIDAGAIGQRLSNGLARLSSPVLHRLRLREDENAEPVGTTYQKTDAAVEMKRINREQFWEQAKKEEELRKEEERKKALDERLRFEQERMEQERQEQEERERRYREREQQIEEHRRKQQTLEAEEAKRRLKEQSIFGDHRDEEEETHMKKSESEVEEAAAIIAQRPDNPREFFKQQERVASASAGSCDVPSPFNHRPGSHLDSHRRMAPTPIPTRSPSDSSTASTPVAEQIERALDEVTSSQPPPLPPPPPPAQETQEPSPILDSEETRAAAPQAWAGPMEEPPQAQAPPRGPGSPAEDLMFMESAEQAVLAAPVEPATADATEIHDAADTIETDTATADTTVANNVPPAATSLIDLWPGNGEGASTLQGEPRAPTPPSGTEVTLAEVPLLDEVAPEPLLPAGEGCATLLNFDELPEPPATFCDPEEVEGESLAAPQTPTLPSALEELEQEQEPEPHLLTNGETTQKEGTQASEGYFSQSQEEEFAQSEELCAKAPPPVFYNKPPEIDITCWDADPVPEEEEGFEGGD

SEQ ID NO: 42798 - protein, 48 aa, Homo sapiens [sequence omitted]

SEQ ID NO: 42799 - protein, 347 aa, Homo sapiens
MSPHIKSVDDVVVLGMNLSKFNKLTQFFICVAGVFVFYLIYGYLQELIFSVEGFKSCGWYLTLVQFAFYSIFGLIELQLIQDKRRRIPGKTYMIIAFLTVGTMGLSNTSLGYLNYPTQVIFKCCKLIPVMLGGVFIQGKRYNVADVSAAICMSLGLIWFTLADSTTAPNFNLTGVVLISLALCADAVIGNVQEKAMKLHNASNSEMVLYSYSIGFVYILLGLTCTSGLGPAVTFCAKNPVRTYGYAFLFSLTGYFGISFVLALIKIFGALIAVTVTTGRKAMTIVLSFIFFAKPFTFQYVWSGLLVVLGIFLNVYSKNMDKIRLPSLYDLINKSVEARKSRTLAQTV

SEQ ID NO: 42800 - protein, 240 aa, Homo sapiens [sequence omitted]

SEQ ID NO: 42801 - protein, 433 aa, Homo sapiens
MDKRALLASPGFAAAAAAAAAPGAYIQILTTNTSTTSCSSSLQSGAVAAGPLLPSAPGAEQTAGSLLYTTPHGPSSRAGLLQQPPALGRGGSGGGGGPPAKRRLELGESGHQYLSDGLKTPKGKGRAALRSPDSPKTPKSPSEKTRYDTSLGLLTKKFIQLLSQSPDGVLDLNKAAEVLKVQKRRIYDITNVLEGIHLIKKKSKNNVQWMGCSLSEDGGMLAQCQGLSKEVTELSQEEKKLDELIQSCTLDLKLLTEDSENQRLAYVTYQDIRKISGLKDQTVIVVKAPPETRLEVPDSIESLQIHLASTQGPIEVYLCPEETETHSPMKTNNQDHNGNIPKPASKDLASTNSGHSDCSVSMGNLSPLASPANLLQQTEDQIPSNLEGPFVNLLPPLLQEDYLLSLGEEEGISDLFDAYDLEKLPLVEDFMCS

SEQ ID NO: 42802 - protein, 26 aa, Homo sapiens
MPGDCLPLAVHSHSREDGIIYNPAHG

SEQ ID NO: 42803 - protein, 527 aa, Homo sapiens
MSAETMELRWVSSSLRQVVNVYADGKEVEDRQSAPYRGRTSILRDGITAGKAALRIHNVTASDSGKYLCYFQDGDFYEKALVELKVAALGSDLHIEVKGYEDGGIHLECRSTGWYPQPQIKWSDTKGENIPAVEAPVVADGVGLYAVAASVIMRGSSGGGVSCIIRNSLLGLEKTASISIADPFFRSAQPWIAALAGTLPISLLLLAGASYFLWRQQKEKIALSRETEREREMKEMGYAATEQEISLREKLQEELKWRKIQYMARGEKSLAYHEWKMALFKPADVILDPDTANAILLVSEDQRSVQRAEEPRDLPDNPERFEWRYCVLGCENFTSGRHYWEVEVGDRKEWHIGVCSKNVERKKGWVKMTPENGYWTMGLTDGNKYRALTEPRTNLKLPEPPRKVGIFLDYETGEISFYNATDGSHIYTFPHASFSEPLYPVFRILTLEPTALTICPIPKEVESSPDPDLVPDHSLETPLTPGLANESGEPQAEVTSLLLPAHPGAEVSPSATTNQNHKLQARTEALY

SEQ ID NO: 42804 - protein, 1245 aa, Homo sapiens
METERLVLPPPDPLDLPLRAVELGCTGHWELLNLPGAPESSLPHGLPPCAPDLQQEAEQLFLSSPAWLPLHGVEHSARKWQRKTDPWSLLAVLGAPVPSDLQAQRHPTTGQILGYKEVLLENTNLSATTSLSLRRPPGPASQSLWGNPTQYPFWPGGMDEPTITDLNTREEAEEEIDFEKDLLTIPPGFKKGMDFAPKDCPTPAPGLLSLSCMLEPLDLGGGDEDENEAVGQPGGPRGDTVSASPCSAPLARASSLEDLVLKEASTAVSTPEAPEPPSQEQWAIPVDATSPVGDFYRLIPQPAFQWAFEPDVFQKQAILHLERHDSVFVAAHTSAGKTVVAEYAIALAQKHMTRTIYTSPIKALSNQKFRDFRNTFGDVGLLTGDVQLHPEASCLIMTTEILRSMLYSGSDVIRDLEWVIFDEVHYINDVERGVVWEEVLIMLPDHVSIILLSATVPNALEFADWIGRLKRRQIYVISTVTRPVPLEHYLFTGNSSKTQGELFLLLDSRGAFHTKGYYAAVEAKKERMSKHAQTFGAKQPTHQGGPAQDRGVYLSLLASLRTRAQLPVVVFTFSRGRCDEQASGLTSLDLTTSSEKSEIHLFLQRCLARLRGSDRQLPQVLHMSELLNRGLGVHHSGILPILKEIVEMLFSRGLVKVLFATETFAMGVNMPARTVVFDSMRKHDGSTFRDLLPGEYVQMAGRAGRRGLDPTGTVILLCKGRVPEMADLHRMMMGKPSQLQSQFRLTYTMILNLLRVDALRVEDMMKRSFSEFPSRKDSKAHEQALAELTKRLGALEEPDMTGQLVDLPEYYSWGEELTETQHMIQRRIMESVNGLKSLSAGRVVVVKNQEHHNALGVILQVSSNSTSRVFTTLVLCDKPLSQDPQDRGPATAEVPYPDDLVGFKLFLPEGPCDHTVVKLQPGDMAAITTKVLRVNGEKILEDFSKRQQPKFKKDPPLAAVTTAVQELLRLAQAHPAGPPTLDPVNDLQLKDMSVVEGGLRARKLEELIQGAQCVHSPRFPAQYLKLRERMQIQKEMERLRFLLSDQSLLLLPEYHQRVEVLRTLGYVDEAGTVKLAGRVACAMSSHELLLTELMFDNALSTLRPEEIAALLSGLVCQSPGDAGDQLPNTLKQGIERVRAVAKRIGEVQVACGLNQTVEEFVGELNFGLVEVVYEWARGMPFSELAGLSGTPEGLVVRCIQRLAEMCRSLRGAARLVGEPVLGAKMETAATLLRRDIVFAASLYTQ

SEQ ID NO: 42805 - protein, 125 aa, Homo sapiens [sequence omitted]

SEQ ID NO: 42806 - protein, 346 aa, Homo sapiens [sequence omitted]

SEQ ID NO: 42807 - protein, 679 aa, Homo sapiens [sequence omitted]

SEQ ID NO: 42808 - protein, 667 aa, Homo sapiens [sequence omitted]

SEQ ID NO: 42809 - protein, 700 aa, Homo sapiens
MSLIINTFYSNKEIFLRELISNASDALDKIRYESLTDPSKLDSGKELKIDIIPNPQERTLTLVDTGIGMTKADLINNLGTIAKSGTKAFMEALQAGADISMIGQFGVGFYSAYLVAEKVVVITKHNDDEQYAWESSAGGSFTVRADHGEPIGRGTKVILHLKEDQTEYLEERRVKEVVKKHSQFIGYPITLYLEKEREKEISDDEAEEEKGEKEEEDKDDEEKPKIEDVGSDEEDDSGKDKKKKTKKIKEKYIDQEELNKTKPIWTRNPDDITQEEYGEFYKSLTNDWEDHLAVKHFSVEGQLEFRALLFIPRRAPFDLFENKKKKNNIKLYVRRVFIMDSCDELIPEYLNFIRGVVDSEDLPLNISREMLQQSKILKVIRKNIVKKCLELFSELAEDKENYKKFYEAFSKNLKLGIHEDSTNRRRLSELLRYHTSQSGDEMTSLSEYVSRMKETQKSIYYITGESKEQVANSAFVERVRKRGFEVVYMTEPIDEYCVQQLKEFDGKSLVSVTKEGLELPEDEEEKKKMEESKAKFENLCKLMKEILDKKVEKVTISNRLVSSPCCIVTSTYGWTANMERIMKAQALRDNSTMGYMMAKKHLEINPDHPIVETLRQKAEADKNDKAVKDLVVLLFETALLSSGFSLEDPQTHSNRIYRMIKLGLGIDEDEVAAEEPNAAVPDEIPPLEGDEDASRMEEVD

SEQ ID NO: 42810 - protein, 590 aa, Homo sapiens [sequence omitted]

SEQ ID NO: 42811 - protein, 690 aa, Homo sapiens
MEKKNPPSGDLLNVYELFEKANASNSPSSLRLLNEPQKRDCGSTGAGTDNDPNIYFLIQKMFYMLNTLTSNMSQLHSKVDLLSLEVSRIKKQVSPTEMVAKFQPPPEYQLTAAELKQIVDQSLSGGDLACRLLVQLFPELFSDVDFSRGCSACGFAAKRKLESLHLQLIRNYVEVYYPSVKDTAVWQAECLPQLNDFFSRFWAQREMEDSQPSGQVASFFEAEQVDPGHFLDNKDQEEALSLDRSSTIASDHVVDTQDLTEFLDEASSPGEFAVFLLHRLFPELFDHRKLGEQYSCYGDGGKQELDPQRLQIIRNYTEIYFPDMQEEEAWLQQCAQRINDELEGLGLDAGSEGDPPRDDCYDSSSLPDDISVVKVEDSFEGERPGRRSKKIWLVPIDFDKLEIPQPDFEVPGADCLLSKEQLRSIYESSLSIGNFASRLLVHLFPELFTHENLRKQYNCSGSLGKKQLDPSRIKLIRHYVQLLYPRAKNDRVWTLEFVGKLDERCRRRDTEQRRSYQQQRKVHVPGPECRDLTSYAINPERFREEFEGPPLPPERSSKDFCKIPLDELVVPSPDFPVPSPYLLSDKEVREIVQQSLSVGNFAARLLVRLFPELFTAENLRLQYNHSGACNKKQLDPTRLRLIRHYVEAVYPVEKMEEVWHYECIPSIDERCRRPNRKKCDILKKAKKVEK

SEQ ID NO: 42812 - protein, 346 aa, Homo sapiens [sequence omitted]

SEQ ID NO: 42813 - protein, 522 aa, Homo sapiens
MRELCGHLNIIYDLSWSKDDHYILTSSSDGTARIWKNEINNTNTFRVLPHPSFVYTAKFHPAVRELVVTGCYDSMIRIWKVEMREDSAILVRQFDVHKSFINSLCFDTEGHHMYSGDCTGVIVVWNTYVKINDLEHSVHHWTINKEIKETEFKGIPISYLEIHPNGKRLLIHTKDSTLRIMDLRILVARKFVGAANYREKIHSTLTPCGTFLFAGSEDGIVYVWNPETGEQVAMYSDLPFKSPIRDISYHPFENMVAFCAFGQNEPILLYIYDFHVAQQEAEMFKRYNGTFPLPGIHQSQDALCTCPKLPHQGSFQIDEFVHTESSSTKMQLVKQRLETVTEVIRSCAAKVNKNLSFTSPPAVSSQQSKLKQSNMLTAQEILHQFGFTQTGIISIERKPCNHQVDTAPTVVALYDYTANRSDELTIHRGDIIRVFFKDNEDWWYGSIGKGQEGYFPANHVASETLYQELPPEIKERSPPLSPEEKTKIEKSPAPQKQSINKNKSQDFRLGSESMTHKELKKS

SEQ ID NO: 42814 - protein, 1447 aa, Homo sapiens
MRQQAQTVQADVVPINITGENFDRQASLRRSLIYTDTLVRRPKKVKRRKTITGVPDNIQKELASGTGQDDADGHSVYTPDHYSTLGRFNSCRSAGQRSETRDSSCQTEDVKVVPPSMRRIRAQKGQGIAAQMGHFSGSSGNMSVLSDSAGIVFPSRLDSDAGFHSLPRSGARANIQSLEPRLGALGPAGDMNGTFLYQRGHPQADENLGHLGGASGTGTLLRPKSQELRHFESENIMSPACVVSPHATYSTSIIPNATLSSSSEVIAIPTAQSAGQRESKSSGSSHARIKSRDHLISRHAVKGDPQSPGRHWNEGHATILSQDLDPHSPGEPALLSLCDSAVPLNAPANRENGSQAMPYNCRNNLAFPAHPQDVDGKSESSYSGGGGHSSSEPWEYKSSGNGRASPLKPHLATPGYSTPTSNMSSCSLDQTSNKEDAGSLYSEDHDGYCASVHTDSGHGSGNLCNSSDGFGNPRHSVINVFVGRAQKNQGDRSNYQDKSLSRNISLKKAKKPPLPPSRTDSLRRIPKKSSQCNGQVLNESLIATLQHSLQLSLPGKSGSSPSQSPCSDLEEPWLPRSRSQSTVSAGSSMTSATTPNVYSLCGATPSQSDTSSVKSEYTDPWGYYIDYTGMQEDPGNPAGGCSTSSGVPTGNGPVRHVQEGSRATMPQVPGGSVKPKIMSPEKSHRVISPSSGYSSQSNTPTALTPVPVFLKSVSPANGKGKPKPKVPERKSSLISSVSISSSSTSLSSSTSTEGSGTMKKLDPAVGSPPAPPPPPVPSPPFPCPADRSPFLPPPPPVTDCSQGSPLPHSPVFPPPPPEALIPFCSPPDWCLSPPRPALSPILPDSPVSLPLPPPLLPSSEPPPAPPLDPKFMKDTRPPFTNSGQPESSRGSLRPPSTKEETSRPPMPLITTEALQMVQLRPVRKNSGAEAAQLSERTAQEQRTPVAPQYHLKPSAFLKSRNSTNEMESESQPASVTSSLPTPAKSSSQGDHGSAAERGGPVSRSPGAPSAGEAEARPSPSTTPLPDSSPSRKPPPISKKPKLFLVVPPPQKDFAVEPAENVSEALRAVPSPTTGEEGSVHSREAKESSAAQAGSHATHPGTSVLEGGAAGSMSPSRVEANVPMVQPDVSPAPKQEEPAENSADTGGDGESCLSQQDGAAGVPETNAAGSSSEACDFLKEDGNDEVMTPSRPRTTEDLFAAIHRSKRKVLGRRDSDDDHSRNHSPSPPVTPTGAAPSLASPKQVGSIQRSIRKSSTSSDNFKALLLKKGSRSDTSARMSAAEMLKNTDPRFQRSRSEPSPDAPESPSSCSPSKNRRAQEEWAKNEGLMPRSLSFSGPRYGRSRTPPSAASSRYSMRNRIQSSPMTVISEGEGEAVEPVDSIARGALGAAEGCSLDGLAREEMDEGGLLCGEGPAASLQPQAPGPVDGTASAEGREPSPQCGGSLSEES

SEQ ID NO: 42815 - protein, 464 aa, Homo sapiens [sequence omitted]

SEQ ID NO: 42816 - protein, 517 aa, Homo sapiens
MKSYIYVHTVSLDKGENHGIAWQARKELHKAVRKVLATSAKILRNPFADPFSTVDIEDHECAVWLLLRKSKSDDKTTRLEAVREMSETHHWHDYQYRIIAQACDPKTLIGLARSEESDLRFFLLPPPLPSLKEDSSTEEELRQLLASLPQTELDECIQYFTSLALSESSQSLAAQKGGLWCFGGNGLPYAESFGEVPSATVEMFCLEAIVKHSEISTHCDKIEANGGLQLLQRLYRLHKDCPKVQRNIMRVIGNMALNEHLHSSIVRSGWVSIMAEAMKSPHIMESSHAARILANLDRETVQEKYQDGVYVLHPQYRTSQPIKADVLFIHGLMGAAFKTWRQQDSEQAVIEKPMEDEDRYTTCWPKTWLAKDCPALRIISVEYDTSLSDWRARCPMERKSIAFRSNELLRKLRAAGVGDRPVVWISHSMGGLLVKKMLLEASTKPEMSTVINNTRGIIFYSVPHHGSRLAEYSVNIRYLLFPSLEVKELSKGNTFCHKGNWGYINISYTEKKKKFLP

SEQ ID NO: 42817 - protein, 675 aa, Homo sapiens
MYSPPQCVPENTGYTYALSSSYSSDALDFETEHKLDPVFDSPRMSRRSLRLATTACTLGDGEAVGADSGTSSAVSLKNRAARTTKQRRSTNKSAFSINHVSRQVTSSGVSHGGTVSLQDAVTRRPPVLDESWIREQTTVDHFWGKAASGVFWWLGIGWYQFVTLISWLNVFLLTRCLRNICKFLVLLIPLFLLLGLSLRGQGNFFSFLPVLNWASMHRTQRVDDPQDVFKPTTSRLKQPLQGDSEAFPWHWMSGVEQQVASLSGQCHHHGENLRELTTLLQKLQARVDQMEGGAAGPSASVRDAVGQPPRETDFMAFHQEHEVRMSHLEDILGKLREKSEAIQKELEQTKQKTISAVGEQLLPTVEHLQLELDQLKSELSSWRHVKTGCETVDAVQERVDVQVREMVKLLFSEDQQGGSLEQLLQRFSSQFVSKGDLQTMLRDLQLQILRNVTHHVSVTKQLPTSEAVVSAVSEAGASGITEAQARAIVNSALKLYSQDKTGMVDFALESGGGSILSTRCSETYETKTALMSLFGIPLWYFSQSPRVVIQPDIYPGNCWAFKGSQGYLVVRLSMMIHPAAFTLEHIPKTLSPTGNISSAPKDFAVYGLENEYQEEGQLLGQFTYDQDGESLQMFQALKRPDDTAFQIVELRIFSNWGHPEYTCLYRFRVHGEPVK

SEQ ID NO: 42818 - protein, 1286 aa, Homo sapiens
MDAGSASWGAVSSLNDVSNHTLSLGPVPGAVVYSSSSVPDKSKPSPQKDQALGDGIAPPQKVLFPSEKICLKWQQTHRVGAGLQNLGNTCFANAALQCLTYTPPLANYMLSHEHSKTCHAEGFCMMCTMQAHITQALSNPGDVIKPMFVINEMRRIARHFRFGNQEDAHEFLQYTVDAMQKACLNGSNKLDRHTQATTLVCQIFGGYLRSRVKCLNCKGVSDTFDPYLDITLEIKAAQSVNKALEQFVKPEQLDGENSYKCSKCKKMVPASKRFTIHRSSNVLTLSLKRFANFTGGKIAKDVKYPEYLDIRPYMSQPNGEPIVYVLYAVLVHTGFNCHAGHYFCYIKASNGLWYQMNDSIVSTSDIRSVLSQQAYVLFYIRSHDVKNGGELTHPTHSPGQSSPRPVISQRVVTNKQAAPGFIGPQLPSHMIKNPPHLNGTGPLKDTPSSSMSSPNGNSSVNRASPVNASASVQNWSVNRSSVIPEHPKKQKITISIHNKLPVRQCQSQPNLHSNSLENPTKPVPSSTITNSAVQSTSNASTMSVSSKVTKPIPRSESCSQPVMNGKSKLNSSVLVPYGAESSEDSDEESKGLGKENGIGTIVSSHSPGQDAEDEEATPHELQEPMTLNGANSADSDSDPKENGLAPDGASCQGQPALHSENPFAKANGLPGKLMPAPLLSLPEDKILETFRLSNKLKGSTDEMSAPGAERGPPEDRDAEPQPGSPAAESLEEPDAAAGLSSTKKAPPPRDPGTPATKEGAWEAMAVAPEEPPPSAGEDIVGDTAPPDLCDPGSLTGDASPLSQDAKGMIAEGPRDSALAEAPEGLSPAPPARSEEPCEQPLLVHPSGDHARDAQDPSQSLGAPEAAERPPAPVLDMAPAGHPEGDAEPSPGERVEDAAAPKAPGPSPAKEKIGSLRKVDRGHYRSRRERSSSGEPARESRSKTEGHRHRRRRTCPRERDRQDRHAPEHHPGHGDRLSPGERRSLGRCSHHHSRHRSGVELDWVRHHYTEGERGWGREKFYPDRPRWDRCRYYHDRYALYAARDWKPFHGGREHERAGLHERPHKDHNRGRRGCEPARERERHRPSSPRAGAPHALAPHPDRFSHDRTALVAGDNCNLSDRFHEHENGKSRKRRHDSVENSDSHVEKKARRSEQKDPLEEPKAKKHKKSKKKKKSKDKHRDRDSRHQQDSDLSAACSDADLHRHKKKKKKKKRHSRKSEDFVKDSELHLPRVTSLETVAQFRRAQGGFPLSGGPPLEGVGPFREKTKHLRMESRDDRCRLFEYGQGD

SEQ ID NO: 42819 - protein, 184 aa, Homo sapiens
MVEKQDQSPSLRTGEEKRDVSISRLREAFSLRHTTENKPHSPKTPEPRRSPLGQKRGMSSSSTSDAISDKGVLRPQKEAVSSSQGPSDPTDRAEVEKDSGHGSTSVDSEGFSIPDTGSHCSSECVASTPGDRGSQEHVDSQEKAPETDDSFSDVDCHSNQEDTGCKFQVLPQPTNLTSPNTKVF

SEQ ID NO: 42820 - protein, 850 aa, Homo sapiens
MEKKEEEENGERPRKKKEKEKEKEKEKEKEKEREKEKEKATVSENVAASAAATTPATSPPAVNTSPSVPTTTTATEEQVSEPKKWNLRRNRPLLDFVSMEELNDMDDYDSEDDNDWRPTVVKRKGRSASQKEGSDGDNEDDEDEGSGSDEDENDEGNDEDHSSPASEGGCKKKKSKVLSRNSADDEELTNDSLTLSQSKSNEDSLILEKSQNWSSQKMDHILICCVCLGDNSEDADEIIQCDNCGITVHEGCYGVDGESDSIMSSASENSTEPWFCDACKCGVSPSCELCPNQDGIFKETDAGRWVHIVCALYVPGVAFGDIDKLRPVTLTEMNYSKYGAKECSFCEDPRFARTGVCISCDAGMCRAYFHVTCAQKEGLLSEAAAEEDIADPFFAYCKQHADRLDRKWKRKNYLALQSYCKMSLQEREKQLSPEAQARINARLQQYRAKAELARSTRPQAWVPREKLPRPLTSSASAIRKLMRKAELMGISTDIFPVDNSDTSSSVDGRRKHKQPALTADFVNYYFERNMRMIQIQENMAEQKNIKDKLENEQEKLHVEYNKLCESLEELQNLNGKLRSEGQGIWALLGRITGQKLNIPAILRAPKERKPSKKEGGTQKTSTLPAVLYSCGICKKNHDQHLLLLCDTCKLHYHLGCLDPPLTRMPRKTKNSYWQCSECDQAGSSDMEADMAMETLPDGTKRSRRQIKEPVKFVPQDVPPEPKKIPIRNTRTRGRKRSFVPEEEKHEERVPRERRQRQSVLQKKPKAEDLRTECATCKGTGDNENLVRCDECRLCYHFGCLDPPLKKSPKQTGYGWICQECDSSSSKEDENEAERKNISQELNMEQKNPKK

SEQ ID NO: 42821 - protein, 512 aa, Homo sapiens
MENPIVKSLAKAHERLEDSKLEAVSDNNLELVNEILEDITPLINVDENVAELVGILKEPHFQSLLEAHDIVASKCYDSPPSSPEMNNSSINNQLLPVDAIRILGIHKRAGEPLGVTFRVENNDLVIARILHGGMIDRQGLLHVGDIIKEVNGHEVGNNPKELQELLKNISGSVTLKILPSYRDTITPQQVFVKCHFDYNPYNDNLIPCKEAGLKFSKGEILQIVNREDPNWWQASHVKEGGSAGLIPSQFLEEKRKAFVRRDWDNSGPFCGTISSKKKKKMMYLTTRNAEFDRHEIQIYEEVAKMPPFQRKTLVLIGAQGVGRRSLKNRFIVLNPTRFGTTVPFTSRKPREDEKDGQAYKFVSRSEMEADIKAGKYLEHGEYEGNLYGTKIDSILEVVQTGRTCILDVNPQALKVLRTSEFMPYVVFIAAPELETLRAMHKAVVDAGITTKLLTDSDLKKTVDESARIQRAYNHYFDLIIINDNLDKAFEKLQTAIEKLRMEPQWVPISWVY

SEQ ID NO: 42822 - protein, 159 aa, Homo sapiens [sequence omitted]

SEQ ID NO: 42823 - protein, 152 aa, Homo sapiens
MTFTSQLIVERSSKGTRASVKEQDYLCHVYVRNDSLAGVVIADNEYPSRVAFTLLEKVLDEFSKQVDRIDWPVGSPATIHYPALDGHLSRYQNPREADPMTKVQAELDETKIILHNTMESLLERGEKLDDLVSKSEVLGTQSKAFYKTKIFN

SEQ ID NO: 42824 - protein, 125 aa, Homo sapiens
MTFTSQLIVERSSKGTRASVKEQDYLCHVYVRNDSLAGVVIADNEYPSRVAFTLLEKVLDEFSKQVDRIDWPVGSPATIHYPALDGHLSRYQNPREADPMTKVQAELDETKIILARKQNSCCAIM

SEQ ID NO: 42825 - protein, 596 aa, Homo sapiens
MNNIERYLKARGIKDATEIIFEMSKDERKDFYRTIAWGLNRPLFAVYRRVLRMYDDRNHVGKYTPEEIEKLKELRIKHGNDWATIGAALGRSASSVKDRCRLMKDTCNTGKWTEEEEKRLAEVVHELTSTEPGDIVTQGVSWAAVAERVGTRSEKQCRSKWLNYLNWKQSGGTEWTKEDEINLILRIAELDVADENDINWDLLAEGWSSVRSPQWLRSKWWTIKRQIANHKDVSFPVLIKGLKQLHENQKNNPTLLENKSGSGVPNSNTNSSVQHVQIRVARLEDNTAISSSPMAALQIPVQITHVSSADSPATVDSETITLNSGTLQTFEILPSFHLQPTGTPGTYLLQTSSSQGLPLTLTASPTVTLTAAAPASPEQIIVHALSPEHLLNTSDNVTVQCHTPRVIIQTVATEDITSSISQAELTVDSDIQSSDFPEPPDALEADTFPDEIHHPKMTVEPSFNDAHVSKFSDQNSTELMNSVMVRTEEEISDTDLKQEESPSDLASAYVTEGLESPTIEEQVDQTIDDETILIVPSPHGFIQASDVIDTESVLPLTTLTDPILQHHQEESNIIGSSLGSPVSEDSKDVEDLVNCH

SEQ ID NO: 42826 - protein, 239 aa, Homo sapiens [sequence omitted]

SEQ ID NO: 42827 - protein, 251 aa, Homo sapiens
MWKKGAQGEILCHHCTGRGGAGSGGAGSGAAGGTGGSGGGGFGAATFASTSATPPQSNGGGGGKQSKQEIHRRSARLRNTKYKSAPAAEKKVSTKGKGRRHIFKLKNPIKAPESVSTIITAESIFYKGVYYQIGDVVSVIDEQDGKPYYAQIRGFIQDQYCEKSAALTWLIPTLSSPRDQFDPASYIIGPEEDLPRKMEYLEFVCHAPSEYFKSRSSPFPTVPTRPEKGYIWTHVGPTPAITIKESVANHL

SEQ ID NO: 42828 - protein, 453 aa, Homo sapiens
MEQGLTGDGETREENKLLIPKQKISEEVHSYKVRVGRLKHDITQVPETREVYKSEDRLERLQEILRKFLYLEREFRQITISKETFTSEKNNECHEPEKSFSLDSTIDADQRVLRIQNTDDNDKYDMSFNQNSASGKHEHLNLTEDFQSSECKESLMDLSHLNKWESIPNTEKSYKCDVCGKIFHQSSALTRHQRIHTREKPYKCKECEKSFSQSSSLSRHKRIHTREKPYKCEASDKSCEASDKSCSPSSGIIQHKKIHTRAKSYKCSSCERVFSRSVHLTQHQKIHKEMPCKCTVCGSDFCHTSYLLEHQRVHHEEKAYEYDEYGLAYIKQQGIHFREKPYTCSECGKDFRLNSHLIQHQRIHTGEKAHECNECGKAFSQTSCLIQHHKMHRKEKSYECNEYEGSFSHSSDLILQQEVLTRQKAFDCDVWEKNSSQRAHLVQHQSIHTKENS

SEQ ID NO: 42829 - protein, 488 aa, Homo sapiens
MEQGLTGGFPISKPDGISQLEQDLQVFDLETKTREVLRDDCSDGETREENKLLIPKQKISEEVHSYKVRVGRLKHDITQVPETREVYKSEDRLERLQEILRKFLYLEREFRQITISKETFTSEKNNECHEPEKSFSLDSTIDADQRVLRIQNTDDNDKYDMSFNQNSASGKHEHLNLTEDFQSSECKESLMDLSHLNKWESIPNTEKSYKCDVCGKIFHQSSALTRHQRIHTREKPYKCKECEKSFSQSSSLSRHKRIHTREKPYKCEASDKSCEASDKSCSPSSGIIQHKKIHTRAKSYKCSSCERVFSRSVHLTQHQKIHKEMPCKCTVCGSDFCHTSYLLEHQRVHHEEKAYEYDEYGLAYIKQQGIHFREKPYTCSECGKDFRLNSHLIQHQRIHTGEKAHECNECGKAFSQTSCLIQHHKMHRKEKSYECNEYEGSFSHSSDLILQQEVLTRQKAFDCDVWEKNSSQRAHLVQHQSIHTKENS

SEQ ID NO: 42830 - protein, 131 aa, Homo sapiens
MIFILWPWCYSVLIPQSSQDVLFQEFVTFEDVAVHLTREEWGYLDPVQRDLYREVMLENYGNVVSLGILLRLPTTRIHSVNSCPALSHTQASAFSGETLAVLTAGISKRWPKYRLPIDIARPCSETPFPRL

SEQ ID NO: 42831 - protein, 133 aa, Homo sapiens
MEENEKLKRILKSHGKDEECVLEAENKKLVEDQEKLKTELRKTSDALSKAQNDVMEMKMQSERLSKEYDQLLKEHSELQVPLGSFYILAFAPGLHNPHPSSPRSGGGFSAIDNPRGALPPCLDRLERGNKKRL

SEQ ID NO: 42832 - protein, 440 aa, Homo sapiens
MDTVTEADMAIAMALMGGIGFIHHNCTPEFQANEKFEQGFITDPVVLSPSHTVGDVLEAKMRHGFSGIPITETGTMGSKLVGIVTSRDIDFLAEKDHTTLLSEVMTPRIELVVAPAGVTLKEANEILQRSKKGKLPIVNDCDELVAIIARTDLKKNRDYPLASKDSQKQLLCGAAVGTREDDKYRLDLLTQAGVDVIVLDSSQGNSVYQIAMVHYIKQKYPHLQVIGGNVVTAAQAKNLIDAGVDGLRVGMGCGSICITQEVMACGRPQGTAVYKVAEYARRFGVPIIADGGIQTVGHVVKALALGASTVMMGSLLAATTEAPGEYFFSDGVRLKKYRGMGSLDAMEKSSSSQKRYFSEGDKVKIAQGVSGSIQDKGSIQKFVPYLIAGIQHGCQDIGARSLSVLRSMMYSGELKFEKRTMSAQIEGGVHGLHSYEKRLY

SEQ ID NO: 42833 - protein, 519 aa, Homo sapiens
MVTVALSVALLALLKWYSTSAFSRLEKLGLRHPKPSPFIGNLTFFRQGFWESQMELRKLYGPLCGYYLGRRMFIVISEPDMIKQVLVENFSNFTNRMASGLEFKSVADSVLFLRDKRWEEVRGALMSAFSPEKLNEMVPLISQACDLLLAHLKRYAESGDAFDIQRCYCNYTTDVVASVAFGTPVDSWQAPEDPFVKHCKRFFEFCIPRPILVLLLSFPSIMVPLARILPNKNRDELNGFFNKLIRNVIALRDQQAAEERRRDFLQMVLDARHSASPMGVQDFDIVRDVFSSTGCKPNPSRQHQPSPMARPLTVDEIVGQAFIFLIAGYEIITNTLSFATYLLATNPDCQEKLLREVDVFKEKHMAPEFCSLEEGLPYLDMVIAETLRMYPPAFRFTREAAQDCEVLGQRIPAGAVLEMAVGALHHDPEHWPSPETFNPERFTAEARQQHRPFTYLPFGAGPRSCLGVRLGLLEVKLTLLHVLHKFRFQACPETQVPLQLESKSALGPKNGVYIKIVSR

SEQ ID NO: 42834 - protein, 639 aa, Homo sapiens
MERKIESQAARLLSLEGRTGMAEKKLADCEKTAVEFGNQLEGKWAVLGTLLQEYGLLQRRLENVENLLRNRNFWILRLPPGSKGESPKVPVTFDDVAVYFSEQEWGKLEDWQKELYKHVMRGNYETLVSLDYAISKPEVLSQIEQGKEPCNWRRPGPKIPDVPVDPSPGSGPPVPAPDLLMQIKQEGELQLQEQQALGVEAWAAGQPDIGEEPWGLSQLDSGAGDISTDATSGVHSNFSTTIPPTSWQTDLPPHHPSSACSDGTLKLNTAASTEDVKIVIKTEVQEEEVVATPVHPTDLEAHGTLFGPGQATRFFPSPAQEGAWESQGSSFPSQDPVLGLREPARPERDMGELSPAVAQEETPPGDWLFGGVRWGWNFRCKPPVGLNPRTGPEGLPYSSPDNGEAILDPSQAPRPFNEPCKYPGRTKGFGHKPGLKKHPAAPPGGRPFTCATCGKSFQLQVSLSAHQRSCGAPDGSGPGTGGGGSGSGGGGGGSGGGSARDGSALRCGECGRCFTRPAHLIRHRMLHTGERPFPCTECEKRFTERSKLIDHYRTHTGVRPFTCTVCGKSFIRKDHLRKHQRNHAAGAKTPARGQPLPTPPAPPDPFKSPASKGPLASTDLVTDWTCGLSVLGPTDGGDM

SEQ ID NO: 42835 - protein, 601 aa, Homo sapiens
MAQKKYLQAKLTQFLREDRIQLWKPPYTDENKKVGLALKDLAKQYSDRLECCENEVEKVIEEIRCKAIERGTGNDNYRTTGIATIEVFLPPRLKKDRKNLLETRLHITGRELRSKIAETFGLQENYIKIVINKKQLQLGKTLEEQGVAHNVKAMVLELKQSEEDARKNFQLEEEEQNEAKLKEKQIQRTKRGLEILAKRAAETVVDPEMTPYLDIANQTGRSIRIPPSERKALMLAMGYHEKGRAFLKRKEYGIALPCLLDADKYFCECCRELLDTVDNYAVLQLDIVWCYFRLEQLECLDDAEKKLNLAQKCFKNCYGENHQRLVHIKGNCGKEKVLFLRLYLLQGIRNYHSGNDVEAYEYLNKARQLFKELYIDPSKVDNLLQLGFTAQEARLGLRACDGNVDHAATHITNRREELAQIRKEEKEKKRRRLENIRFLKGMGYSTHAAQQILLSNPQMWWLNDSNPETDNRQESPSQENIDRLVYMGFDALVAEAALRVFRGNVQLAAQTLAHNGGSLPPELPLSPEDSLSPPATSPSDSAGTSSASTDEDMETEAVNEILEDIPEHEEDYLDSTLEDEEIIIAEYLSYVENRKSATKKN

SEQ ID NO: 42836 - protein, 246 aa, Homo sapiens
MEPGETIVEALQREVKEEAGLHCEPETLLSVEERGPSWVRFVFLARPTGGILKTSKEADAESLQAAWYPRTSLPTPLRAHDILHLVELAAQYRQQARHPLILPQELPCDLVCQRLVATFTSAQTVWVLVGTVGMPHLPVTACGLDPMEQRGGMKMAVLRLLQECLTLHHLVVEIKGLLGLQHLGRDHSDGICLNVLVTVAFRSPGIQDEPPKVRGENFSWWKVMEEDLQSQLLQRLQGSSVVPVNR

SEQ ID NO: 42837 - protein, 123 aa, Homo sapiens
MDSEGGSLLLDEDSEVFKMLQENREGRAAPRQSSSFRLLQEALEAEERGGTPAFLPSSLSPQSSLPASRALATPPKLHTCEKCSTSIAWGWRGPGTGLHSAWSHQHLQTDPRRCPRVLILGER

SEQ ID NO: 42838 - protein, 674 aa, Homo sapiens
MPVAPYWTSPEKMEKKLHAVPAAKTVKFKCPSSGTPNPTLRWLKNGKEFKPDHRIGGYKVRYATWSIIMDSVVPSDKGNYTCIVENEYGSINHTYQLDVVERSPHRPILQAGLPANKTVALGSNVEFMCKVYSDPQPHIQWLKHIEVNGSKIGPDNLPYVQILKTAGVNTTDKEMEVLHLRNVSFEDAGEYTCLAGNSIGLSHHSAWLTVLEALEERPAVMTSPLYLEIIIYCTGAFLISCMVGSVIVYKMKSGTKKSDFHSQMAVHKLAKSIPLRRQVTVSADSSASMNSGVLLVRPSRLSSSGTPMLAGVSEYELPEDPRWELPRDRLVLGKPLGEGCFGQVVLAEAIGLDKDKPNRVTKVAVKMLKSDATEKDLSDLISEMEMMKMIGKHKNIINLLGACTQDGPLYVIVEYASKGNLREYLQARRPPGLEYCYNPSHNPEEQLSSKDLVSCAYQVARGMEYLASKKCIHRDLAARNVLVTEDNVMKIADFGLARDIHHIDYYKKTTNGRLPVKWMAPEALFDRIYTHQSDVWSFGVLLWEIFTLGGSPYPGVPVEELFKLLKEGHRMDKPSNCTNELYMMMRDCWHAVPSQRPTFKQLVEDLDRIVALTSNQEYLDLSMPLDQYSPSFPDTRSSTCSSGEDSVFSHEPLPEEPCLPRHPAQLANGGLKRR

SEQ ID NO: 42839 - protein, 300 aa, Homo sapiens
MWSWKCLLFWAVLVTATLCTARPSPTLPEQDALPSSEDDDDDDDSSSEEKETDNTKPNPVAPYWTSPEKMEKKLHAVPAAKTVKFKCPSSGTPNPTLRWLKNGKEFKPDHRIGGYKVRYATWSIIMDSVVPSDKGNYTCIVENEYGSINHTYQLDVVERSPHRPILQAGLPANKTVALGSNVEFMCKVYSDPQPHIQWLKHIEVNGSKIGPDNLPYVQILKVIMAPVFVGQSTGKETTVSGAQVPVGRLSCPRMGSFLTLQAHTLHLSRDLATSPRTSNRGHKVEVSWEQRAAGMGGAGL

SEQ ID NO: 42840 - protein, 787 aa, Homo sapiens
MEYVFELDVPGKVEDVVETLLQLHRASCLDKLGDQTAMITAILQSRLARTSFDKNRFQNISEKLHMECKAEMVTPLVTNPGHVCITDTNLYFQPLNGYPKPVVQITLQDVRRIYKRRHGLMPLGLEVFCTEDDLCSDIYLKFYEPQDRDDLYFYIATYLEHHVAEHTAESYMLQWQRGHLSNYQYLLHLNNLADRSCNDLSQYPVFPWIIHDYSSSELDLSNPGTFRDLSKPVGALNKERLERLLTRYQEMPEPKFMYGSHYSSPGYVLFYLVRIAPEYMLCLQNGRFDNADRMFNSIAETWKNCLDGATDFKELIPEFYGDDVSFLVNSLKLDLGKRQGGQMVDDVELPPWASSPEDFLQKSKDALESNYVSEHLHEWIDLIFGYKQKGSDAVGAHNVFHPLTYEGGVDLNSIQDPDEKVAMLTQILEFGQTPKQLFVTPHPRRITPKFKSLSQTSSYNASMADSPGEESFEDLTEESKTLAWNNITKLQLHEHYKIHKEAVTGITVSRNGSSVFTTSQDSTLKMFSKESKMLQRSISFSNMALSSCLLLPGDATVITSSWDNNVYFYSIAFGRRQDTLMGHDDAVSKICWHDNRLYSASWDSTVKVWSGVPAEMPGTKRHHFDLLAELEHDVSVDTISLNAASTLLVSGTKEGTVNIWDLTTATLMHQIPCHSGIVCDTAFSPDSRHVLSTGTDGCLNVIDVQTGMLISSMTSDEPQRCFVWDGNSVLSGSQSGELLVWDLLGAKISERIQGHTGAVTCIWMNEQCSSIITGGEDRQIIFWKLQY

SEQ ID NO: 42841 - protein, 620 aa, Homo sapiens
MAVWSLLSARAVTAFLLLFLPRFLQAQTFSFPFQQPEKCDNNQYFDISALSCVPCGANQRQDARGTSCVCLPGFQMISNNGGPAIICKKCPENMKGVTEDGWNCISCPSDLTAEGKCHCPIGHILDSNSGKWLLTRRIFLVDAVSGRENDLGTQPRVIRVATQISLSVHLVPNTINGNIYPPLITIAYSDIDIKDANSQSVKVSFSVTYEMDHGEAHVQTDIALGVLGGLAVLASLLKTAGWKRRIGSPMIDLQTVVKFLVYYAGDLANVFFIITVGTGLYWLIFFKAQKSVSVLLPMPIQEERFVTYVGCAFALKALQFLHKLISQITIDVFFIDWERPKGKVLKAVEGEGGVRSATVPVSIWRTYFVANEWNEIQTVRKINSLFQVLTVLFFLEVVGFKNLALMDSSSSLSRNPPSYIAPYSCILRYAVSAALWLAIGIIQVVFFAVFYERFIEDKIRQFVDLCSMSNISVFLLSHKCFGYYIHGRSVHGHADTNMEEMNMNLKREAENLCSQRGLVPNTDGQTFEIAISNQMRQHYDRIHETLIRKNGPARLLSSSASTFEQSIKAYHMMNKFLGSFIDHVHKEMDYFIKDKLLLERILGMEFMEPMEKSIFYNGIF

SEQ ID NO: 42842 - protein, 128 aa, Homo sapiens
MAVWSLLSARAVTAFLLLFLPRFLQAQTFSFPFQQPEKCDNNQYFDISALSCVPCGANQRQDARGTSCVCLPGFQMISNNGGPAIICKKCPENMKGVTEDGWNCISCPSDLTAEGKCHCPIGHILGKN

SEQ ID NO: 42843 - protein, 796 aa, Homo sapiens
MQVQELSVPLPDPQKAGGAEAENCETISEGSIDRIPMRLWVMHGAVMFGREFCYAMETALVTPILLQIGLPEQYYSLTWFLSPILGLIFTPLIGSASDRCTLSWGRRRPFILALCVGVLFGVALFLNGSAIGLALGDVPNRQPIGIVLTVLGVVVLDFSADATEGPIRAYLLDVVDSEEQDMALNIHAFSAGLGGAIGYVLGGLDWTQTFLGSWFRTQNQVLFFFAAIIFTVSVALHLFSIDEEQYSPQQERSAEEPGALDGGEPHGVPAFPDEVQSEHELALDYPDVDIMRSKSDSALHVPDTALDLEPELLFLHDIEPSIFHDASYPATPRSTSQELAKTKLPRLATFLKEAAKEDETLLDNHLNEAKVPNGSGSPTKDALGGYTRVDTKPSATSSSMRRRRHAFRRQASSTFSYYGKLGSHCYRYRRANAVVLIKPSRSMSDLYDMQKRQRQHRHRNQSGATTSSGDTESEEGEGETTVRLLWLSMLKMPRELMRLCLCHLLTWFSVIAEAVFYTDFMGQVIFEGDPKAPSNSTAWQAYNAGVKMGCWGLVIYAATGAICSALLQKYLDNYDLSVRVIYVLGTLGFSVGTAVMAMFPNVYVAMVTISTMGIVSMSISYCPYALLGQYHDIKQYIHHSPGNSKRGFGIDCAILSCQVYISQILVASALGGVVDAVGTVRVIPMVASVGSFLGFLTATFLVIYPNVSEEAKEEQKGLSSPLAGEGRAGGNSEKPTVLKLTRKEGLQGPVETESVTPAGIDVCQISSHWLVPQLLESIFLYDYFRKKIFFSTMWFS

SEQ ID NO: 42844 - protein, 136 aa, Homo sapiens
MATNFLAHEKIWFDKFKYDDAERRFYEQMNGPVAGASRQENGASVILRDIARARENIQKSLAGSSGPGASSGTSGDHGELVVRIASLEVENQSLRGGEAPGQWVGAVPGPCHLTVLPLPPQWYRSCSRPSPSWRPG

SEQ ID NO: 42845 - protein, 616 aa, Homo sapiens
MALLGSRAELEADEDVFEDALETISISSHSDMATSSLHFASCDTQQAPRQRGASTVSSSSSTKVDLKSGLEECAVALNLFLSNKFTDALELLRPWAKESMYHALGYSTIVVLQAVLTFEQQDIQNGISAMKDALQTCQKYRKKYTVVESFSSLLSRGSLEQLSEEEMHAEICYAECLLQKAALTFVQDENMINFIKGGLKIRTSYQIYKECLSILHEIQKNKLQQEFFYEFEGGVKLGSGAFNLMLSLLPARIIRLLEFIGFSGNRELGLLQLREGASGRSMRSALCCLTILAFHTYISLILGTGEVNVAEAERLLAPFLQQFPNGSLVLFYHARIELLKGNLEEAQEVFQKCISVQEEWKQFHHLCYWELMWINVFQQNWMQAYYYSDLLCKESKWSKATYVFLKAAILSMLPEEDVVATNENVVTLFRQVDSLKQRIAGKSIPTEKFAVRKARRYSASLPAPVKLILPALEMMYVWNGFSIVSKRKDLSENLLVTVEKAEAALQSQNFNSFSVDDECLVKLLKGCCLKNLQRPLQAELCYNHVVESEKLLKYDHYLVPFTLFELASLYKSQGEIDKAIKFLETARNNYKDYSLESRLHFRIQAALHLWRKPSSD

SEQ ID NO: 42846 - protein, 1157 aa, Homo sapiens
MKEKSRLEKTLQEALEKHQREKNEMESHIRETALEEFRLQEEQWEAERRELQFIVQEQDTAVQNMHKKVEKLETEHMDCSDLLRRQTSELEFSTQREERLRKEFEATTLRVRKLEENIEAERAAHLESKFNSEIIQLRIRDLEGALQVEKASQAEAVADLEIIKNEFKEVESAYEREKHNAQESFAKLNLLEKEYFSKNKKLNEDIEEQKKVIIDLSKRLQYNEKSCSELQEELVMAKKHQAFLVETCENNVKELESILDSFTVSGQWTSGIHKDKDKPPSFSVVLERLRRTLTDYQNKLEDASNEEKACNELDSTKQKIDSHTKNIKELQDKLADVNKELSHLHTKCADREALISTLKVELQNVLHCWEKEKAQAAQSESELQKLSQAFHKDAEEKLTFLHTLYQHLVAGCVLIKQPEGMLDKFSWSELCAVLQENVDALIADLNRANEKIRHLEYICKNKSDTMRELQQTQEDTFTKVAEQIKAQESCWHRQKKELELQYSELFLEVQKRAQKFQEIAEKNMEKLNHIEKSHEQLVLENSHFKKLLSQTQREQMSLLAACALMAGALYPLYSRSCALSTQRDFLQEQVNTFELFKLEIRTLAQALSTVEEKKQEEAKMKKKTFKGLIRIFRKGVIAVLAANRLKILGQSCASLFTWMESFKEGIGMLVCTGEPQDKHKFPKHQKEQLRCLQALSWLTSSDLLAAIISSMAELQDVIGKADPNSRICGHLLIGAAKNSFAKLMDKISLVMECIPLHSSRSITYVEKDSLVQRLAHGLHKVNTLALKYGLRGHVPITKSTASLQKQILGFTQRLHAAEVERRSLRLEVTEFKRSVNEMKKELDKAQGLQMQLNEFKQSKLITHEKFESACEELNNALLREEQAQMLLNEQAQQLQELNYKLELHSSEEADKNQTLGEAVKSLSEAKMELRRKDQSLRQLNRHLTQLEQDKRRLEENIHDAESALRMAAKDKECVANHMRAVENTLHKVRDQISLSWSAASRNDFTLQLPKLHLETFAMEGLKGGPEVVACQAMIKSFMDVYQLASTRIMTLEKEMTSHRSHIAALKSELHTACLRENASLQSIGSRDHSNLSIPSRAPLPADTTGIGDFLPLKAELDTTYTFLKETFINTVPHALTSSHSSPVTMSANANRPTQIGL

SEQ ID NO: 42847 - protein, 544 aa, Homo sapiens
MVLKMNKLPSNRGNTLREVQLMNRLRHPNILRFMGVCVHQGQLHALTEYMNGGTLEQLLSSPEPLSWPVRLHLALDIARGLRYLHSKGVFHRDLTSKNCLVRREDRGFTAVVGDFGLAEKIPVYREGARKEPLAVVGSPYWMAPEVLRGELYDEKADVFAFGIVLCELIARVPADPDYLPRTEDFGLDVPAFRTLVGDDCPLPFLLLAIHCCNLEPSTRAPFTEITQHLEWILEQLPEPAPLTRTALTHNQGSVARGGPSATLPRPDPRLSRSRSDLFLPPSPESPPNWGDNLTRVNPFSLREDLRGGKIKLLDTPSKPVLPLVPPSPFPSTQLPLVTTPETLVQPGTPARRCRSLPSSPELPRRMETALPGPGPPAVGPSAEEKMECEGSSPEPEPPGPAPQLPLAVATDNFISTCSSASQPWSPRSGPVLNNNPPAVVVNSPQGWAGEPWNRAQHSLPRAAALERTEPSPPPSAPREPDEGLPCPGCCLGPFSFGFLSMCPRPTPAVARYRNLNCEAGSLLCHRGHHAKPPTPSLQLPGARS

SEQ ID NO: 42848 - protein, 287 aa, Homo sapiens [sequence omitted]

SEQ ID NO: 42849 - protein, 485 aa, Homo sapiens
MPEKRAGAQAAGSTWLQGFGRPSVYHAAIVIFLEFFAWGLLTTPMLTVLHETFSQHTFLMNGLIQGVKGLLSFLSAPLIGALSDVWGRKPFLLGTVFFTCFPIPLMRISPWWYFAMISVSGVFSVTFSVIFAYVADVTQEHERSTAYGWVSATFAASLVSSPAIGAYLSASYGDSLVVLVATVVALLDICFILVAVPESLPEKMRPVSWGAQISWKQADPFASLKKVGKDSTVLLICITVFLSYLPEAGQYSSFFLYLRQVIGFGSVKIAAFIAMVGILSIVAQTAFLSILMRSLGNKNTVLLGLGFQMLQLAWYGFGSQAWMMWAAGTVAAMSSITFPAISALVSRNAESDQQGVAQGIITGIRGLCNGLGPALYGFIFYMFHVELTELGPKLNSNNVPLQGAVIPGPPFLFGACIVLMSFLVALFIPEYSKASGVQKHSNSSSGSLTNTPERGSDEDIEPLLQDSSIWELSSFEEPGNQCTEL

SEQ ID NO: 42850 - protein, 249 aa, Homo sapiens
MKRRIHLELRNRTPAAVRELVLDNCKSNDGKIEGLTAEFVNLEFLSLINVGLISVSNLPKLPKLKKLELSENRIFGGLDMLAEKLPNLTHLNLSGNKLKDISTLEPLKKLECLKSLDLFNCEVTNLNDYRESVFKLLPQLTYLDGYDREDQEAPDSDAEVDGVDEEEEDEEGEDEEDEDDEDGEEEEFDEEDDEDEDVEGDEDDDEVSEEEEEFGLDEEDEDEDEDEEEEEGGKGEKRKRETDDEGEDD

SEQ ID NO: 42851 - protein, 323 aa, Homo sapiens [sequence omitted]

SEQ ID NO: 42852 - protein, 45 aa, Homo sapiens
MVFLALYVLFLADEEFDVVVCDQAICIPLSLCSEPGHTVLSSVMC

SEQ ID NO: 42853 - protein, 791 aa, Homo sapiens
MLHLYASMLYERRILIICSKLSTLTACIHGSAAMLYPMYWQHVYIPVLPPHLLDYCCAPMPYLIGIHLSLMEKVRNMALDDVVILNVDTNTLETPFDDLQSLPNDVISSLKNRLKKVSTTTGDGVARAFLKAQAAFFGSYRNALKIEPKGSGAILNTVKTKANPAMKTVYKFAKDHAKMGIKEVKNRLKQKDIAENGCAPTPEEQLPKTAPSPLVEAKDPKLREDRRPITVHFGQVRPPRPHVVKRPKSNIAVEGRRTSVPSPEHLVKPLRHYAVFLSEDSSDDECQREEGPSSGFTESFFFSAPFEWPQPYRTLRESDSAEGDEAESPEQQVRKSTGPVPAPPDRAASIDLLEDVFSNLDMEAALQPLGQAKSLEDLRAPKDLREQPGTFDYQRLDLGGSERSRGVTVALKLTHPYNKLWSLGQDDMAIPSKPPAASPEKPSALLGNSLALPRRPQNRDSILNPSDKEEVPTPTLGSITIPRPQGRKTPELGIVPPPPIPRPAKLQAAGAALGDVSERLQTDRDRRAALSPGLLPGVVPQGPTELLQPLSPGPGAAGTSSDALLALLDPLSTAWSGSTLPSRPATPNVATPFTPQFSFPPAGTPTPFPQPPLNPFVPSMPAAPPTLPLVSTPAGPFGAPPASLGPAFASGLLLSSAGFCAPHRSQPNLSALSMPNLFGQMPMGTHTSPLQPLGPPAVAPSRIRTLPLARSSARAAETKQGLALRPGDPPLLPPRPPQGLEPTLQPSAPQQARDPFEDLLQKTKQDVSPSPALAPAPDSVEQLRKQWETFE

SEQ ID NO: 42854 - protein, 318 aa, Homo sapiens
MNFSEREVEIIVEELELKKHLLVNHFNAGVPLAAKSAAWHGILRRVNAVATCRRELPEVKKKWSDLKTEVRRKVAQVRAAVEGGEAPGPTEEDGAGGPGTGGGSGGGGPAVAPVLLTPMQQRICNLLGEATIISLPSTTEIHPVALGPSATAAAATVTLTQIPTETTYHTLEEGVVEYCTAEAPPPLPPETPVDMMAQHADTSVKPQALKSRIALNSAKLIQEQRVTNLHVKEIAQHLEQQNDLLQMIRRSQEVQACAQERQAQAMEGTQAALSVLIQVLRPMIKDFRRYLQSNTANPAPASDPGQVAQNGQPDSIIQ

SEQ ID NO: 42855 - protein, 511 aa, Homo sapiens
MENRNEFVGLWLGMAKLGVEAALINTNLRRDALLHCLTTSRARALVFGSEMASAICEVHASLDPSLSLFCSGSWEPGAVPPSTEHLDPLLKDAPKHLPSCPDKGFTDKLFYIYTSGTTGLPKAAIVVHSRYYRMAALVYYGFRMRPNDIVYDCLPLYHSAGNIVGIGQCLLHGMTVVIRKKFSASRFWDDCIKYNCTIVQYIGELCRYLLNQPPREAENQHQVRMALGNGLRQSIWTNFSSRFHIPQVAEFYGATECNCSLGNFDSQVGACGFNSRILSFVYPIRLVRVNEDTMELIRGPDGVCIPCQPGEPGQLVGRIIQKDPLRRFDGYLNQGANNKKIAKDVFKKGDQAYLTGDVLVMDELGYLYFRDRTGDTFRWKGENVSTTEVEGTLSRLLDMADVAVYGVEVPGTEGRAGMAAVASPTGNCDLERFAQVLEKELPLYARPIFLRLLPELHKTGTYKFQKTELRKEGFDPAIVKDPLFYLDAQKGRYVPLDQEAYSRIQAGEEKL

SEQ ID NO: 42856 - protein, 149 aa, Homo sapiens
MGEEKLIASVAGSVERVNKLICVKALKTRYIGEVGDIVVGRITEVQQKRWKVETNSRLDSVLLLSSMNLPGGELRRRSAEDELAMRGFLQEGDLISVSCALHSSLLMLFCGTGKWAFHCMSLTEEPCHPCRDPSLRPSVGLCCILSQSP

SEQ ID NO: 42857 - protein, 85 aa, Homo sapiens
MGTAEWKASRTRRWFKGLKPTVILLSRGISDAESSWRAGQGWQRKGRLRSVVWARTKPPPSECDKLEGGRWATHNFCHVSEHLPN

SEQ ID NO: 42858 - protein, 1961 aa, Homo sapiens
MGNVYHPPTYHDMLPAFMCSPKSSENQGTVERGSFPLPQLRLEPRVPFRQFQMNDQDGKENRLGLSRPLRPLRQLVERAPRPTIINAENLKGLDDLDADADDGWAGLHEEVDYSEKLKFSDDEEEEEVVKDGRPKWNSWDPRRQRQLSMSSADSADAKRTREEGKDWAEAVGASRVVRKAPDPQPPPRKLHGWAPGPDYQKSSMGSMFRQQSIEDKEDKPPPRQKFIQSEMSEAVERARKRREEEERRAREERLAACAAKLKQLDQKCKQARKAGEARKQAEKEVPWSPSAEKASPQENGPAVHKGSPEFPAQETPTTFPEEAPTVSPAVAQSNSSEEEAREAGSPAQEFKYQKSLPPRFQRQQQQQQQEQLYKMQHWQPVYPPPSHPQRTFYPHHPQMLGFDPRWMMMPSYMDPRITPTRTPVDFYPSALHPSGLMKPMMPQESLNGTGCRSEDQNCVPPLQERKVTPIDSPPVWSPEGYMALQSKGYPLPHPKSSDTLAMDMRVRNESSFSASLGRAGGVSAQRDLFEERGEEYLSAFDKKAQADFDSCISSQRIGQELLFPPQENVQDAGAPGGHTQNLRCSPLEPDFVPDEKKPECGSWDVSHQPETADTAHGVERETPREGTAFNISSWDKNGSPNKQPSSEPEWTPEPRSSSSQHPEQTGRTRRSGPIKKPVLKALKVEDKEKELEKIKQELGEESTRLAKEKEQSPTAEKDEDEENDASLANSSTTTLEDKGPGHATFGREATKFEEEEKPDKAWEARPPRESSDVPPMKRNNWIFIDEEQAFGVRGQARGRGRGFREFTFRGRPAGGNGSGLCGGGVLGARSIYCSSQRSGRGRGLREFARPEDCPRAKPRRRVASETHSEGSEYEELPKRRRQRGSENGNEGSLLEREESTLKKGDCRDSWRSNKGCSEDHSGLDAKSRGPRAFGRALPPRLSNCGYGRRTFVSKESPHWQSKSPGSSWQEYGPSDTCGSRRPTDRDYVPDSYRHPDAFGGRGFEDSRAEDKRSFFQDEHVADSENAENRPFRRRRPPRQDKPPRFRRLRQERESLGLWGPEEEPHLLAGQWPGRPKLCSGDKSGTVGRRSPELSYQNSSDHANEEWETASESSDFSERRERREGPGSEPDSQVDGGLSGASLGEKKELAKRSFSSQRPVVDRQSRKLEPGGFGEKPVRPGGGDTSPRYESQQNGTPLKVKRSPDEALPGGLSGCSSGSGHSPYALERAAHASADLPEASSKKAEKEAKLAAPRAGEQGEAMKQFDLNYGSAIIENCGSSPGEESEVGSMVGEGFIEVLTKKQRRLLEEERRKKEQAVQVPVKGRGLSSRIPPRFAKKQNNLCLEQGDVTVPGSSLGTEIWESSSQALPVQAPANDSWRKAVTAFSSTETGSAEQGFKSSQGDSGVDLSAESRESSATSSQRSSPYGTLKPEEMSGPGLAEPKADSHKEQAPKPSEQKDSEQGSGQSKEHRPGPIGNERSLKNRKGSEGAERLQGAVVPPVNGVEIHVDSVLPVPPIEFGVSPKDSDFSLPPGSASGPTGSPVVKLQDALASNAGLTQSIPILRRDHHIQRAIGLSPMSFPTADLTLKMESARKAWENSPSLPEQSSPGGAGSGIQPPSSVGASSGVNYSSFGGVSMPPMPVASVAPSASMPGSHLPPLYLDGHVFASQPRLVPQTIPQQQSYQQAAAAQQIPISLHTSLQAQAQLGLRGGLPVSQSQEIFSSLQPFRSQVYMHPSLSPPSTMILSGGTALKPPYSAFPGMQPLEMVKPQSGSPYQPMSGNQALVYEGQLSQAAGLGASQMLDSQLPQLTMPLPRYGSGQQPLILPQSIQLPPGQSLSVGAPRRIPPPGSQPPVLNTSREPSQMEMKGFHFADSKQNVPSGGPVPSPQTYRPSSASPSGKPSGSAVNMGSVQGHYVQQAKQRVDEKPSLGAVKLQEAPSAASQMKRTGAIKPRAVKVEESKA

SEQ ID NO: 42859 - protein, 489 aa, Homo sapiens
MEEAGICGLGVKADMLCNSQSNDILQHQGSNCGGTSNKHSLEEDEGSDFITENRNLVSPAYCTQESREEIPGGEARTDPPDGQQDSECNRNKEKTLGKEVLLLMQALNTLSTPEEKLAALCKKYADLLEESRSVQKQMKILQKKQAQIVKEKVHLQSEHSKAILARSKLESLCRELQRHNKTLKEENMQQAREEEERRKEATAHFQITLNEIQAQLEQHDIHNAKLRQENIELGEKLKKLIEQYALREEHIDKVFKHKELQQQLVDAKLQQTTQLIKEADEKHQREREFLLKEATESRHKYEQMKQQEVQLKQQLSLYMDKFEEFQTTMAKSNELFTTFRQEMEKMTKKIKKLEKETIIWRTKWENNNKALLQMAEEKTVRDKEYKALQIKLERLEKLCRALQTERNELNEKVEVLKEQVSIKAAIKAANRDLATPVMQPCTALDSHKELNTSSKRALGAHLEAEPKSQRSAVQKPPSTGSAPAIESVD

SEQ ID NO: 42860 - protein, 103 aa, Homo sapiens [sequence omitted]

SEQ ID NO: 42861 - protein, 218 aa, Homo sapiens [sequence omitted]

SEQ ID NO: 42862 - protein, 688 aa, Homo sapiens
MPFPYKVLKALDPEIYRNVEFDVWLDSRKELQKSDYMEYAGRQYYLGDKCQVCLESEGRYYNAHIQEVGNENNSVTVFIEELAEKHVVPLANLKPVTQVMSVPAWNAMPSRKGRGYQKMPGGYVPEIVISEMDIKQQKKMFKKIRGKEVYMTMAYGKGDPLLPPRLQHSMHYGHDPPMHYSQTAGNVMSNEHFHPQHPSPRQGRGYGMPRNSSRFINRHNMPGPKVDFYPGPGKRCCQSYDNFSYRSRSFRRSHRQMSCVNKESQYGFTPGNGQMPRGLEETITFYEVEEGDETAYPTLPNHGGPSTMVPATSGYCVGRRGHSSGKQTLNLEEGNGQSENGRYHEEYLYRAEPDYETSGVYSTTASTANLSLQDRKSCSMSPQDTVTSYNYPQKMMGNIAAVAASCANNVPAPVLSNGAAANQAISTTSVSSQNAIQPLFVSPPTHGRPVIASPSYPCHSAIPHAGASLPPPPPPPPPPPPPPPPPPPPPPPPPPPALDVGETSNLQPPPPLPPPPYSCDPSGSDLPQDTKVLQYYFNLGLQCYYHSYWHSMVYVPQMQQQLHVENYPVYTEPPLVDQTVPQCYSEVRREDGIQAEASANDTFPNADSSSVPHGAVYYPVMSDPYGQPPLPGFDSCLPVVPDYSCVPPWHPVGTAYGGSSQIHGAINPGPIGCIAPSPPASHYVPQGM

SEQ ID NO: 42863 - protein, 626 aa, Homo sapiens
MIYGLLVGLVLRYGIHVPSDVNNVTLSCEVQSSPTTLLVNVSGKFYEYMLKGEISSHELNNVQDNEMLRKVTFDPEVFFNILLPPIIFYAGYSLKRRHFFRNLGSILAYAFLGTAISCFVIGSIMYGCVTLMKVTGQLAGDFYFTDCLLFGAIVSATDPVTVLAIFHELQVDVELYALLFGESVLNDAVAIVLSSSIVAYQPAGDNSHTFDVTAMFKSIGIFLGIFSGSFAMGAATGVVTALVTKFTKLREFQLLETGLFFLMSWSTFLLAEAWGFTGVVAVLFCGITQAHYTYNNLSTESQHRTKQLFELLNFLAENFIFSYMGLTLFTFQNHVFNPTFVVGAFVAIFLGRAANIYPLSLLLNLGRRSKIGSNFQHMMMFAGLRGAMAFALAIRDTATYARQMMFSTTLLIVFFTVWVFGGGTTAMLSCLHIRYCARLWGYRDELRHGLYPQGTHSLFGETDRVGVDSDQEHLGVPENERRTTKAESAWLFRMWYNFDHNYLKPLLTHSGPPLTTTLPACCGPIARCLTSPQAYENQEQLKDDDSDLILNDGDISLTYGDSTVNTEPATSSAPRRFMGNSSEDALDRELAFGDHELVIRGTRLVLPMDDSEPPLNLLDNTRHGPA

SEQ ID NO: 42864 - protein, 526 aa, Homo sapiens [sequence omitted]

SEQ ID NO: 42865 - protein, 505 aa, Homo sapiens
MIKGEFYVIEYAACDATYNEIVTIERLRSVNPNKPATKDTFHKIKLDVPEDLRQMCAKEAAHKDFKKAVGAFSVTYDPENYQLVILSINEVTSKRAHMLIDMHFRSLRTKLSLIMRNEEASKQLESSRQLASRFHEQFIVREDLMGLAIGTHGANIQQARKVPGVTAIDLDEDTCTFHIYGEDQDAVKKARSFLEFAEDVIQVPRNLVGKVIGKNGKLIQEIVDKSGVVRVRIEAENEKNVPQEEEIMPPNSLPSNNSRVGPNAPEEKKHLDIKENSTHFSQPNSTKVQRVLVASSVVAGESQKPELKAWQGMVPFVFVGTKDSIANATVLLDYHLNYLKEVDQLRLERLQIDEQLRQIGASSRPPPNRTDKEKSYVTDDGQGMGRGSRPYRNRGHGRRGPGYTSAPTEEERESFLRRGDGRRRGGGGRGQGGRGRGGGFKGNDDHSRTDNRPRNPREAKGRTTDGSLQNTSSEGSRLRTGKDRNQKKEKPDSVDGQQPLVNGVP

SEQ ID NO: 42866 - protein, 547 aa, Homo sapiens
MIKGEFYVIEYAACDATYNEIVTIERLRSVNPNKPATKDTFHKIKLDVPEDLRQMCAKEAAHKDFKKAVGAFSVTYDPENYQLVILSINEVTSKRAHMLIDMHFRSLRTKLSLIMRNEEASKQLESSRQLASRFHEQFIVREDLMGLAIGTHGANIQQARKVPGVTAIDLDEDTCTFHIYGEDQDAVKKARSFLEFAEDVIQVPRNLVGKVIGKNGKLIQEIVDKSGVVRVRIEAENEKNVPQEEEIMPPNSLPSNNSRVGPNAPEEKKHLDIKENSTHFSQPNSTKVQRVLVASSVVAGESQKPELKAWQGMVPFVFVGTKDSIANATVLLDYHLNYLKEVDQLRLERLQIDEQLRQIGASSRPPPNRTDKEKSYVTDDGQGMGRGSRPYRNRGHGRRGPGYTSGTNSEASNASETESDHRDELSDWSLAPTEEERESFLRRGDGRRRGGGGRGQGGRGRGGGFKGNDDHSRTDNRPRNPREAKGRTTDGSLQIRVDCNNERSVHTKTLQNTSSEGSRLRTGKDRNQKKEKPDSVDGQQPLVNGVP

SEQ ID NO: 42867 - protein, 501 aa, Homo sapiens
MIKGEFYVIEYAACDATYNEIVTIERLRSVNPNKPATKDTFHKIKLDVPEDLRQMCAKEAAHKDFKKAVGAFSVTYDPENYQLVILSINEVTSKRAHMLIDMHFRSLRTKLSLIMRNEEASKQLESSRQLASRFHEQFIVREDLMGLAIGTHGANIQQARKVPGVTAIDLDEDTCTFHIYGEDQDAVKKARSFLEFAEDVIQVPRNLVGKVIGKNGKLIQEIVDKSGVVRVRIEAENEKNVPQEEEIMPPNSLPSNNSRVGPNAPEEKKHLDIKENSTHFSQPNSTKVQRGMVPFVFVGTKDSIANATVLLDYHLNYLKEVDQLRLERLQIDEQLRQIGASSRPPPNRTDKEKSYVTDDGQGMGRGSRPYRNRGHGRRGPGYTSAPTEEERESFLRRGDGRRRGGGGRGQGGRGRGGGFKGNDDHSRTDNRPRNPREAKGRTTDGSLQIRVDCNNERSVHTKTLQNTSSEGSRLRTGKDRNQKKEKPDSVDGQQPLVNGVP

SEQ ID NO: 42868 - protein, 184 aa, Homo sapiens
MPAQPFGREEAMAAMASLGALALLLLSSLSRCSAEACLEPQITPSYYTTSDAVISTETVFIVEISLTCKNRVQNMALYADVGGKQFPVTRGQDVGRYQVSWSLDHKSAHAGTYEVRFFDEESYSLLRKAQRNNEDISIIPPLFTVSVDHRGTWNGPWVSTEVLAAAIGLVIYYLAFSAKSHIQA

SEQ ID NO: 42869 - protein, 99 aa, Homo sapiens
MNRSSGTPGRPHPGAPRVAASLFLGTFFISSGLILSVAGFFYLKRSSKLPRACYRRNKAPALQPGEAAAMIPPPQSSDVGSAGKEDPPRQGRPPIPAPP

SEQ ID NO: 42870 - protein, 742 aa, Homo sapiens
MILFDQAQRSVRQQLQSFVKEDVRKFKETKKQFDKVREDLELSLVRNAQAPRHRPHEVEEATGALTLTRKCFRHLALDYVLQINVLQAKKKFEILDSMLSFMHAQSSFFQQGYSLLHQLDPYMKKLAAELDQLVIDSAVEKREMERKHAAIQQRTLLQDFSYDESKVEFDVDAPSGVVMEGYLFKRASNAFKTWNRRWFSIQNSQLVYQKKLKDALTVVVDDLRLCSVKPCEDIERRFCFEVLSPTKSCMLQADSEKLRQAWVQAVQASIASAYRESPDSCYSERLDRTASPSTSSIDSATDTRERGVKGESVLQRVQSVAGNSQCGDCGQPDPRWASINLGVLLCIECSGIHRSLGVHCSKVRSLTLDSWEPELLKLMCELGNSAVNQIYEAQCEGAGSRKPTASSSRQDKEAWIKDKYVEKKFLRKAPMAPALEAPRRWRVQKCLRPHSSPRAPTARRKVRLEPVLPCVAALSSVGTLDRKFRRDSLFCPDELDSLFSYFDAGAAGAGPRSLSSDSGLGGSSDGSSDVLAFGSGSVVDSVTEEEGAESEESSGEADGDTEAEAWGLADVRELHPGLLAHRAARARDLPALAAALAHGAEVNWADAEDEGKTPLVQAVLGGSLIVCEFLLQNGADVNQRDSRGRAPLHHATLLGRTGQVCLFLKRGADQHALDQEQRDPLAIAVQAANADIVTLLRLARMAEEMREAEAAPGPPGALAGSPTELQFRRCIQEFISLHLEES

SEQ ID NO: 42871 - protein, 661 aa, Homo sapiens
MDEEETPYLVKLPVAPERVTLADFKNVLSNRPVHAYKFFFKSMDQDFGVVKEEIFDDNAKLPCFNGRVVSWLVLAEGAHSDAGSQGTDSHTDLPPPLERTGGIGDSRPPSFHPNVASSRDGMDNETGTESMVSHRRERARRRNREEAARTNGHPRGDRRRDVGLPPDSASTALSSELESSSFVDSDEDGSTSRLSSSTEQSTSSRLIRKHKRRRRKQRLRQADRASSFSSITDSTMSLNIVTVTLNMERHHFLGISIVGQSNDRGDGGIYIGSIMKGGAVAADGRIEPGDMLLQVNDVNFENMSNDDAVRVLREIVSQTGPISLTVAKCWDPTPRSYFTVPRADPVRPIDPAAWLSHTAALTGALPRYELEEAPLTVKSDMSAVVRVMQLPDSGLEIRDRMWLKITIANAVIGADVVDWLYTHVEGFKERREARKYASSLLKHGFLRHTVNKITFSEQCYYVFGDLCSNLATLNLNSGSSGTSDQDTLAPLPHPAAPWPLGQGYPYQYPGPPPCFPPAYQDPGFSYGSGSTGSQQSEGSKSSGSTRSSRRAPGREKERRAAGAGGSGSESDHTAPSGVGSSWRERPAGQLSRGSSPRSQASATAPGLPPPHPTTKAYTVVGGPPGGPPVRELAAVPPELTGSRQSFQKAMGNPCEFFVDIM

SEQ ID NO: 42872 - protein, 175 aa, Homo sapiens [sequence omitted]

SEQ ID NO: 42873 - protein, 134 aa, Homo sapiens
MEAHNILSKRGFSVRSFGTGTHVKLPGPAPDKPNVYDFKTTYDQMYNDLLRKDKELYPSGLPFKNPPCGPPWKVLRVARAQEACHPVQCTHWLLCLCESLVSIPGARRIVHGLVPVPPMAVGVVRRTDTVWGSP

SEQ ID NO: 42874 - protein, 713 aa, Homo sapiens
MEITIRNSPYRREDSMEDRGEEDDSLAIKPPQQMSRKEKVHHRKDEKRKEKWKHARVKEREHERRKRHREEQDKARREWERQKRREMAREHSRRERDRLEQLERKRERERKMREQQKEQREQKERERRAEERRKEREARREVSAHHRTMREDYSDKVKASHWSRSPPRPPRERFELGDGRKPVKEEKMEERDLLSDLQDISDSERKTSSAESSSAESGSGSEEEEEEEEEEEEEGSTSEESEEEEEEEEEEEEETGSNSEEASEQSAEEVSEEEMSEDEERENENHLLVVPESRFDRDSGESEEAEEEVGEGTPQSSALTEGDYVPDSPALLPIELKQELPKYLPALQGCRSVEEFQCLNRIEEGTYGVVYRAKDKKTDEIVALKRLKMEKEKEGFPITSLREINTILKAQHPNIVTVREIVVGSNMDKIYIVMNYVEHDLKSLMETMKQPFLPGEVKTLMIQLLRGVKHLHDNWILHRDLKTSNLLLSHAGILKVGDFGLAREYGSPLKAYTPVVVTQWYRAPELLLGAKEYSTAVDMWSVGCIFGELLTQKPLFPGNSEIDQINKVFKELGTPSEKIWPGYSELPVVKKMTFSEHPYNNLRKRFGALLSDQGFDLMNKFLTYFPGRRISAEDGLKHEYFRETPLPIDPSMFPTWPAKSEQQRVKRGTSPRPPEGGLGYSQLGDDDLKETGFHLTTTNQGASAAGPGFSLKF

SEQ ID NO: 42875 - protein, 113 aa, Homo sapiens
MSHLQYKILLYSLDGRLLSTYSAYEWSLGIKSVAWSPSSQFLAVGSYDGKVRILNHVTWKMITEFGHPAAINDPKIVVYKEAEKSPQLGLGCLSFPPPRAGAGPLPSSESKCK

SEQ ID NO: 42876 - protein, 113 aa, Homo sapiens
MDTALEELQLPPNAEGHVKQVSPRRPQATEAVGRPTGPAGLRRTPNKQPSDHSYALLDLDSLKKKLFLTLKENEKLRKRLQAQRLVMRRMSSRLRACKGHQGLQARLGPEQQS

SEQ ID NO: 42877 - protein, 18 aa, Homo sapiens
MAAENKPEERFPKCILRN

SEQ ID NO: 42878 - protein, 1140 aa, Homo sapiens
MKKYFPSERRNKPSTLDALNYALRCVHSVQANSEFFQILSQNGAPQADVSMYSLEELATIASEHTSKNTDTFVAVFSFLSGRLVHISEQAALILNRKKDVLASSHFVDLLAPQDMRVFYAHTARAQLPFWNNWTQRAARYECAPVKPFFCRIRGGEDRKQEKCHSPFRIIPYLIHVHHPAQPELESEPCCLTVVEKIHSGYEAPRIPVNKRIFTTTHTPGCVFLEVDEKAVPLLGYLPQDLIGTSILSYLHPEDRSLMVAIHQKVLKYAGHPPFEHSPIRFCTQNGDYIILDSSWSSFVNPWSRKISFIIGRHKVRTSPLNEDVFATKIKKMNDNDKDITELQEQIYKLLLQPVHVSVSSGYGSLGSSGSQEQLVSIASSSEASGHRVEETKAEQMTLQQVYASVNKIKNLGQQLYIESMTKSSFKPVTGTRTEPNGGGECKTFTSFHQTLKNNSVYTEPCEDLRNDEHSPSYQQINCIDSVIRYLKSYNIPALKRKCISCTNTTSSSSEEDKQNHKADDVQALQAGLQIPAIPKSEMPTNGRSIDTGGGAPQILSTAMLSLGSGISQCGYSSTIVHVPPPETARDATLFCEPWTLNMQPAPLTSEEFKHVGLTAAVLSAHTQKEEQNYVDKFREKILSSPYSSYLQQESRSKAKYSYFQGDSTSKQTRSAGCRKGKHKRKKLPEPPDSSSSNTGSGPRRGAHQNAQPCCPSAASSPHTSSPTFPPAAMVPSQAPYLVPAFPLPAATSPGREYAAPGTAPEGLHGLPLSEGLQPYPAFPFPYLDTFMTVFLPDPPVCPLLSPSFLPCPFLGATASSAISPSMSSAMSPTLDPPPSVTSQRREEEKWEAQSEGHPFITSRSSSPLQLNLLQEEMPRPSESPDQMRRNTCPQTEYCVTGNNGSESSPATTGALSTGSPPRENPSHPTASALSTGSPPMKNPSHPTASALSTGSPPMKNPSHPTASTLSMGLPPSRTPSHPTATVLSTGSPPSESPSRTGSAASGSSDSSIYLTSSVYSSKISQNGQQSQDVQKKETFPNVAEEPIWRMIRQTPERILMTYQVPERVKEVVLKEDLEKLESMRQQQPQFSHGQKEELAKVYNWIQSQTVTQEIDIQACVTCENEDSADGAATSCGQVLVEDSC

SEQ ID NO: 42879 - protein, 434 aa, Homo sapiens
MRKTYWSSRSEFKNNFLNIDPITMAYSLNSSAQERLIPLGHASKSAPMNGHCFAENGPSQKSSLPPLLIPPSENLGPHEEDQVVCGFKKLTVNGVCASTPPLTPIKNSPSLFPCAPLCERGSRPLPPLPISEALSLDDTDCEVEFLTSSDTDFLLEDSTLSDFKYDVPGRRSFRGCGQINYAYFDTPAVSAADLSYVSDQNGGVPDPNPPPPQTHRRLRRSHSGPAGSFNKPAIRISNCCIHRASPNSDEDKPEVPPRVPIPPRPVKPDYRRWSAEVTSSTYSDEDRPPKVPPREPLSPSNSRTPSPKSLPSYLNGVMPPTQSFAPDPKYVSSKALQRQNSEGSASKVPCILPIIENGKKVSSTHYYLLPERPPYLDKYEKFFREAEETNGGAQIQPLPADCGISSATEKPDSKTKMDLGGHVKRKHLSYVVSP

SEQ ID NO: 42880 - protein, 1385 aa, Homo sapiens [sequence omitted]

SEQ ID NO: 42881 - protein, 354 aa, Homo sapiens
MKPTHTMVNCWFCNQDTLVPYGNRNCWDCPHCEQYNGFQENGDYNKPIPAQYLEHLNHVVSSAPSLRDPSQPQQWVSSQVLLCKRCNHHQTTKIKQLAAFAPREEGRYDEEVEVYRHHLEQMYKLCRPCQAAVEYYIKHQNRQLRALLLSHQFKRREADQTHAQNFSSAVKSPVQVILLRALAFLACAFLLTTALYGASGHFAPGTTVPLALPPGGNGSATPDNGTTPGAEGWRQLLGLLPEHMAEKLCEAWAFGQSHQTGVVALGLLTCLLAMLLAGRIRLRRIDAFCTCLWALLLGLHLAEQHLQAASPSWLDTLKFSTTSLCCLVGFTAAVATRKATGPRRFRPRRSEKQP

SEQ ID NO: 42882 - protein, 628 aa, Homo sapiens
MKPTHTMVNCWFCNQDTLVPYGNRNCWDCPHCEQYNGFQENGDYNKPIPAQYLEHLNHVVSSAPSLRDPSQPQQWVSSQVLLCKRCNHHQTTKIKQLAAFAPREEGRYDEEVEVYRHHLEQMYKLCRPCQAAVEYYIKHQNRQLRALLLSHQFKRREADQTHAQNFSSAVKSPVQVILLRALAFLACAFLLTTALYGASGHFAPGTTVPLALPPGGNGSATPDNGTTPGAEGWRQLLGLLPEHMAEKLCEAWAFGQSHQTGVVALGLLTCLLAMLLAGRIRLRRIDAFCTCLWALLLGLHLAEQHLQAASPSWLDTLKFSTTSLCCLVGFTAAVATRKATGPRRFRPRRFFPGDSAGLFPTSPSLAIPHPSVGGSPASLFIPSPPSFLPLANQQLFRSPRRTSPSSLPGRLSRALSLGTIPSLTRADSGYLFSGSRPPSQVSRSGEFPVSDYFSLLSGSCPSSPLPSPAPSVAGSVASSSGSLRHRRPLISPARLNLKGQKLLLFPSPPGEAPTTPSSSDEHSPHNGSLFTMEPPHVPRKPPLQDVKHALDLRSKLERGSACSNRSIKKEDDSSQSSTCVVDTTTRGCSEEAATWRGRFGPSLVRGLLAVSLAANALFTSVFLYQSLR

SEQ ID NO: 42883 - protein, 138 aa, Homo sapiens
MTLVDELSGMQLAIQAAISQAFKTPEVIRLFAKKQPGQLRTRLAEMDRDLMVGKLERDLYTQQKVEILTALRKLGEKLTADDEAFLSANAGAILSQFEKVSTDLGRPPSYMNYLLDSHPSKNIDVPSKISFLLKIQDL

SEQ ID NO: 42884 - protein, 139 aa, Homo sapiens [sequence omitted]

SEQ ID NO: 42885 - protein, 4183 aa, Homo sapiens
MQNAVNEPVQKLMRKKQLDVAEFSIYWDVDCTLLGDLPQMELQEAMARSMESRSHHYVLEPVFASALLKRNCSKKPLRSRHSPRIDCDIQLETIPLKLSQLQYRQIMEFLKELERKERQVKFRRWKPKVAISKNCREWWYFALNANLYEIREQRKRCTWDFMLHRARDAVSYTDKYFNKLKGGLLSTDDKEEMCRIEEEQSFEELKILRELVHDRFHKQEELAESLREPQFDSPGACPGAPEPGGGSGMLQYLQSWFPGWGGWYGQQTPEGNVVEGLSAEQQEQWIPEEILGTEEFFDPTADASCMNTYTKRDHVFAKLNLQLQRGTVTLLHKEQGTPQMNESAFMQLEFSDVKLLAESLPRRNSSLLSVRLGGLFLRDLATEGTMFPLLVFPNPQKEVGRVSQSFGLQTTSADRSDHYPAADPDGPVFEMLYERNPAHSHFERRLNVSTRPLNIIYNPQAIKKVADFFYKGKVHTSGFGYQSELELRVAEAARRQYNKLKMQTKAEIRQTLDRLLVGDFIEESKRWTVRLDISAPQVIFPDDFKFKNPVLVVVDLGRMLLTNTQDNSRRKSRDGSASEETQFSDDEYKTPLATPPNTPPPESSSSNGEKTPPFSGVEFSEEQLQAHLMSTKMYERYSLSFMDLQIMVGRVKDNWKHVQDIDVGPTHVVEKFNVHLQLERRLIYTSDPKYPGAVLSGNLPDLKIHINEDKISALKNCFALLTTPEMKTSDTQIKEKIFPQEEQRGSLQDSVMNLTQSIVLLEQHTREVLVESQLLLAEFKVNCMQLGVESNGRYISVLKVFGTNAHFVKRPYDAEVSLTVHGLLLVDTMQTYGADFDLLMASHKNLSFDIPTGSLRDSRAQSPVSGPNVAHLTDGATLNDRSATSVSLDKILTKEQESLIKLEYQFVSSECPSMNLDSTLQVISLQVNNLDIILNPETIVELIGFLQKSFPKEKDDLSPQPLMTDFERSFREQGTYQSTYEQNTEVAVEIHRLNLLLLRTVGMANREKYGRKIATASIGGTKVNVSMGSTFDMNGSLGCLQLMDLTQDNVKNQYVVSIGNSVGYENIISDIGYFESVFVRMEDAALTEALSFTFVERSKQECFLNLKMASLHYNHSAKFLKELTLSMDELEENFRGMLKSAATKVTTVLATKTAEYSEMVSLFETPRKTREPFILEENEIYGFDLASSHLDTVKLILNINIESPVVSIPRKPGSPELLVGHLGQIFIQNFVAGDDESRSDRLQVEIKDIKLYSLNCTQLAGREAVGSEGSRMFCPPSGSGSANSQEEAHFTRHDFFESLHRGQAFHILNNTTIQFKLEKIPIERESELTFSLSPDDLGTSSIMKIEGKFVNPVQVVLAKHVYEQVLQTLDNLVYSEDLNKYPASATSSPCPDSPLPPLSTCGESSVERKENGLFSHSSLSNTSQKSLSVKEVKSFTQIQATFCISELQVQLSGDLTLGAQGLVSLKFQDFEVEFSKDHPQTLSIQIALHSLLMEDLLEKNPDSKYKNLMVSRGAPKPSSLAQKEYLSQSCPSVSNVEYPDMPRSLPSHMEEAPNVFQLYQRPTSASRKKQKEVQDKDYPLTPPPSPTVDEPKILVGKSKFDDSLVHINIFLVDKKHPEFSSSYNRVNRSIDVDFNCLDVLITLQTWVVILDFFGIGSTADNHAMRLPPEGILHNVKLEPHASMESGLQDPVNTKLDLKVHSLSLVLNKTTSELAKANVSKLVAHLEMIEGDLALQGSIGSLSLSDLTCHGEFYRERFTTSGEEALIFQTFKYGRPDPLLRREHDIRVSLRMASVQYVHTQRFQAEVVAFIQHFTQLQDVLGRQRAAIEGQTVRDQAQRCSRVLLDIEAGAPVLLIPESSRSNNLIVANLGKLKVKNKFLFAGFPGTFSLQDKESVPSASPTGIPKHSLRKTTSTEEPRGTHSQGQFTMPLAGMSLGSLKSEFVPSTSTKQQGPQPTLSVGQESSSPEDHVCLLDCVVVDLQDMDIFAAERHPREYSKAPEDSSGDLIFPSYFVRQTGGSLLTEPCRLKLQVERNLDKEISHTVPDISIHGNLSSVHCSLDLYKYKLIRGLLENNLGEPIEEFMRPYDLQDPRIHTVLSGEVYTCMCFLIDMVNVSLELKDPKRKEGAGSLARFDFKKCKLLYESFSNQTKSINLVSHSMMAFDTRYAGQKTSPGMTNVFSCIFQPAKNSSTTQGSIQIELHFRSTKDSSCFTVVLNNLRVFLIFDWLLLVHDFLHTPSDIKKQNHVTPSRHRNSSSESAIVPKTVKSGVVTKRSSLPVSNERHLEVKVNVTGTEFVVIEDVSCFDTNAIILKGTTVLTYKPRFVDRPFSGSLFGIEVFSCRLGNEHDTALSIVDPVQIQMELVGNSSYQNSSGLMDAFNSEDFPPVLEIQLQALDIRLSYNDVQLFLAIAKSIPEQANAAVPDSVALESDSVGTYLPGASRVGEEIREGTRHTLDPVLELQLARLQELGFSMDDCRKALLACQGQLKKAASWLFKNAEPLKSLSLASTSRDSPGAVAAPLISGVEIKAESVCICFIDDCMDCDVPLAELTFSRLNFLQRVRTSPEGYAHFTLSGDYYNRALSGWEPFIEPWPCSVSWQQQAASRLHPPRLKLEAKAKPRLDINITSVLIDQYVSTKESWMADYCKDDKDIESAKSEDWMGSSVDPPCFGQTEVKTPKRRQPFVPFALRNHTGCTLWFATLTTTPTRAALSHSGSPGVVPEGNGTFLDDTHNVSEWREVLTGEEIPFEFEARGKLRHRHTHDLRIHQLQVRVNGWEQVSPVSVDKVGTFFRYAAPDKNSSSSTIGSPSSRTNIIHPQVYFSSLPPVRVVFAVTMEGSARKVITVRSALIVRNRLETPMELRLDSPSAPDKPVVLPAIMPGDSFAVPLHLTSWRLQARPKGLGVFFCKAPIHWTNVVKTAEISSSKRECHSMDTEKSRFFRFCVAIKKENYPDYMPSNIFSDSAKQIFRQPGHTIYLLPTVVICNLLPCELDFYVKGMPINGTLKPGKEAALHTADTSQNIELGVSLENFPLCKELLIPPGTQNYMVRMRLYDVNRRQLNLTIRIVCRAEGSLKIFISAPYWLINKTGLPLIFRQDNAKTDAAGQFEEHELARSLSPLLFCYADKEQPNLCTMRIGRGIHPEGMPGWCQGFSLDGGSGVRALKVIQQGNRPGLIYNIGIDVKKGRGRYIDTCMVIFAPRYLLDNKSSHKLAFAQREFARGQGTANPEGYISTLPGSSVVFHWPRNDYDQLLCVRLMDVPNCIWSGGFEVNKNNSFHINMRDTLGKCFFLRVEITLRGATYRISFSDTDQLPPPFRIDNFSKVPVVFTQHGVAEPRLRTEVKPMTSLDYAWDEPTLPPFITLTVKGAGSSEINCNMNDFQDNRQLYYENFIYIAATYTFSGLQEGTGRPVASNKAITCAELVLDVSPKTQRVILKKKEPGKRSQLWRMTGTGMLAHEGSSVPHNPNKPSAARSTEGSAILDIAGLAAVTDNRYEPLMLRKPDRRRSTTQTWSFREGKLTCGLHGLVVQAKGGLSGLFDGAEVVLGPDTSMELLGPVPPEQQFINQKMRPGSGMLSIRVIPDGPTRALQITDFCHRKSSRSYEVDELPVTEQELQKLKNPDTEQELEVLVRLEGGIGLSLINKVPEELVFASLTGINVHYTQLATSHMLELSIQDVQVDNQLIGTTQPFMLYVTPLSNENEVIETGPAVQVNAVKFPSKSALTNIYKHLMITAQRFTVQIEEKLLLKLLSFFGYDQAESEVEKYDENLHEKTAEQGGTPIRYYFENLKISIPQIKLSVFTSNKLPLDLKALKSTLGFPLIRFEDAVINLDPFTRVHPYETKEFIINDILKHFQEELLSQAARILGSVDFLGNPMGLLNDVSEGVTGLIKYGNVGGLIRNVTHGVSNSAAKFAGTLSDGLGKTMDNRHQSEREYIRYHAATSGEHLVAGIHGLAHGIIGGLTSVITSTVEGVKTEGGVSGFISGLGKGLVGTVTKPVAGALDFASETAQAVRDTATLSGPRTQAQRVRKPRCCTGPQGLLPRYSESQAEGQEQLFKLTDNIQDEFFIAVENIDSYCVLISSKAVYFLKSGDYVDREAIFLEVKYDDLYHCLVSKDHGKVYVQVTKKAVSTSSGVSIPGPSHQKPMVHVKSEVLAVKLSQEINYAKSLYYEQQLMLRLSENREQLELDS

SEQ ID NO: 42886 - protein, 287 aa, Homo sapiens
MIYLVVKAAVGLVLPAKLRDLSRENVLITGGGRGIGRQLAREFAERGARKIVLWGRTEKCLKETTEEIRQMGTECHYFICDVGNREEVYQTAKAVREKVGDITILVNNAAVVHGKSLMDSDDDALLKSQHINTLGQFWTTKAFLPRMLELQNGHIVCLNSVLALSAIPGAIDYCTSKASAFAFMESLTLGLLDCPGVSATTVLPFHTSTEMFQGMRVRFPNLFPPLKPETVARRTVEAVQLNQALLLLPWTMHALVILKSILPQAALEEIHKFSGTYTCMNTFKGRT

SEQ ID NO: 42887 - protein, 873 aa, Homo sapiens
MTNTKDPKRAMESTLATSNSATGPVTFSHVFGQQCQLMQAAVQSLHTLNDQISHFIVTKSKALEEDKDPFLPTEKETLKSSMILMRHLLMDAQAKILSMMEDNKQLALRIDGAVQSASQEVTNLRAELTATNRRLAELSGGGGPGPGPGAAASASAAGDSAATNMENPQLGAQVLLREEVSRLQEEVHLLRQMKEMLAKDLEESQGGKSSEVLSATELRVQLAQKEQELARAKEALQAMKADRKRLKGEKTDLVSQMQQLYATLESREEQLRDFIRNYEQHRKESEDAVKALAKEKDLLEREKWELRRQAKEATDHATALRSQLDLKDNRMKELEAELAMAKQSLATLTKDVPKRHSLAMPGETVLNGNQEWVVQADLPLTAAIRQSQQTLYHSHPPHPADRQAVRVSPCHSRQPSVISDASAAEGDRSSTPSDINSPRHRTHSLCNGDSPGPVQKNLHNPIVQSLEDLEDQKRKKKKEKMGFGSISRVFARGKQRKSLDPGLFDDSDSQCSPTRQSLSLSEGEEQMDRLQQVELVRTTPMSHWKAGTVQAWLEVVMAMPMYVKACTENVKSGKVLLSLSDEDLQLGLGVCSSLHRRKLRLAIEDYRDAEAGRSLSKAAELDHHWVAKAWLNDIGLSQYSQAFQNHLVDGRMLNSLMKRDLEKHLNVSKKFHQVSILLGIELLYQVNFSREALQERRARCETQNIDPVVWTNQRVLKWVRDIDLKEYADNLTNSGVHGAVLVLEPTFNAEAMATALGIPSGKHILRRHLAEEMSAVFHPANSTGIREAERFGTPPGRASSVTRAGKEENSSGLKYKAGRLPLGKIGRGFSSKDPDFHDDYGSLQNEDCGDDDPQSRLEQCRLEGYNSLEVTNV

SEQ ID NO: 42888 - protein, 115 aa, Homo sapiens
MTNTKDPKRAMESTLATSNSATGPVTFSHVFGQQCQLMQAAVQSLHTLNDQISHFIVTKSKALEEDKDPFLPTEKETLKSSMILMRHLLMDAQKSSINTWTMNSFQCISNDPAGF

SEQ ID NO: 42889 - protein, 225 aa, Homo sapiens [sequence omitted]

SEQ ID NO: 42890 - protein, 378 aa, Homo sapiens [sequence omitted]

SEQ ID NO: 42891 - protein, 177 aa, Homo sapiens
MEEAPESFGQVVMLYINCKVNGHPVKAFVDSGAQMTIMSQACAERCNIMRLVDRRWAGIAKGVGTQKIIGRVHLAQVQIEGDFLPCSFSILEEQPMDMLLGLDMLKRHQCSIDLKKNVLVIGTTGSQTTFLPEGELPECARLAYGAGREDVRPEEIADQELAEALQKSAEDAERQKP

SEQ ID NO: 42892 - protein, 117 aa, Homo sapiens
MQDIITACHALKSLAEPATSPGGNAEALATEGLPCSISRRGQESQRGEGGHQHAEQAGAGRTQHTHRPQQGPQGGARRSGPECGQRCRADRESRCAPGAAACGAQARPHEWHGCCRS

SEQ ID NO: 42893 - protein, 115 aa, Homo sapiens
MRPHSEPLAFPAAHPTARPGGAGNIKTLGDAYEFAVDVRDFSPEDIIVTTSNNHIELAADGTVMNTFAHKCQLPEDVDPTSVTSALREDGSLTIRARRHPHTEHVQQTFRTEIKI

SEQ ID NO: 42894 - protein, 111 aa, Homo sapiens [sequence omitted]

SEQ ID NO: 42895 - protein, 515 aa, Homo sapiens
MPIRRTVNSTRETPPKSKLAEGEEEKPEPDISSEESVSTVEEQENETPPATSSEAEQPKGEPENEEKEENKSSEETKKDEKDQSKEKEKKVKKTIPSWATLSASQLARAQKQTPMASSPRPKMDAILTEAIKACFQKSGASVVAIRKYIIHKYPSLELERRGYLLKQALKRELNRGVIKQVKGKGASGSFVVVQKSRKTPQKSRNRKNRSSAVDPEPQVKLEDVLPLAFTRLCEPKEASYSLIRKYVSQYYPKLRVDIRPQLLKNALQRAVERGQLEQITGKGASGTFQLKKSGEKPLLGGSLMEYAILSAIAAMNEPKTCSTTALKKYVLENHPGTNSNYQMHLLKKTLQKCEKNGWMEQISGKGFSGTFQLCFPYYPSPGVLFPKKEPDDSRDEDEDEDESSEEDSEDEEPPPKRRLQKKTPAKSPGKAASVKQRGSKPAPKVSAAQRGKARPLPKKAPPKAKTPAKKTRPSSTVIKKPSGGSSKKPATSARKEVKLPGKGKSTMKKSFRVKK

SEQ ID NO: 42896 - protein, 1537 aa, Homo sapiens
MMVNHLPMPYPVPQGPQYCIPQYRHSGPPYVGPPQQYPVQPPGPGPFYPGPGPGDFPNAYGTPFYPSQPVYQSAPIIVPTQQQPPPAKREKKTIRIRDPNQGGKDITEEIMSGGGSRNPTPPIGRPTSTPTPPQQLPSQVPEHSPVVYGTVESAHLAASTPVTAASDQKQEEKPKPDPVLKSPSPVLRLVLSGEKKEQEGQTSETTAIVSIAELPLPPSPTTVSSVARSTIAAPTSSALSSQPIFTTAIDDRCELSSPREDTIPIPSLTSCTETSDPLPTNENDDDICKKPCSVAPNDIPLVSSTNLINEINGVSEKLSATESIVEIVKQEVLPLTLELEILENPPEEMKLECIPAPITPSTVPSFPPTPPTPPASPPHTPVIVPAAATTVSSPSAAITVQRVLEEDESIRTCLSEDAKEIQNKIEVEADGQTEEILDSQNLNSRRSPVPAQIAITVPKTWKKPKDRTRTTEEMLEAELELKAEEELSIDKVLESEQDKMSQGFHPERDPSDLKKVKAVEENGEEAEPVRNGAESVSEGEGIDANSGSTDSSGDGVTFPFKPESWKPTDTEGKKQYDREFLLDFQFMPACIQKPEGLPPISDVVLDKINQPKLPMRTLDPRILPRGPDFTPAFADFGRQTPGGRGVPLLNVGSRRSQPGQRREPRKIITVSVKEDVHLKKAENAWKPSQKRDSQADDPENIKTQELFRKVRSILNKLTPQMFNQLMKQVSGLTVDTEERLKGVIDLVFEKAIDEPSFSVAYANMCRCLVTLKVPMADKPGNTVNFRKLLLNRCQKEFEKDKADDDVFEKKQKELEAASAPEERTRLHDELEEAKDKARRRSIGNIKFIGELFKLKMLTEAIMHDCVVKLLKNHDEESLECLCRLLTTIGKDLDFEKAKPRMDQYFNQMEKIVKERKTSSRIRFMLQDVIDLRLCNWVSRRADQGPKTIEQIHKEAKIEEQEEQRKVQQLMTKEKRRPGVQRVDEGGWNTVQGAKNSRVLDPSKFLKITKPTIDEKIQLVPKAQLGSWGKGSSGGAKASETDALRSSASSLNRFSALQPPAPSGSTPSTPVEFDSRRTLTSRGSMGREKNDKPLPSATARPNTFMRGGSSKDLLDNQSQEEQRREMLETVKQLTGGVDVERNSTEAERNKTRESAKPEISAMSAHDKAALSEEELERKSKSIIDEFLHINDFKEAMQCVEELNAQGLLHVFVRVGVESTLERSQITRDHMGQLLYQLVQSEKLSKQDFFKGFSETLELADDMAIDIPHIWLYLAELVTPMLKEGGISMRELTIEFSKPLLPVGRAGVLLSEILHLLCKQMSHKKVGALWREADLSWKDFLPEGEDVHNFLLEQKLDFIESDSPCSSEALSKKELSAEELYKRLEKLIIEDKANDEQIFDWVEANLDEIQMSSPTFLRALMTAVCKAAIIADSSTFRVDTAVIKQRVPILLKYLDSDTEKELQALYALQASIVKLDQPANLLRMFFDCLYDEEVISEDAFYKWESSKDPAEQNGKGVALKSVTAFFTWLREAEEESEDN

SEQ ID NO: 42897 - protein, 1573 aa, Homo sapiens
MMVNHLPMPYPVPQGPQYCIPQYRHSGPPYVGPPQQYPVQPPGPGPFYPGPGPGDFPNAYGTPFYPSQPVYQSAPIIVPTQQQPPPAKREKKTIRIRDPNQGGKDITEEIMSGGGSRNPTPPIGRPTSTPTPPQLPSQVPEHSPVVYGTVESAHLAASTPVTAASDQKQEEKPKPDPVLKSPSPVLRLVLSGEKKEQEGQTSETTAIVSIAELPLPPSPTTVSSVARSTIAAPTSSALSSQPIFTTAIDDRCELSSPREDTIPIPSLTSCTETSDPLPTNENDDDICKKPCSVAPNDIPLVSSTNLINEINGVSEKLSATESIVEIVKQEVLPLTLELEILENPPEEMKLECIPAPITPSTVPSFPPTPPTPPASPPHTPVIVPAAATTVSSPSAAITVQRVLEEDESIRTCLSEDAKEIQNKIEVEADGQTEEILDSQNLNSRRSPVPAQIAITVPKTWKKPKDRTRTTEEMLEAELELKAEEELSIDKVLESEQDKMSQGFHPERDPSDLKKVKAVEENGEEAEPVRNGAESVSEGEGIDANSGSTDSSGDGVTFPFKPESWKPTDTEGKKQYDREFLLDFQFMPACIQKPEGLPPISDVVLDKINQPKLPMRTLDPRILPRGPDFTPAFADFGRQTPGGRGVPICKVQSRHGLPILEQSKAPTCPPLVMSHPPMKSLPLGLLNVGSRRSQPGQRREPRKIITVSVKEDVHLKKAENAWKPSQKRDSQADDPENIKTQELFRKVRSILNKLTPQMFNQLMKQVSGLTVDTEERLKGVIDLVFEKAIDEPSFSVAYANMCRCLVTLKVPMADKPGNTVNFRKLLLNRCQKEFEKDKADDDVFEKKQKELEAASAPEERTRLHDELEEAKDKARRRSIGNIKFIGELFKLKMLTEAIMHDCVVKLLKNHDEESLECLCRLLTTIGKDLDFEKAKPRMDQYFNQMEKIVKERKTSSRIRFMLQDVIDLRLCNWVSRRADQGPKTIEQIHKEAKIEEQEEQRKVQQLMTKEKRRPGVQRVDEGGWNTVQGAKNSRVLDPSKFLKITKPTIDEKIQLVPKAQLGSWGKGSSGGAKASETDALRSSASSLNRFSALQPPAPSGSTPSTPVEFDSRRTLTSRGSMGREKNDKPLPSATARPNTFMRGGSSKDLLDNQSQEEQRREMLETVKQLTGGVDVERNSTEAERNKTRESAKPEISAMSAHDKAALSEEELERKSKSIIDEFLHINDFKEAMQCVEELNAQGLLHVFVRVGVESTLERSQITRDHMGQLLYQLVQSEKLSKQDFFKGFSETLELADDMAIDIPHIWLYLAELVTPMLKEGGISMRELTIEFSKPLLPVGRAGVLLSEILHLLCKQMSHKKVGALWREADLSWKDFLPEGEDVHNFLLEQKLDFIESDSPCSSEALSKKELSAEELYKRLEKLIIEDKANDEQIFDWVEANLDEIQMSSPTFLRALMTAVCKAAIIADSSTFRVDTAVIKQRVPILLKYLDSDTEKELQALYALQASIVKLDQPANLLRMFFDCLYDEEVISEDAFYKWESSKDPAEQNGKGVALKSVTAFFTWLREAEEESEDN

SEQ ID NO: 42898 - protein, 1536 aa, Homo sapiens
MMVNHLPMPYPVPQGPQYCIPQYRHSGPPYVGPPQQYPVQPPGPGPFYPGPGPGDFPNAYGTPFYPSQPVYQSAPIIVPTQQQPPPAKREKKTIRIRDPNQGGKDITEEIMSGGGSRNPTPPIGRPTSTPTPPQLPSQVPEHSPVVYGTVESAHLAASTPVTAASDQKQEEKPKPDPVLKSPSPVLRLVLSGEKKEQEGQTSETTAIVSIAELPLPPSPTTVSSVARSTIAAPTSSALSSQPIFTTAIDDRCELSSPREDTIPIPSLTSCTETSDPLPTNENDDDICKKPCSVAPNDIPLVSSTNLINEINGVSEKLSATESIVEIVKQEVLPLTLELEILENPPEEMKLECIPAPITPSTVPSFPPTPPTPPASPPHTPVIVPAAATTVSSPSAAITVQRVLEEDESIRTCLSEDAKEIQNKIEVEADGQTEEILDSQNLNSRRSPVPAQIAITVPKTWKKPKDRTRTTEEMLEAELELKAEEELSIDKVLESEQDKMSQGFHPERDPSDLKKVKAVEENGEEAEPVRNGAESVSEGEGIDANSGSTDSSGDGVTFPFKPESWKPTDTEGKKQYDREFLLDFQFMPACIQKPEGLPPISDVVLDKINQPKLPMRTLDPRILPRGPDFTPAFADFGRQTPGGRGVPLLNVGSRRSQPGQRREPRKIITVSVKEDVHLKKAENAWKPSQKRDSQADDPENIKTQELFRKVRSILNKLTPQMFNQLMKQVSGLTVDTEERLKGVIDLVFEKAIDEPSFSVAYANMCRCLVTLKVPMADKPGNTVNFRKLLLNRCQKEFEKDKADDDVFEKKQKELEAASAPEERTRLHDELEEAKDKARRRSIGNIKFIGELFKLKMLTEAIMHDCVVKLLKNHDEESLECLCRLLTTIGKDLDFEKAKPRMDQYFNQMEKIVKERKTSSRIRFMLQDVIDLRLCNWVSRRADQGPKTIEQIHKEAKIEEQEEQRKVQQLMTKEKRRPGVQRVDEGGWNTVQGAKNSRVLDPSKFLKITKPTIDEKIQLVPKAQLGSWGKGSSGGAKASETDALRSSASSLNRFSALQPPAPSGSTPSTPVEFDSRRTLTSRGSMGREKNDKPLPSATARPNTFMRGGSSKDLLDNQSQEEQRREMLETVKQLTGGVDVERNSTEAERNKTRESAKPEISAMSAHDKAALSEEELERKSKSIIDEFLHINDFKEAMQCVEELNAQGLLHVFVRVGVESTLERSQITRDHMGQLLYQLVQSEKLSKQDFFKGFSETLELADDMAIDIPHIWLYLAELVTPMLKEGGISMRELTIEFSKPLLPVGRAGVLLSEILHLLCKQMSHKKVGALWREADLSWKDFLPEGEDVHNFLLEQKLDFIESDSPCSSEALSKKELSAEELYKRLEKLIIEDKANDEQIFDWVEANLDEIQMSSPTFLRALMTAVCKAAIIADSSTFRVDTAVIKQRVPILLKYLDSDTEKELQALYALQASIVKLDQPANLLRMFFDCLYDEEVISEDAFYKWESSKDPAEQNGKGVALKSVTAFFTWLREAEEESEDN

SEQ ID NO: 42899 - protein, 908 aa, Homo sapiens
MLGDGIQEEKDYEPQTICEHLQYLFALLQNSNRRYIDPSGFVKALGLDTGQQQDAQEFSKLFMSLLEDTLSKQKNPDVRNIVQQQFCGEYAYVTVCNQCGRESKLLSKFYELELNIQGHKQLTDCISEFLKEEKLEGDNRYFCENCQSKQNATRKIRLLSLPCTLNLQLMRFVFDRQTGHKKKLNTYIGFSEILDMEPYVEHKGGSYVYELSAVLIHRGVSAYSGHYIAHVKDPQSGEWYKFNDEDIEKMEGKKLQLGIEEDLAEPSKSQTRKPKCGKGTHCSRNAYMLVYRLQTQEKPNTTVQVPAFLQELVDRDNSKFEEWCIEMAEMRKQSVDKGKAKHEEVKELYQRLPAGAEPYEFVSLEWLQKWLDESTPTKPIDNHACLCSHDKLHPDKISIMKRISEYAADIFYSRYGGGPRLTVKALCKECVVERCRILRLKNQLNEDYKTVNNLLKAAVKGSDGFWVGKSSLRSWRQLALEQLDEQDGDAEQSNGKMNGSTLNKDESKEERKEEEELNFNEDILCPHGELCISENERRLVSKEAWSKLQQYFPKAPEFPSYKECCSQCKILEREGEENEALHKMIANEQKTSLPNLFQDKNRPCLSNWPEDTDVLYIVSQFFVEEWRKFVRKPTRCSPVSSVGNSALLCPHGGLMFTFASMTKEDSKLIALIWPSEWQMIQKLFVVDHVIKITRIEVGDVNPSETQYISEPKLCPECREGLLCQQQRDLREYTQATIYVHKVVDNKKVMKDSAPELNVSSSETEEDKEEAKPDGEKDPDFNQSNGGTKRQKISHQNYIAYQKQVIRRSMRHRKVRGEKALLVSANQTLKELKIQIMHAFSVAPFDQNLSIDGKILSDDCATLGTLGVIPESVILLKADEPIADYAAMDDVMQVCMPEEGFKGTGLLGH

SEQ ID NO: 42900 - protein, 920 aa, Homo sapiens
MLGDGIQEEKDYEPQTICEHLQYLFALLQNSNRRYIDPSGFVKALGLDTGQQQDAQEFSKLFMSLLEDTLSKQKNPDVRNIVQQQFCGEYAYVTVCNQCGRESKLLSKFYELELNIQGHKQLTDCISEFLKEEKLEGDNRYFCENCQSKQNATRKIRLLSLPCTLNLQLMRFVFDRQTGHKKKLNTYIGFSEILDMEPYVEHKGGSYVYELSAVLIHRGVSAYSGHYIAHVKDPQSGEWYKFNDEDIEKMEGKKLQLGIEEDLEPSKSQTRKPKCGKGTHCSRNAYMLVYRLQTQEKPNTTVQVPAFLQELVDRDNSKFEEWCIEMAEMRKQSVDKGKAKHEEVKELYQRLPAGAEPYEFVSLEWLQKWLDESTPTKPIDNHACLCSHDKLHPDKISIMKRISEYAADIFYSRYGGGPRLTVKALCKECVVERCRILRLKNQLNEDYKTVNNLLKAAVKGSDGFWVGKSSLRSWRQLALEQLDEQDGDAEQSNGKMNGSTLNKDESKEERKEEEELNFNEDILCPHAVFFFSKYIFLNSGELCISENERRLVSKEAWSKLQQYFPKAPEFPSYKECCSQCKILEREGEENEALHKMIANEQKTSLPNLFQDKNRPCLSNWPEDTDVLYIVSQFFVEEWRKFVRKPTRCSPVSSVGNSALLCPHGGLMFTFASMTKEDSKLIALIWPSEWQMIQKLFVVDHVIKITRIEVGDVNPSETQYISEPKLCPECREGLLCQQQRDLREYTQATIYVHKVVDNKKVMKDSAPELNVSSSETEEDKEEAKPDGEKDPDFNQSNGGTKRQKISHQNYIAYQKQVIRRSMRHRKVRGEKALLVSANQTLKELKIQIMHAFSVAPFDQNLSIDGKILSDDCATLGTLGVIPESVILLKADEPIADYAAMDDVMQVCMPEEGFKGTGLLGH

SEQ ID NO: 42901 - protein, 147 aa, Homo sapiens
MIGGEPYTLGLFDTAGQEDYDRLRPLSYPQTDVFLVCFSVVSPSSFENVKEKWVPEITHHCPKTPFLLVGTQIDLRDDPSTIEKLAKNKQKPITPETAEKLARDLKAVKYVECSALTQKGLKNVFDEAILAALEPPEPKKSRRCVLL

SEQ ID NO: 42902 - protein, 1016 aa, Homo sapiens
MLAEIEVLRQRVLRIEGKDEEIKRAEDLCRLMKEKLEEEENLTRELKSEIERLQKRMAELEKLEEAFSRSKNDCTQLCLSLNEERNLTKKISSELEMLRVKVKELESSEDRLDKTEQSLASELEKLKSLTLSFVSERKYLNEKEKENEKLIKELTQKLEQNKKMNRDYTRNASNLERNDLRIEDGISSTLPSKESRRKGGLDYLKQVENETRNKSENEKNRNQEDNKVKDLNQEIEKLKTQIKHFESLEEELKKMKSKNNDLQDNYLSEQNKNKLLASQLEEIKLQIKKQKELENGEVEGEDAFLSSKGRHERTKFRGHGSEASVSKHTARELSPQHKRERLRNREFALNNENYSLSNRQVSSPSFTNRRAAKASHMGVSTDSGTQETKKTEDRFVPGSSQSEGKKSREQPSVLSRYPPAAQEHSKAWKGTSKPGTESGLKGKVEKTTRTFSDTTHGSVPSDPLGRADKASDTSSETVFGKRGHVLGNGSQVTQAANSGCSKAIGALASSRRSSSEGLSKGKKAANGLEADNSCPNSKAPVLSKYPYSCRSQENILQGFSTSHKEGVNQPAAVVMEDSSPHEALRCRVIKSSGREKPDSDDDLDIASLVTAKLVNTTITPEPEPKPQPNSREKAKTRGAPRTSLFENDKDAGMENESVKSVRASTNTMELPDTNGAGVKSQRPFSPREALRSRAIIKPVIVDKDVKKIMGGSGTETTLEKQKPVSKPGPNKVTSSITIYPSDSSSPRAAPGEALRERHTSTSNIQVGLAELTSVSNHVSSPFELSIHKHDITLQLAEAERMADGPLKDRPETVVSRSSIIIKPSDPVERNSHAPPAETIRWKSHSAPSEVGFSDARHVTVRNAWKSRRDLKSLEDPPTRIGKNVESTNSNAYTQRSSTDFSELEQPRSCLFEQGTRRVGPSSGDAPEPSSRRTQSSLTVSEVLTRRNRVGDTITVAAWNHSASMEEEGEDCTLSVYRQLHNSLDPSELPGKQGLPESGRVRAEERLRPTRPCAEEN

SEQ ID NO: 42903 - protein, 332 aa, Homo sapiens [sequence omitted]

SEQ ID NO: 42904 - protein, 335 aa, Homo sapiens
MVARKNTEGALDLLKKLHSCQMSIQLLQTTRIGVAVNGVRKHCSDKEVVSLAKVLIKNWKRLLDSPGPPKGEKGEEREKAKKKEKGLECSDWKPEAGLSPPRKKREDPKTRRDSVDSKSSASSSPKRPSVERSNSSKSKAESPKTPSSPLTPTFASSMCLLAPCYLTGDSVRDKCVEMLSAALKADDDYKDYGVNCDKMASEIEDHIYQELKSTDMKYRNRVRSRISNLKDPRNPGLRRNVLSGAISAGLIAKMTAEEMASDELRELRNAMTQEAIREHQMAKTGGTTTDLFQCSKCKKKNCTYNQVQTRSADEPMTTFVLCNECGNRWKMESAS

SEQ ID NO: 42905 - protein, 793 aa, Homo sapiens
MKGQLRDGRQDSKKQLEKAWKDYEAKMAKLEKERDRARVTGGIPGEVAQDMQRERRIFQLHMCEYLLKAGESQMKQGPDFLQSLIKFFHAQHNFFQDGWKAAQSLFPFIEKLAASVHALHQAQEDELQKLTQLRDSLRGTLQLESREEHLSRKNSGCGYSIHQHQGNKQFGTEKVGFLYKKSDGIRRVWQKRKCGVKYGCLTISHSTINRPPVKLTLLTCQVRPNPEEKKCFDLVTHNRTYHFQAEDEHECEAWVSVLQNSKDEALSSAFLGEPSAGPGSWGSAGHDGEPHDLTKLLIAEVKSRPGNSQCCDCGAADPTWLSTNLGVLTCIQCSGVHRELGVRFSRMQSLTLDLLGPSELLLALNMGNTSFNEVMEAQLPSHGGPKPSAESDMGTRRDYIMAKYVEHRFARRCTPEPQRLWTAICNRDLLSVLEAFANGQDFGQPLPGPDAQAPEELVLHLAVKVANQASLPLVDFIIQNGGHLDAKAADGNTALHYAALYNQPDCLKLLLKGRALVGTVNEAGETALDIARKKHHKECEELLEQAQAGTFAFPLHVDYSWVISTEPGSDSEEDEEEKVGPSPVPQASGWQKERARLGLRCLLKLPAQAHWASGRLDISNKTYETVASLGAATPQGESEDCPPPLPVKNSSRTLVQGCARHASGDRSEVSSLSSEAPETPESLGSPASSSSLMSPLEPGDPSQAPPNSEEGLREPPGTSRPSLTSGTTPSEMYLPVRFSSESTRSYRRGARSPEDGPSARQPLPRRNVPVGITEGDGSRTGSLPASSVQLLQD

SEQ ID NO: 42906 - protein, 172 aa, Homo sapiens
MPRYRGAALAREEILEGDQAILQRIKKAVRAIHSSGLGHVENEEQYREAVESLGNSHLSQNSHELSTGFLNLAVFTREVAALFKNLIQNLNNIVSFPLDSLMKGQLRDGRQDSKKQLEKAWKDYEAKMAKLEKERDRARVTGGIPGNLGIPAKPHPTLKRASESPQAPPDPA

SEQ ID NO: 42907 - protein, 76 aa, Homo sapiens
MNHCYSRLRELVPGVPRGTQLSQVEILQRVIDYILDLQVVLAEPAPGPPDGPHLPIQTAELTPELVISNDKRSFCH

SEQ ID NO: 42908 - protein, 322 aa, Homo sapiens [sequence omitted]

SEQ ID NO: 42909 - protein, 461 aa, Homo sapiens [sequence omitted]

SEQ ID NO: 42910 - protein, 88 aa, Homo sapiens
MKAKEGRNVYSSSRYDDYDRYRRSRSRSYERRRSRSRSFDYNYRRSYSPRNSRPTGRPRRSRSHSDNDRPNCSWNTQYSSAYYTSRKI

SEQ ID NO: 42911 - protein, 87 aa, Homo sapiens
MKAKEGRNVYSSSRYDDYDRYRRSRSRSYERRRSRSRSFDYNYRRSYSPRNRPTGRPRRSRSHSDNDRPNCSWNTQYSSAYYTSRKI

SEQ ID NO: 42912 - protein, 70 aa, Homo sapiens
MKAKEGRNVYSSSRYDDYDRYRRSRSRSYERRRSRSRSFDYNYRRSYSPRKPNCSWNTQYSSAYYTSRKI

SEQ ID NO: 42913 - protein, 201 aa, Homo sapiens
MRNEARKLNHQEVVEEDKRLKLPANWEAKKARLEWELKEEEKKKECAARGEDYEKVKLLEISAEDAERWERKKKRKNPDLGFSDYAAAQLRQYHRLTKQIKPDMETYERLREKHGEEFFPTSNSLLHGTHVPSTEEIDRMVIDLEKQIEKRDKYSRRRPYNDDADIDYINERNAKFNKKAERFYGKYTAEIKQNLERGTAV

SEQ ID NO: 42914 - protein, 628 aa, Homo sapiens
MRKVPGFVPASPWGLRLPQKFLFLLFLSGLVTLCFGALFLLPHSSRLKRLFLAPRTQQPGLEVVAEIAGHAPAREQEPPPNPAPAAPAPGEDDPSSWASPRRRKGGLRRTRPTGPREEATAARGNSIPASRPGDEGVPFRFDFNAFRSRLRHPVLGTRADESQEPQSQVRAQREKIKEMMQFAWQSYKRYAMGKNELRPLTKDGYEGNMFGGLSGATVIDSLDTLYLMELKEEFQEAKAWVGESFHLNVSGEASLFEVNIRYIGGLLSAFYLTGEEVFRIKAIRLGEKLLPAFNTPTGIPKGVVSFKSGNWGWATAGSSSILAEFGSLHLEFLHLTELSGNQVFAEKVRNIRKVLRKIEKPFGLYPNFLSPVSGNWVQHHVSVGGLGDSFYEYLIKSWLMSGKTDMEAKNMYYEALEAIETYLLNVSPGGLTYIAEWRGGILDHKMGHLACFSGGMIALGAEDAKEEKRAHYRELAAQITKTCHESYARSDTKLGPEAFWFNSGREAVATQLSESYYILRPEVVESYMYLWRQTHNPIYREWGWEVVLALEKYCRTEAGFSGIQDVYSSTPNHDNKQQSFFLAETLKYLYLLFSEDDLLSLEDWVFNTEAHPLPVNHSDSSGRAWGRH

SEQ ID NO: 42915 - protein, 54 aa, Homo sapiens
MAEEKLTHKMEANKENREAQMAAKLERLREKDKHIEEVRKNKESKDPADETEAD

SEQ ID NO: 42916 - protein, 116 aa, Homo sapiens
MKAKRRRPDLDEIHRELRPQGSARPQPDPNAEFDPDLPGGGLHRCLACARYFIDSTNLKTHFRSKDHKKRLKQLSVEPYSQEEAERAAGMGSYVPPRRLAVPTEVSTEVPEMDTST

SEQ ID NO: 42917 - protein, 759 aa, Homo sapiens [sequence omitted]

SEQ ID NO: 42918 - protein, 309 aa, Homo sapiens [sequence omitted]

SEQ ID NO: 42919 - protein, 275 aa, Homo sapiens
MPKHIAFIMDGNRRYAKKCQVERQEGHSQGFNKLAETLRWCLNLGILEVTVYAFSIENFKRSKSEVDGLMDLARQKFSRLMEEKEKLQKHGVCIRVLGDLHLLPLDLQELIAQAVQATKNYNNDISESLLDKCLYTNRSPHPDILIRTSGEVRLSDFLLWQTSHSCLVFQPVLWPEYTFWNLFEAILQFQMNHSVLQKARDMYAEERKRQQLERDQATVTEQLLREGLQASGDAQLRRTRLHKLSARREERVQGFLQALELKRADWLARLGTASA

SEQ ID NO: 42920 - protein, 117 aa, Homo sapiens
MAWGVEQGLLDPSDISESLLDKCLYTNRSPHPDILIRTSGEVRLSDFLLWQTSHSCLVFQPVLWPEYTFWNLFEAILQFQMNHSVLQHPGSLLTKAWKKPFQQDGELYGNCSSPKSS

SEQ ID NO: 42921 - protein, 1954 aa, Homo sapiens
MASQCWGAAAAAAAAAAASGGAQQRSHHAPMSPGSSGGGGQPLARTPQPSSPMDQMGKMRPQPYGGTNPYSQQQGPPSGPQQGHGYPGQPYGSQTPQRYPMTMQGRAQSAMGGLSYTQQIPPYGQQGPSGYGQQGQTPYYNQQSPHPQQQQPPYSQQPPSQTPHAQPSYQQQPQSQPPQLQSSQPPYSQQPSQPPHQQSPAPYPSQQSTTQQHPQSQPPYSQPQAQSPYQQQQPQQPAPSTLSQQAAYPQPQSQQSQQTAYSQQRFPPPQELSQDSFGSQASSAPSMTSSKGGQEDMNLSLQSRPSSLPDLSGSIDDLPMGTEGALSPGVSTSGISSSQGEQSNPAQSPFSPHTSPHLPGIRGPSPSPVGSPASVAQSRSGPLSPAAVPGNQMPPRPPSGQSDSIMHPSMNQSSIAQDRGYMQRNPQMPQYSSPQPGSALSPRQPSGGQIHTGMGSYQQNSMGSYGPQGGQYGPQGGYPRQPNYNALPNANYPSAGMAGGINPMGAGGQMHGQPGIPPYGTLPPGRMSHASMGNRPYGPNMANMPPQVGSGMCPPPGGMNRKTQETAVAMHVAANSIQNRPPGYPNMNQGGMMGTGPPYGQGINSMAGMINPQGPPYSMGGTMANNSAGMAASPEMMGLGDVKLTPATKMNNKADGTPKTESKSKKSSSSTTTNEKITKLYELGGEPERKMWVDRYLAFTEEKAMGMTNLPAVGRKPLDLYRLYVSVKEIGGLTQVNKNKKWRELATNLNVGTSSSAASSLKKQYIQCLYAFECKIERGEDPPPDIFAAADSKKSQPKIQPPSPAGSGSMQGPQTPQSTSSSMAEGGDLKPPTPASTPHSQIPPLPGMSRSNSVGIQDAFNDGSDSTFQKRNSMTPNPGYQPSMNTSDMMGRMSYEPNKDPYGSMRKAPGSDPFMSSGQGPNGGMGDPYSRAAGPGLGNVAMGPRQHYPYGGPYDRVRTEPGIGPEGNMSTGAPQPNLMPSNPDSGMYSPSRYPPQQQQQQQQRHDSYGNQFSTQGTPSGSPFPSQQTTMYQQQQQNYKRPMDGTYGPPAKRHEGEMYSVPYSTGQGQPQQQQLPPAQPQPASQQQAAQPSPQQDVYNQYGNAYPATATAATERRPAGGPQNQFPFQFGRDRVSAPPGTNAQQNMPPQMMGGPIQASAEVAQQGTMWQGRNDMTYNYANRQSTGSAPQGPAYHGVNRTDEMLHTDQRANHEGSWPSHGTRQPPYGPSAPVPPMTRPPPSNYQPPPSMQNHIPQVSSPAPLPRPMENRTSPSKSPFLHSGMKMQKAGPPVPASHIAPAPVQPPMIRRDITFPPGSVEATQPVLKQRRRLTMKDIGTPEAWRVMMSLKSGLLAESTWALDTINILLYDDNSIMTFNLSQLPGLLELLVEYFRRCLIEIFGILKEYEVGDPGQRTLLDPGRFSKVSSPAPMEGGEEEEELLGPKLEEEEEEEVVENDEEIAFSGKDKPASENSEEKLISKFDKLPVKIVQKNDPFVVDCSDKLGRVQEFDSGLLHWRIGGGDTTEHIQTHFESKTELLPSRPHAPCPPAPRKHVTTAEGTPGTTDQEGPPPDGPPEKRITATMDDMLSTRSSTLTEDGAKSSEAIKESSKFPFGISPAQSHRNIKILEDEPHSKDETPLCTLLDWQDSLAKRCVCVSNTIRSLSFVPGNDFEMSKHPGLLLILGKLILLHHKHPERKQAPLTYEKEEEQDQGVSCNKVEWWWDCLEMLRENTLVTLANISGQLDLSPYPESICLPVLDGLLHWAVCPSAEAQDPFSTLGPNAVLSPQRLVLETLSKLSIQDNNVDLILATPPFSRLEKLYSTMVRFLSDRKNPVCREMAVVLLANLAQGDSLAARAIAVQKGSIGNLLGFLEDSLAATQFQQSQASLLHMQNPPFEPTSVDMMRRAARALLALAKVDENHSEFTLYESRLLDISVSPLMNSLVSQVICDVLFLIGQS

SEQ ID NO: 42922 - protein, 424 aa, Homo sapiens
MPSESGAERRDRAAAQVGTAAATAVATAAPAGGGPDPEALSAFPGRHLSGLSWPQVKRLDALLSEPIPIHGRGNFPTLSVQPRQIVQVVRSTLEEQGLHVHSVRLHGSAASHVLHPESGLGYKDLDLVFRVDLRSEASFQLTKAVVLACLLDFLPAGVSRAKITPLTLKEAYVQKLVKVCTDSDRWSLISLSNKSGKNVELKFVDSVRRQFEFSIDSFQIILDSLLLFGQCSSTPMSEAFHPTVTGESLYGDFTEALEHLRHRVIATRSPEEIRGGGLLKYCHLLVRGFRPRPSTDVRALQRYMCSRFFIDFPDLVEQRRTLERYLEAHFGGADAARRYACLVTLHRVVNESTVCLMNHERRQTLDLIAALALQALAEQGPAATAALAWRPPGTDGVVPATVNYYVTPVQPLLAHAYPTWLPCN

SEQ ID NO: 42923 - protein, 335 aa, Homo sapiens
MLQDTKDIMKEKRKHRKEKKDNPNRGNVNPRKIKTRKEEWEKMKMGQEFVESKEKLGTSGYPPTLVYQNGSIGCVENVDASSYPPPPQSDSASSPSPSFSEDNLPPPPAEFSYPVDNQRGSGLAGPKRSSVVSPSHPPPAPPLGSPPGPKPGFAPPPAPPPPPPPMIGIPPPPPPVGFGSPGTPPPPSPPSFPPHPDFAAPPPPPPPPAADYPTLPPPPLSQPTGGAPPPPPPPPPPGPPPPPFTGADGQPAIPPPLSDTTKPKSSLPAVSDARSDLLSAIRQGFQLRRVEEQREQEKRDVVGNDVATILSRRIAVEYSDSEDDSSEFDEDDWSD

SEQ ID NO: 42924 - protein, 77 aa, Homo sapiens
MLHQKDQMILEKEKKITELKADFQYQESQMRAKMNQMEKTHKEVTEQLQAKNRELLKQAAALSKSKKSEKSGAITSP

SEQ ID NO: 42925 - protein, 81 aa, Homo sapiens
MLHQKDQMILEKEKKITELKADFQYQESQMRAKMNQMEKTHKEVTEQLQRWALAILPGLVLNSWLQAILPPQPHKVLGLQA

SEQ ID NO: 42926 - protein, 174 aa, Homo sapiens
MTAAPMDVRQWVDTDDTSSENTVVPPETYVKVAGHLRSFQNKKSLVAFKIMPLEDMNEFTTHILEVINAHMVLSKANSQPSAGRAPISNPGMSEAGNFGGNSFMPANGLTVAQNQVLNLIKACPRPEGLNFQDLKNQLKHMSVSSIKQAVDFLSNEGHIYSTVDDDHFKSTDAE

SEQ ID NO: 42927 - protein, 398 aa, Homo sapiens
MGLHPDYFTSFWRLHYLLLHTDGPLASSWRHYIAIMAAARHQCSYLVGSHMAEFLQTGGDPEWLLGLHRAPEKLRKLSEINKLLAHRPWLITKEHIQALLKTGEHTWSLAELIQALVLLTHCHSLSSFVFGCGILPEGDADGSPAPQAPTPPSEQSSPPSRDPLNNSGGFESARDVEALMERMQQLQESLLRDEGTSQEEMESRFELEKSESLLVTPSADILEPSPHPDMLCFVEDPTFGYEDFTRRGAQAPPTFRAQDYTWEDHGYSLIQRLYPEGGQLLDEKFQAAYSLTYNTIAMHSGVDTSVLRRAIWNYIHCVFGIRYDDYDYGEVNQLLERNLKVYIKTVACYPEKTTRRMYNLFWRHFRHSEKVHVNLLLLEARMQAALLYALRAITRYMT

SEQ ID NO: 42928 - protein, 281 aa, Homo sapiens [sequence omitted]

SEQ ID NO: 42929 - protein, 414 aa, Homo sapiens [sequence omitted]

SEQ ID NO: 42930 - protein, 497 aa, Homo sapiens [sequence omitted]

SEQ ID NO: 42931 - protein, 400 aa, Homo sapiens
MLSPGVESQLYKLPWVCEEGAGIPTVLQGHIDCGSLLGYRAVYRMCFATAAFFFFFTLLMLCVSSSRDPRAAIQNGFWFFKFLILVGLTVGAFYIPDGSFTNIWFYFGVVGSFLFILIQLVLLIDFAHSWNQRWLGKAEECDSRAWYAGLFFFTLLFYLLSIAAVALMFMYYTEPSGCHEGKVFISLNLTFCVCVSIAAVLPKVQDAQPNSGLLQASVITLYTMFVTWSALSSIPEQKCNPHLPTQLGNETVVAGPEGYETQWWDAPSIVGLIIFLLCTLFISLRSSDHRQVNSLMQTEECPPMLDATQQQQQVAACEGRAFDNEQDGVTYSYSFFHFCLVLASLHVMMTLTNWYKPGETRKMISTWTAVWVKICASWAGLLLYLWTLVAPLLLRNRDFS

SEQ ID NO: 42932 - protein, 76 aa, Homo sapiens
MQEKLARLHFSLDVCGEEEDDEEEEDGVTEGLPEEQKKTMADRNLDQLLSNLEDLSNSIQKLHLAENAEPEEQSAA

SEQ ID NO: 42933 - protein, 357 aa, Homo sapiens [sequence omitted]

SEQ ID NO: 42934 - protein, 56 aa, Homo sapiens
MNGFISSVLMNSSYPGWGEEFSLSKHPQGTEVKAITYSAMQVYNEENPEVFVIIDI

SEQ ID NO: 42935 - protein, 228 aa, Homo sapiens [sequence omitted]

SEQ ID NO: 42936 - protein, 161 aa, Homo sapiens
MREDGLSPNESKLCTESEGISPNNSAWNGPQLSSSNNNFQQTVSDKNMPDSENPTSVFSRISDHSETPNMELSCRNGGSHKSSCEMRSLVVSTSSNKDVLNKDSGKMKGHERRLGKVIPVLQTKTRTNVPTFSQSNLEQQKQLYLRSVIAHIEDPEDTNQG

SEQ ID NO: 42937 - protein, 3273 aa, Homo sapiens
MPSKDNSQKTSVLTQVGVSQGHNMCPDPGIPERGKRLGSDFRLGSSVQFTCNEGYDLQGSKRITCMKVSDMFAAWSDHRPVCRARMCDAHLRGPSGIITSPNFPIQYDNNAHCVWIITALNPSKVIKLAFEEFDLERGYDTLTVGDGGQDGDQKTVLYILTGTSVPDLIVSTNHQMWLLFQTDGSGSSLGFKASYEEIEQGSCGDPGIPAYGRREGSRFHHGDTLKFECQPAFELVGQKAITCQKNNQWSAKKPGCVFSCFFNFTSPSGVVLSPNYPEDYGNHLHCVWLILARPESRIHLAFNDIDVEPQFDFLVIKDGATAEAPVLGTFSGNQLPSSITSSGHVARLEFQTDHSTGKRGFNITFTTFRHNECPDPGVPVNGKRFGDSLQLGSSISFLCDEGFLGTQGSETITCVLKEGSVVWNSAVLRCEAPCGGHLTSPSGTILSPGWPGFYKDALSCAWVIEAQPGYPIKITFDRFKTEVNYDTLEVRDGRTYSAPLIGVYHGTQVPQFLISTSNYLYLLFSTDKSHSDIGFQLRYETITLQSDHCLDPGIPVNGQRHGNDFYVGALVTFSCDSGYTLSDGEPLECEPNFQWSRALPSCEALCGGFIQGSSGTILSPGFPDFYPNNLNCTWIIETSHGKGVFFTFHTFHLESGHDYLLITENGSFTQPLRQLTGSRLPAPISAGLYGNFTAQVRFISDFSMSYEGFNITFSEYDLEPCEEPEVPAYSIRKGLQFGVGDTLTFSCFPGYRLEGTARITCLGGRRRLWSSPLPRCVAECGNSVTGTQGTLLSPNFPVNYNNNHECIYSIQTQPGKGIQLKARAFELSEGDVLKVYDGNNNSARLLGVFSHSEMMGVTLNSTSSSLWLDFITDAENTSKGFELHFSSFELIKCEDPGTPKFGYKVHDEGHFAGSSVSFSCDPGYSLRGSEELLCLSGERRTWDRPLPTCVAECGGTVRGEVSGQVLSPGYPAPYEHNLNCIWTIEAEAGCTIGLHFLVFDTEEVHDVLRIWDGPVESGVLLKELSGPALPKDLHSTFNSVVLQFSTDFFTSKQGFAIQFSVSTATSCNDPGIPQNGSRSGDSWEAGDSTVFQCDPGYALQGSAEISCVKIENRFFWQPSPPTCIAPCGGDLTGPSGVILSPNYPEPYPPGKECDWKVTVSPDYVIALVFNIFNLEPGYDFLHIYDGRDSLSPLIGSFYGSQLPGRIESSSNSLFLAFRSDASVSNAGFVIDYTENPRESCFDPGSIKNGTRVGSDLKLGSSVTYYCHGGYEVEGTSTLSCILGPDGKPVWNNPRPVCTAPCGGQYVGSDGVVLSPNYPQNYTSGQICLYFVTVPKDYVVFGQFAFFHTALNDVVEVHDGHSQHSRLLSSLSGSHTGESLPLATSNQVLIKFSAKGLAPARGFHFVYQAVPRTSATQCSSVPEPRYGKRLGSDFSVGAIVRFECNSGYALQGSPEIECLPVPGALAQWNVSAPTCVVPCGGNLTERRGTILSPGFPEPYLNSLNCVWKIVVPEGAGIQIQVVSFVTEQNWDSLEVFDGADNTVTMLGSFSGTTVPALLNSTSNQLYLHFYSDISVSAAGFHLEYKTVGLSSCPEPAVPSNGVKTGERYLVNDVVSFQCEPGYALQGHAHISCMPGTVRRWNYPPPLCIAQCGGTVEEMEGVILSPGFPGNYPSNMDCSWKIALPVGFGAHIQFLNFSTEPNHDYIEIRNGPYETSRMMGRFSGSELPSSLLSTSHETTVYFHSDHSQNRPGFKLEYQAYELQECPDPEPFANGIVRGAGYNVGQSVTFECLPGYQLTGHPVLTCQHGTNRNWDHPLPKCEVPCGGNITSSNGTVYSPGFPSPYSSSQDCVWLITVPIGHGVRLNLSLLQTEPSGDFITIWDGPQQTAPRLGVFTRSMAKKTVQSSSNQVLLKFHRDAATGGIFAIAFSAYPLTKCPPPTILPNAEVVTENEEFNIGDIVRYRCLPGFTLVGNEILTCKLGTYLQFEGPPPICEVHCPTNELLTDSTGVILSQSYPGSYPQFQTCSWLVRVEPDYNISLTVEYFLSEKQYDEFEIFDGPSGQSPLLKALSGNYSAPLIVTSSSNSVYLRWSSDHAYNRKGFKIRYSAPYCSLPRAPLHGFILGQTSTQPGGSIHFGCNAGYRLVGHSMAICTRHPQGYHLWSEAIPLCQALSCGLPEAPKNGMVFGKEYTVGTKAMYSCSEGYHLQAGAEATAECLDTGLWSNRNVPPQCVPVTCPDVSSISVEHGRWRLIFETQYQFQAQLMLICDPGYYYTGQRVIRCQANGKWSLGDSTPTCRIISCGELPIPPNGHRIGTLSVYGATAIFSCNSGYTLVGSRVRECMANGLWSGSEVRCLATQTKLHSIFYKLLFDVLSSPSLTKAGHCGTPEPIVNGHINGENYSYRGSVVYQCNAGFRLIGMSVRICQQDHHWSGKTPFCVPITCGHPGNPVNGLTQGNQFNLNDVVKFVCNPGYMAEGAARSQCLASGQWSDMLPTCRIINCTDPGHQENSVRQVHASGPHRFSFGTTVSYRCNHGFYLLGTPVLSCQGDGTWDRPRPQCLLVSCGHPGSPPHSQMSGDSYTVGAVVRYSCIGKRTLVGNSTRMCGLDGHWTGSLPHCSGTSVGVCGDPGIPAHGIRLGDSFDPGTVMRFSCEAGHVLRGSSERTCQANGSWSGSQPECGVISCGNPGTPSNARVVFSDGLVFSSSIVYECREGYYATGLLSRHCSVNGTWTGSDPECLVINCGDPGIPANGLRLGNDFRYNKTVTYQCVPGYMMESHRVSVLSCTKDRTWNGTKPVCKALMCKPPPLIPNGKVVGSDFMWGSSVTYACLEGYQLSLPAVFTCEGNGSWTGELPQCFPVFCGDPGVPSRGRREDRGFSYRSSVSFSCHPPLVLVGSPRRFCQSDGTWSGTQPSCIDPTLTTCADPGVPQFGIQNNSQGYQVGSTVLFRCQKGYLLQGSTTRTCLPNLTWSGTPPDCVPHHCRQPETPTHANVGALDLPSMGYTLIYSCQEGFSLKGGSEHRTCKADGSWTGKPPICLEVRPSGRPINTAREPPLTQALIPGDVFAKNSLWKGAYEYQGKKQPAMLRVTGFQVANSKVNATMIDHSGVELHLAGTYKKEDFHLLLQVYQITGPVEIFMNKFKDDHWALDGHVSSESSGATFIYQGSVKGQGFGQFGFQRLDLRLLESDPESIGRHFASNSSSVAAAILVPFIALIIAGFVLYLYKHRRRPKVPFNGYAGHENTNVRATFENPMYDRNIQPTDIMASEAEFTVSTVCTAV

SEQ ID NO: 42938 - protein, 501 aa, Homo sapiens
MNCCENCGSYCYSSSGPCQSQKVFSSTSVTAYKQNSAQIPPYALGKSLRPSAEMIETTNDSGKTELFCSINCLSAYRVKTVTSSGVQVSCHSCKTSAIPQYHLAMSNGTIYSFCSSSCVVAFQNVFSKPKGTNSSAVPLSQGQVVVSPPSSRSAVSIGGGNTSAVSPSSIRGSAAASLQPLAEQSQQVALTHTVVKLKCQHCNHLFATKPELLFYKGKMFLFCGKNCSDEYKKKNKVVAMCDYCKLQKIIKETVRFSGVDKPFCSEVCKFLSARDFGERWGNYCKMCSYCSQTSPNLVENRLEGKLEEFCCEDCMSKFTVLFYQMAKCDGCKRQGKLSESIKWRGNIKHFCNLFCVLEFCHQQIMNDCLPQNKVNISKAKTAVTELPSARTDTTPVITSVMSLAKIPATLSTGNTNSVLKGAVTKEAAKIIQDESTQEDAMKFPSSQSSQPSRLLKNKGISCKPVTQTKATSCKPHTQHKECQTETGFHSVGNAGLKLVTS

SEQ ID NO: 42939 - protein, 670 aa, Homo sapiens
MGLNQNRGPMGPGPGQSGPKPPIPPPPPHQQQQQPPPQQPPPQQPPPHQPPPHPQPHQQQQPPPPPQDSSKPVVAQGPGPAPGVGSAPPASSSAPPATPPTSGAPPGSGPGPTPTPPPAVTSAPPGAPPPTPPSSGVPTTPPQAGGPPPPPAAVPGPGPGPKQGPGPGGPKGGKMPGGPKPGGGPGLSTPGGHPKPPHRGGGEPRGGRQHHPPYHQQHHQGPPPGGPGGRSEEKISDSEGFKANLSLLRRPGEKTYTQRCRLFVGNLPADITEDEFKRLFAKYGEPGEVFINKGKGFGFIKLESRALAEIAKAELDDTPMRGRQLRVRFATHAAALSVRNLSPYVSNELLEEAFSQFGPIERAVVIVDDRGRSTGKGIVEFASKPAARKAFERCSEGVFLLTTTPRPVIVEPLEQLDDEDGLPEKLAQKNPMYQKERETPPRFAQHGTFEYEYSQRWKSLDEMEKQQREQVEKNMKDAKDKLESEMEDAYHEHQANLLRQDLMRRQEELRRMEELHNQEMQKRKEMQLRQEEERRRREEEMMIRQREMEEQMRRQREESYSRMGYMDPRERDMRMGGGGAMNMGDPYGSGGQKFPPLGGGGGIGYEANPGVPPATMSGSMMGSDMRTERFGQGGAGPVGGQGPRGMGPGTPAGYGRGREEYEGPNKKPRF

SEQ ID NO: 42940 - protein, 946 aa, Homo sapiens
MCIQADCSRPQSCRAFRTHSSNSMLVFLKKFQTADDLGFLPEDDVPHLLGLGWNWASWRQSPPRAALRPAVSSSDQQSLIRKLQKRGSPSDVVTPIVTQHSKVNDSNELGGLTTSGSAEVHKAITISSPLTTDLTAELSGGPKNVSVQPEISEGLATTPSTQQVKSSEKTQIAVPQPVAPSYSYATPTPQASFQSTSAPYPVIKELVVSAGESVQITLPKNEVQLNAYVLQEPPKGETYTYDWQLITHPRDYSGEMEGKHSQILKLSKLTPGLYEFKVIVEGQNAHGEGYVNVTVKPEPRKNRPPIAIVSPQFQEISLPTTSTVIDGSQSTDDDKIVQYHWEELKGPLREEKISEDTAILKLSKLVPGNYTFSLTVVDSDGATNSTTANLTVNKAVDYPPVANAGPNQVITLPQNSITLFGNQSTDDHGITSYEWSLSPSSKGKVVEMQGVRTPTLQLSAMQEGDYTYQLTVTDTIGQQATAQVTVIVQPENNKPPQADAGPDKELTLPVDSTTLDGSKSSDDQKIISYLWEKTQGPDGVQLENANSSVATVTGLQVGTYVFTLTVKDERNLQSQSSVNVIVKEEINKPPIAKITGNVVITLPTSTAELDGSKSSDDKGIVSYLWTRDEGSPAAGEVLNHSDHHPILFLSNLVEGTYTFHLKVTDAKGESDTDRTTVEVKPDPRKNNLVEIILDINVSQLTERLKGMFIRQIGVLLGVLDSDIIVQKIQPYTEQSTKMVFFVQNEPPHQIFKGHEVAAMLKSELRKQKADFLIFRALEVNTVTCQLNCSDHGHCDSFTKRCICDPFWMENFIKVQLRDGDSNCEWSVLYVIIATFVIVVALGILSWTVICCCKRQKGKPKRKSKYKILDATDQESLELKPTSRAGIKQKGLLLSSSLMHSESELDSDDAIFTWPDREKGKLLHGQNGSVPNGQTPLKARSPREEIL

SEQ ID NO: 42941 - protein, 174 aa, Homo sapiens
MKDDHDKMFKMSEKILLLCVGEAGDTVQFAEYIQKNVQLYKMRNGYELSPTAAANFTRRNLADCLRSRTPYHVNLLLAGYDEHEGPALYYMDYLAALAKAPFAAHGYGAFLTLSILDRYYTPTISRERAVELLRKCLEELQKRFILNLPTFSVRIIDKNGIHDLDNISFPKQGS

SEQ ID NO: 42942 - protein, 657 aa, Homo sapiens
MQKGPVGPPFREGKGQYLEMPLPLLPMDLKGEPGPPGKPGPRGPPGPPGFPGKPGMGKPGLHGQPGPAGPPGFSRMGKAGPPGLPGKVGPPGQPGLRGEPGIRGDQGLRGPPGPPGLPGPSGITIPGKPGAQGVPGPPGFQGEPGPQGEPGPPGDRGLKGDNGVGQPGLPGAPGQGGAPGPPGLPGPAGLGKPGLDGLPGAPGDKGESGPPGVPGPRGEPGAVGPKGPPGVDGVGVPGAAGLPGPQGPSGAKGEPGTRGPPGLIGPTGYGMPGLPGPKGDRGPAGVPGLLGDRGEPGEDGEPGEQGPQGLGGPPGLPGSAGLPGRRGPPGPKGEAGPGGPPGVPGIRGDQGPSGLAGKPGVPGERGLPGAHGPPGPTGPKGEPGFTGRPGGPGVAGALGQKGDLGLPGQPGLRGPSGIPGLQGPAGPIGPQGLPGLKGEPGLPGPPGEGRAGEPGTAGPTGPPGVPGSPGITGPPGPPGPPGPPGAPGAFDETGIAGLHLPNGGVEGAVLGKGGKPQFGLGELSAHATPAFTAVLTSPFPASGMPVKFDRTLYNGHSGYNPATGIFTCPVGGVYYFAYHVHVKGTNVWVALYKNNVPATYTYDEYKKGYLDQASGGAVLQLRPNDQVWVQMPSDQANGLYSTEYIHSSFSGFLLCPT

SEQ ID NO: 42943 - protein, 764 aa, Homo sapiens
MSALVPDTPPDTPPAMKNATSSKQLPLEPESPSGQVGPRPAPPQEESPSSEAKSRGPTPPAMGPRDARPPRRSSQPSPTAVPASDSPPTKQEVKKAGERHKLAKERREERAKYLAAKKAVWLEKEEKAKALREKQLQERRRRLEEQRLKAEQRRAALEERQRQKLEKNKERYEAAIQRSVKKTWAEIRQQRWSWAGALHHSSPGHKTNRSLQLSAWESSIVDRLMTPTLSFLARSRSAVTLPRNGRDQGRGCDPGRGPTWGRAGASLARGPQPDRTHPSAAVPVCPRSASASPLTPCSVTRSVHRCAPAGERGERRKPNAGGSPAPVRRRPEASPVQKKEKKDKERENEKEKSALARERSLKKRQSLPASPRARLSASTASELSPKSKARPSSPSTSWHRPASPCPSPGPGHTLPPKPPSPRGTTASPKGRVRRKEEAKESPSAAGPEDKSQSKRRASNEKESAAPASPAPSPAPSPTPAPPQKEQPPAETPTDAAVLTSPPAPAPPVTPSKPMAGTTDREEATRLLAEKRRQAREQREREEQERRLQAERDKRMREEQLAREAEARAEREAEARRREEQEAREKAQAEQEEQERLQKQKEEAEARSREEAERQRLEREKHFQQQEQERQERRKRLEEIMKRTRKSEVSETKKQDSKEANANGSSPEPVKAVEARSPGLQKEAVQKEEPIPQEPQWSLPSKELPASLVNGLQPLPAHQENGFSTNGPSGDKSLSRTPETLLPFAEAEAFLKKAVVQSPQVTEVL

SEQ ID NO: 42944 - protein, 769 aa, Homo sapiens [sequence omitted]

SEQ ID NO: 42945 - protein, 802 aa, Homo sapiens
MSALVPDTPPDTPPAMKNATSSKQLPLEPESPSGQVGPRPAPPQEESPSSEAKSRGPTPPAMGPRDARPPRRSSQPSPTAVPASDSPPTKQEVKKAGERHKLAKERREERAKYLAAKKAVWLEKEEKAKALREKQLQERRRRLEEQRLKAEQRRAALEERQRQKLEKNKERYEAAIQRSVKKTWAEIRQQRWSWAGALHHSSPGHKTSGSRCSVSAVNLPKHVDSIINKRLSKSSATLWNSPSRNRSLQLSAWESSIVDRLMTPTLSFLARSRSAVTLPRNGRDQGRGCDPGRGPTWGRAGASLARGPQPDRTHPSAAVPVCPRSASASPLTPCSVTRSVHRCAPAGERGERRKPNAGGSPAPVRRRPEASPVQKKEKKDKERENEKEKSALARERSLKKRQSLPASPRARLSASTASELSPKSKARPSSPSTSWHRPASPCPSPGPGHTLPPKPPSPRGTTASPKGRVRRKEEAKESPSAAGPEDKSQSKRRASNEKESAAPASPAPSPAPSPTPAPPQKEQPPAETPTDAAVLTSPPAPAPPVTPSKPMAGTTDREEATRLLAEKRRQAREQREREEQERRLQAERDKRMREEQLAREAEARAEREAEARRREEQEAREKAQAEQEEQERLQKQKEEAEARSREEAERQRLEREKHFQQQEQERQERRKRLEEIMKRTRKSEVSETKQKQDSKEANANGSSPEPVKAVEARSPGLQKEAVQKEEPIPQEPQWSLPSKELPASLVNGLQPLPAHQENGFSTNGPSGDKSLSRTPETLLPFAEAEAFLKKAVVQSPQVTEVL

SEQ ID NO: 42946 - protein, 583 aa, Homo sapiens [sequence omitted]

SEQ ID NO: 42947 - protein, 728 aa, Homo sapiens
MLRFVDKNGLVPSSSGTVYDRTTVLIEQDPGTLEDEDDDGQCGEHLPFLVGGEEGFHLIDHEAMSQGYVQHIISPDQIHLTINPGSTPMPRNIEGATLTLQSECPETKRKEVKRYQCTFEGCPRTYSTAGNLRTHQKTHRGEYTFVCNQEGCGKAFLTSYSLRIHVRVHTKEKPFECDVQGCEKAFNTLYRLKAHQRLHTGKTFNCESEGCSKYFTTLSDLRKHIRTHTGEKPFRCDHDGCGKAFAASHHLKTHVRTHTGERPFFCPSNGCEKTFSTQYSLKSHMKGHDNKGHSYNALPQHNGSEDTNHSLCLSDLSLLSTDSELRENSSTTQGQDLSTISPAIIFESMFQNSDDTAIQEDPQQTASLTESFNGDAESVSDVPPSTGNSASLSLPLVLQPGLSEPPQPLLPASAPSAPPPAPSLGPGSQQAAFGNPPALLQPPEVPVPHSTQFAANHQEFLPHPQAPQPIVPGLSVVAGASASAAAVASAVAAPAPPQSTTEPLPAMVQTLPLGANSVLTNNPTITITPTPNTAILQSSLVMGEQNLQWILNGATSSPQNQEQIQQASKVEKVFFTTAVPVASSPGSSVQQIGLSVPVIIIKQEEACQCQCACRDSAKERASSRRKGCSSPPPPEPSPQAPDGPSLQLPAQTFSSAPVPGSSSSTLPSSCEQSRQAETPSDPQTETLSAMDVSEFLSLQSLDTPSNLIPIEALLQGEEEMGLTSSFSK

SEQ ID NO: 42948 - protein, 172 aa, Homo sapiens
MPGSRKLEYGGQTWHEHCFLCSGCEQPLGSRSFVPDKGAHYCVPCYENKFAPRCARCSKTLTQGGVTYRDQPWHRECLVCTGCQTPLAGQQFTSRDEDPYCVACFGELFAPKCSSCKRPIVGLGGGKYVSFEDRHWHHNCFSCARCSTSLVGQGFVPDGDQVLCQGCSQAGP

SEQ ID NO: 42949 - protein, 157 aa, Homo sapiens [sequence omitted]

SEQ ID NO: 42950 - protein, 34 aa, Homo sapiens
MRRAGTIRKQRDKLIKEGKYTPPPHHIGKGEPRP

SEQ ID NO: 42951 - protein, 5918 aa, Homo sapiens
MSGLIAPETGENLSLEEGIARNLINPQMYQQLRELQDALALISRLTESRGPLSVVEAIEKRIISETVGLKILEAHLATGGFSLSPSENCINLEEAFHQGLISAWLHSVLESYLRTSKNLIDPNTAEKIGLLDLMQRCIVHQESGFKLLPVKQLAGGMVSLKSGRKVSIFRAVQEGLIDRQVTVRLLEAQLFAGGIVDPRTGHRLTVEEAVRHNLIDQDMACAILIRQLQTGGIIDTVTGQRLTIDEAVSNDLVAAKIALVILESLWSFMGLLWPESGEILPITDALEQGIVSTELAHKILSNRQHIKALFLPATTEILSWKKAIESGILDRDLANNLKSICIPDVMPHMQLADSAEQNINPGAAVLPCSKSHPKATASQSENLLFQLMTHSYINVQNGQRLLLLDKELMETLTSRDEYQTSPPKVVEIGHQRQKTPEGLQESANVKISGTFSSGWTVRLPEFQFSSQNKEYPDREDCTTEKGKKTTVETEDSSVENPEQDLFVEQKERNPNIDALKVINKVKLEVQRQLIGTQREDQTAVSVRENASRGHLLTIPPAEAEGVPLVVDKDVFSVETPKKEHQPLRNTSFTCQNEQAHTLETEYIHDETGGSHIKPQSKKLQVQVKKTLGIKLELKSETDGNVHPLDKKEMLKKTFLAKDDHKESQEAQNIAGGSMMMSEKTDEEDSGREIFLSCSHPLELLEEATLNVLSAQLLDGGIFHEQTGQKLLLNEAISRGIVPSHTAVKLMEKLNMFQGFFDSQTCESLTTEEVINEGLMDEKLLHNVLMADKAISGVLDPRTQTLCSVKDAVTVGLLDKETATRILERQVVTGGIIDLKRGKKVSVTLASTLGLVDVADQPELINLEKASKGRDAEKTVRERLISLQMETTGLIDPDSKAPLTVVQSIDRGLLEREEAVRLLTKQVVDGGIIHHISGMRLSVDNAFRHGLIGEDLAEKLKRVENLNIHQIFNPETKENISLPKAIKLDLITSDLKREIQEVQAFTGNFVDLISGQRLTLAEAKKEGLLTNEAVLSPGMMHGIVDPENCRIVPYSELVKKCKIDIESGQRYLEVIPFSDIKDGVSDKVLTLSQAIQLGKVDFASTLKVLEAQANTGGIIDTATGKRLTLASALEEKLVDENMVRIIASHQVLNGGIVDIFSDQRVTLVEAIEKRLISPELANMIQIDSSEFSDHRAQIEKQEGIEVCALQNEFLGKDMLIACNQTAEMSCNKVEESERLFQVENQSAQEKVKVRVSDGEQAKKSREISLKEFGCKDQRKPRMSSDAKEFISIINPHNLKGKSLGQVSLTHPYSECDFKLKEVARNNMGNDTNEEQEKAVTKIEIISHMKQSTSCLDSEEIRENQGEVILEVQETYCETSGKLPSEQVLQQPMNARVKSKREKREVIVEESIRTCKPAFLSEEKLYQETAIRDEHDSHIKSQPREMTSSEKGKEADTEMGFSITFKIEESSSQVVPQGISVKHLDALTLFSSKQANEGKVNNLSLCLTLKPEENLSREIACGAQSEPFPCMTPRPEGLHYQESDGKAQVTGPSQISKTDKSFQGTTRQETNYQDSWVTSKTKETKHQISSSNECKEKSYQEVSFDPARGLKLEEITVSRPDSKEVRYLEFSDRKDLHHQGSKSDDKLCGTLKSEIATQELTGEKFLEMANPNVAGLEAGSIEDIVTQRGSRVLGSFLPEKLFKGVSQKENTGQQNAIISPTVLETSEEKTVSLTVCSAVKTEKTPQEKLRESPGSEQTPFMTAPEGKGNGGVNPEPFRATQNVFTRQLCLEHDEKLVSYLSLLRNIEMRTKQIQPLELNLAELQDLLCQAKVLERELKDLTTLVSQELECVNQIIISQPQEVPAQLLKALEKDAKNLQKSLSSVSDTWNSRLLHFQNAVEIEKTKVLNQHTQLEGRLQDLRAWVGNKNLILNSKGSNSEIDVDSLNLCLQQYEDLKQPMAERKAQLDALAFDIQFFISEHAQDLSPQQNRQMLRLLNELQRSFQDILEQTAAQVDALQGHLQQMEQEALVKTLQKQQNTCHQQLEDLCSWVGQAERALAGHQGRTTQQDLSALQKNQSDLKDLQDDIQNRATSFATVVKDIEGFMEENQTKLSPRELTALREKLHQAKEQYEALQEETRVAQKELEEAVTSALQQETEKSKAAKELAENKKKIDALLDWVTSVGSSGGQLLTNLPGMEQLSGASLEKGALDTTDGYMGVNQAPEKLDKQCEMMKARHQELLSQQQNFILATQSAQAFLDQHGHNLTPEEQQMLQQKLGELKEQYSTSLAQSEAELKQVQTLQDELQKFLQDHKEFESWLERSEKELENMHKGGSSPETLPSLLKRQGSFSEDVISHKGDLRFVTISGQKVLDMENSFKEGKEPSEIGNLVKDKLKDATERYTALHSKCTRLGSHLNMLLGQYHQFQNSADSLQAWMQACEANVEKLLSDTVASDPGVLQEQLATTKQLQEELAEHQVPVEKLQKVARDIMEIEGEPAPDHRHVQETTDSILSHFQSLSYSLAERSSLLQKAIAQSQSVQESLESLLQSIGEVEQNLEGKQVSSLSSGVIQEALATNMKLKQDIARQKSSLEATREMVTRFMETADSTTAAVLQGKLAEVSQRFEQLCLQQQEKESSLKKLLPQAEMFEHLSGKLQQFMENKSRMLASGNQPDQDITHFFQQIQELNLEMEDQQENLDTLEHLVTELSSCGFALDLCQHQDRVQNLRKDFTELQKTVKEREKDASSCQEQLDEFRKLVRTFQKWLKETEGSIPPTETSMSAKELEKQIEHLKSLLDDWASKGTLVEEINCKGTSLENLIMEITAPDSQGKTGSILPSVGSSVGSVNGYHTCKDLTEIQCDMSDVNLKYEKLGGVLHERQESLQAILNRMEEVHKEANSVLQWLESKEEVLKSMDAMSSPTKTETVKAQAESNKAFLAELEQNSPKIQKVKEALAGLLVTYPNSQEAENWKKIQEELNSRWERATEVTVARQRQLEESASHLACFQAAESQLRPWLMEKELMMGVLGPLSIDPNMLNAQKQQVQFMLKEFEARRQQHEQLNEAAQGILTGPGDVSLSTSQVQKELQSINQKWVELTDKLNSRSSQIDQAIVKSTQYQELLQDLSEKVRAVGQRLSVQSAISTQPEAVKQQLEETSEIRSDLEQLDHEVKEAQTLCDELSVLIGEQYLKDELKKRLETVALPLQGLEDLAADRINRLQAALASTQQFQQMFDELRTWLDDKQSQQAKNCPISAKLERLQSQLQENEEFQKSLNQHSGSYEVIVAEGESLLLSVPPGEEKRTLQNQLVELKNHWEELSKKTADRQSRLKDCMQKAQKYQWHVEDLVPWIEDCKAKMSELRVTLDPVQLESSLLRSKAMLNEVEKRRSLLEILNSAADILINSSEADEDGIRDEKAGINQNMDAVTEELQAKTGSLEEMTQRLREFQESFKNIEKKVEGAKHQLEIFDALGSQACSNKNLEKLRAQQEVLQALEPQVDYLRNFTQGLVEDAPDGSDASQLLHQAEVAQQEFLEVKQRVNSGCVMMENKLEGIGQFHCRVREMFSQLADLDDELDGMGAIGRDTDSLQSQIEDVRLFLNKIHVLKLDIEASEAECRHMLEEEGTLDLLGLKRELEALNKQCGKLTERGKARQEQLELTLGRVEDFYRKLKGLNDATTAAEEAEALQWVVGTEVEIINQQLADFKMFQKEQVDPLQMKLQQVNGLGQGLIQSAGKDCDVQGLEHDMEEINARWNTLNKKVAQRIAQLQEALLHCGKFQDALEPLLSWLADTEELIANQKPPSAEYKVVKAQIQEQKLLQRLLDDRKATVDMLQAEGGRIAQSAELADREKITGQLESLESRWTELLSKAAARQKQLEDILVLAKQFHETAEPISDFLSVTEKKLANSEPVGTQTAKIQQQIIRHKALEEDIENHATDVHQAVKIGQSLSSLTSPAEQGVLSEKIDSLQARYSEIQDRCCRKAALLDQALSNARLFGEDEVEVLNWLAEVEDKLSSVFVKDFKQDVLHRQHADHLALNEEIVNRKKNVDQAIKNGQALLKQTTGEEVLLIQEKLDGIKTRYADITVTSSKALRTLEQARQLATKFQSTYEELTGWLREVEEELATSGGQSPTGEQIPQFQQRQKELKKEVMEHRLVLDTVNEVSRALLELVPWRAREGLDKLVSDANEQYKLVSDTIGQRVDEIDAAIQRSQQYEQAADAELAWVAETKRKLMALGPIRLEQDQTTAQLQVQKAFSIDIIRHKDSMDELFSHRSEIFGTCGEEQKTVLQEKTESLIQQYEAISLLNSERYARLERAQVLVNQFWETYEELSPWIEETRALIAQLPSPAIDHEQLRQQQEEMRQLRESIAEHKPHIDKLLKIGPQLKELNPEEGEMVEEKYQKAENMYAQIKEEVRQRALALDEAVSQSTQITEFHDKIEPMLETLENLSSRLRMPPLIPAEVDKIRECISDNKSATVELEKLQPSFEALKRRGEELIGRSQGADKDLAAKEIQDKLDQMVFFWEDIKARAEEREIKFLDVLELAEKFWYDMAALLTTIKDTQDIVHDLESPGIDPSIIKQQVEAAETIKEETDGLHEELEFIRILGADLIFACGETEKPEVRKSIDEMNNAWENLNKTWKERLEKLEDAMQAAVQYQDTLQAMFDWLDNTVIKLCTMPPVGTDLNTVKDQLNEMKEFKVEVYQQQIEMEKLNHQGELMLKKATDETDRDIIREPLTELKHLWENLGEKIAHRQHKLEGALLALGQFQHALEELMSWLTHTEELLDAQRPISGDPKVIEVELAKHHVLKNDVLAHQATVETVNKAGNELLESSAGDDASSLRSRLEAMNQCWESVLQKTEEREQQLQSTLQQAQGFHSEIEDFLLELTRMESQLSASKPTGGLPETAREQLDTHMELYSQLKAKEETYNQLLDKGRLMLLSRDDSGSGSKTEQSVALLEQKWHVVSSKMEERKSKLEEALNLATEFQNSLQEFINWLTLAEQSLNIASPPSLILNTVLSQIEEHKVFANEVNAHRDQIIELDQTGNQLKFLSQKQDVVLIKNLLVSVQSRWEKVVQRSIERGRSLDDARKRAKQFHEAWKKLIDWLEDAESHLDSELEISNDPDKIKLQLSKHKEFQKTLGGKQPVYDTTIRTGRALKEKTLLPEDSQKLDNFLGEVRDKWDTVCGKSVERQHKLEEALLFSGQFMDALQALVDWLYKVEPQLAEDQPVHGDLDLVMNLMDAHKVFQKELGKRTGTVQVLKRSGRELIENSRDDTTWVKGQLQELSTRWDTVCKLSVSKQSRLEQALKQAEVFRDTVHMLLEWLSEAEQTLRFRGALPDDTEALQSLIDTHKEFMKKVEEKRVDVNSAVAMGEVILAVCHPDCITTIKHWITIIRARFEEVLTWAKQHQQRLETALSELVANAELLEELLAWIQWAETTLIQRDQEPIPQNIDRVKALIAEHQTFMEEMTRKQPDVDRVTKTYKRKNIEPTHAPFIEKSRSGGRKSLSQPTPPPMPILSQSEAKNPRINQLSARWQQVWLLALERQRKLNDALDRLEELKEFANFDFDVWRKKYMRWMNHKKSRVMDFFRRIDKDQDGKITRQEFIDGILASKFPTTKLEMTAVADIFDRDGDGYIDYYEFVAALHPNKDAYRPTTDADKIEDEVTRQVAQCKCAKRFQVEQIGENKYRFFLGNQFGDSQQLRLVRILRSTVMVRVGGGWMALDEFLVKNDPCRARGRTNIELREKFILPEGASQGMTPFRSRGRRSKPSSRAASPTRSSSSASQSNHSCTSMPSSPATPASGTKVIPSSGSKLKRPTPTFHSSRTSLAGDTSNSSSPASTGAKTNRADPKKSASRPGSRAGSRAGSRASSRRGSDASDFDLLETQSACSDTSESSAAGGQGNSRRGLNKPSKIPTMSKKTTTASPRTPGPKR

SEQ ID NO: 42952 - protein, 386 aa, Homo sapiens
MISFVDPLVTNYTVVDFRNRATALIEDIFARDKIPIVVGGTNYYIESLLWKVLVNTKPQEMGTEKVIDRKVELEKEDGLVLHKRLSQVDPEMAAKLHPHDKRKVARSLQVFEETGISHSEFLHRQHTEEGGGPLGGPLKFSNPCILWLHADQAVLDERLDKRVDDMLAAGLLEELRDFHRRYNQKNVSENSQDYQHGIFQSIGFKEFHEYLITEGKCTLETSNQLLKKGIEALKQVTKRYARKQNRWVKNRFLSRPGPIVPPVYGLEVSDVSKWEESVLEPALEIVQSFIQGHKPTATPIKMPYNEAENKRSYHLCDLCDRIIIGDREWAAHIKSKSHLNQLKKRRRLDSDAVNTIESQSVSPDHNKEPKEKGSPGQNDQELKCSV

SEQ ID NO: 42953 - protein, 242 aa, Homo sapiens
MGDSCCNPLSMGAIKKMVEKKIPGIYVLSLEIGKTLMEDVENSFFLNVNSQVTTVCQALAKDPKLQQGYNAMGFSQGGQFLRAVAQRCPSPPMINLISVGGQHQGVFGLPRCPGESSHICDFIRKTLNAGAYSKVVQERLVQAEYWHDPIKEDVYRNHSIFLADINQERGINESYKKNLMALKKFVMVKFLNDSIVDPVDSEDRLGLKEMDNAGQLVFLATEGDHLQLSEEWFYAHIIPFLG

SEQ ID NO: 42954 - protein, 266 aa, Homo sapiens [sequence omitted]

SEQ ID NO: 42955 - protein, 1882 aa, Homo sapiens [sequence omitted]

SEQ ID NO: 42956 - protein, 312 aa, Homo sapiens [sequence omitted]

SEQ ID NO: 42957 - protein, 289 aa, Homo sapiens [sequence omitted]

SEQ ID NO: 42958 - protein, 151 aa, Homo sapiens
MKIELFADVVPKTAENFRQFCTGEFRKDGVPIGYKGSTFHRVIKDFMIQGGDFVNGDGTGVASIYRGPFADENFKLRHSAPGLLSMANSGPSTNGCQFFITCSKCDWLDGKHVVFGKIIDGLLVMRKIENVPTGPNNKPKLPVVISQCGEM

SEQ ID NO: 42959 - protein, 24 aa, Homo sapiens
MDTLLSQSVALPPCTEPNFQGLTH

SEQ ID NO: 42960 - protein, 21 aa, Homo sapiens
MTELEQQQFDEFCKQMQPPGE

SEQ ID NO: 42961 - protein, 294 aa, Homo sapiens
MLPLSSEGSEMGSEKEQSPEPHLPEEGEGGKPWRVDDSEGSWIPPGEKEHGQESLSDELQETHPKKPWQKVTVRARELGDPIAHPRHEADEKPFICAQCGKTFNNTSNLRTHQRIHTGEKPYKCSECGKSFSRSSNRIRHERIHLEEKHYKCPKCQESFRRRSDLTTHQQDHLGKRPYRCDICGKSFSQSATLAVHHRTHLEPAPYICCECGKSFSNSSSFGVHHRTHTGERPYECTECGRTFSDISNFGAHQRTHRGEKPYRCTVCGKHFSRSSNLIRHQKTHLGEQAGKDSS

SEQ ID NO: 42962 - protein, 412 aa, Homo sapiens [sequence omitted]

SEQ ID NO: 42963 - protein, 486 aa, Homo sapiens [sequence omitted]

SEQ ID NO: 42964 - protein, 243 aa, Homo sapiens [sequence omitted]

SEQ ID NO: 42965 - protein, 625 aa, Homo sapiens [sequence omitted]

SEQ ID NO: 42966 - protein, 27 aa, Homo sapiens
MQLLPATSGHRARPRGAQSCGAKHCAN

SEQ ID NO: 42967 - protein, 405 aa, Homo sapiens
MAVGGGSRMTDLTSSIPKPLLPVGNKPLIWYPLNLLERVGFEEVIVVTTRDVQKALCAEFKMKMKPDIVCIPDDADMGTADSLRYIYPKLKTDVLVLSCDLITDVALHEVVDLFRAYDASLAMLMRKGQDSIEPVPGQKGKKKAVEQRDFIGVDSTGKRLLFMANEADLDEELVIKGSILQKHPRIRFHTGLVDAHLYCLKKYIVDFLMENGSITSIRSELIPYLVRKQFSSASSQQGQEEKEEDLKKKELKSLDIYSFIKEANTLNLAPYDACWNACRGDRWEDLSRSQVRCYVHIMKEGLCSRVSTLGLYMEANRQVPKLLSALCPEEPPVHSSAQIVSKHLVGVDSLIGPETQIGEKSSIKRSVIGSSCLIKDRVTITNCLLMNSVTVEEGYVSPCTHLRQR

SEQ ID NO: 42968 - protein, 733 aa, Homo sapiens
MGDIPAAVNAFQEAASLLGKKYGETANECGEAFFFYGKSLLELARMENGVLGNALEGVHVEEEEGEKTEDESLVENNDNIDEEAREELREQVYDAMGEKEEAKKTEDKSLAKPETDKEQDSEMEKGGREDMDISKSAEEPQEKVDLTLDWLTETSEEAKGGAAPEGPNEAEVTSGKPEQEVPDAEEEKSVSGTDVQEECREKGGQEKQGEVIVSIEEKPKEVSEEQPVVTLEKQGTAVEVEAESLDPTVKPVDVGGDEPEEKVVTSENEAGKAVLEQLVGQEVPPAEESPEVTTEAAEASAVEAGSEVSEKPGQEAPVLPKDGAVNGPSVVGDQTPIEPQTSIERLTETKDGSGLEEKVRAKLVPSQEETKLSVEESEAAGDGVDTKVAQGATEKSPEDKVQIAANEETQEREEQMKEGEETEGSEEDDKENDKTEEMPNDSVLENKSLQENEEEEIGNLELAWDMLDLAKIIFKRQETKEAQLYAAQAHLKLGEVSVESENYVQAVEEFQSCLNLQEQYLEAHDRLLAETHYQLGLAYGYNSQYDEAVAQFSKSIEVIENRMAVLNEQVKEAEGSSAEYKKEIEELKELLPEIREKIEDAKESQRSGNVAELALKATLVESSTSGFTPGGGGSSVSMIASRKPTDGASSSNCVTDISHLVRKKRKPEEESPRKDDAKKAKQEPEVNGGSGDAVPSGNEVSENMEEEAENQAESRAAVEGTVEAGATVESTAC

SEQ ID NO: 42969 - protein, 394 aa, Homo sapiens
MGDIPAAVNAFQEAASLLGKKYGETANECGEAFFFYGKSLLELARMENGVLGNALEGVHVEEEEGEKTEDESLVENNDNIDETEGSEEDDKENDKTEEMPNDSVLENKSLQENEEEEIGNLELAWDMLDLAKIIFKRQETKEAQLYAAQAHLKLGEVSVESENYVQAVEEFQSCLNLQEQYLEAHDRLLAETHYQLGLAYGYNSQYDEAVAQFSKSIEVIENRMAVLNEQVKEAEGSSAEYKKEIEELKELLPEIREKIEDAKESQRSGNVAELALKATLVESSTSGFTPGGGGSSVSMIASRKPTDGASSSNCVTDISHLVRKKRKPEEESPRKDDAKKAKQEPEVNGGSGDAVPSGNEVSENMEEEAENQAESRAAVEGTVEAGATVESTAC

SEQ ID NO: 42970 - protein, 128 aa, Homo sapiens
MAVLNEQVKEAEGSSAEYKKEIEELKELLPEIREKIEDAKESQRSGNVAELALKATLVESSTSGFTPGGGGSSVSMIASRKPTDGASSSNCVTDISHLVRKKAENQAESRAAVEGTVEAGATVESTAC

SEQ ID NO: 42971 - protein, 212 aa, Homo sapiens
MSLQQNFSPCPRPWLSSSFPAYMSKTQCYHTSPCSFKKQQKQALLARPSSTITYLTDSPKPALCVTLAGLIPFVAPPLVMLMTKTYIPILAFTQMAYGASFLSFLGGIRWGFALPEGSPAKPDYLNLASSAAPLFFSWFAFLISERLSEAIVTVIMGMGVAFHLELFLLPHYPNWFKALRIVVTLLATFSFIITLVVKSSFPEKGHKRPGQV

SEQ ID NO: 42972 - protein, 430 aa, Homo sapiens
MDPPALPPKPPKPMTSAVPNGMKDSSVSLQDAEWYWGDISREEVNDKLRDMPDGTFLVRDASTKMQGDYTLTLRKGGNNKLIKIYHRDGKYGFSDPLTFNSVVELINHYHHESLAQYNPKLDVKLMYPVSRYQQDQLVKEDNIDAVGKKLQEYHSQYQEKSKEYDRLYEEYTRTSQEIQMKRTAIEAFNETIKIFEEQCHTQEQHSKEYIERFRREGNEKEIERIMMNYDKLKSRLGEIHDSKMRLEQDLKNQALDNREIDKKMNSIKPDLIQLRKIRDQHLVWLNHKGVRQKRLNVWLGIKNEDADENYFINEEDENLPHYDEKTWFVEDINRVQAEDLLYGKPDGAFLIRESSKKGCYACSVVADGEVKHCVIYSTARGYGFAEPYNLYSSLKELVLHYQQTSLVQHNDSLNVRLAYPVHAQMPSLCR

SEQ ID NO: 42973 - protein, 525 aa, Homo sapiens
MDRAAQRFRLQNPDLDSEALLALPLPQLVQKLHSRELAPEAVLFTYVGKAWEVNKGTNCVTSYLADCETQLSQAPRQGLLYGVPVSLKECFTYKGQDSTLGLSLNEGVPAECDSVVVHVLKLQGAVPFVHTNVPQSMFSYDCSNPLFGQTVNPWKSSKSPGGSSGGEGALIGSGGSPLGLGTDIGGSIRFPSSFCGICGLKPTGNRLSKSGLKGCVYGQEAVRLSVGPMARDVESLALCLRALLCEDMFRLDPTVPPLPFREEVYTSSQPLRVGYYETDNYTMPSPAMRRAVLETKQSLEAAGHTLVPFLPSNIPHALETLSTGGLFSDGGHTFLQNFKGDFVDPCLGDLVSILKLPQWLKGLLAFLVKPLLPRLSAFLSNMKSRSAGKLWELQHEIEVYRKTVIAQWRALDLDVVLTPMLAPALDLNAPGRATGAVSYTMLYNCLDFPAGVVPVTTVTAEDEAQMEHYRGYFGDIWDKMLQKGMKKSVGLPVAVQCVALPWQEELCLRFMREVERLMTPEKQSS

SEQ ID NO: 42974 - protein, 718 aa, Homo sapiens
MLDRDEFAVAMFLVYCALEKEPVPMSLPPALVPPSKRKTWVVSPAEKAKYDEIFLKTDKDMDGFVSGLEVREIFLKTGLPSTLLAHIWSLCDTKDCGKLSKDQFALAFHLISQKLIKGIDPPHVLTPEMIPPSDRASLQKNIIGSSPVADFSAIKELDTLNNEIVDLQREKNNVEQDLKEKEDTIKQRTSEVQDLQDEVQRENTNLQKLQAQKQQVQELLDELDEQKAQLEEQLKEVRKKCAEEAQLISSLKAELTSQESQISTYEEELAKAREELSRLQQETAELEESVESGKAQLEPLQQHLQDSQQEISSMQMKLMEMKDLENHNSQLNWCSSPHSILVNGATDYCSLSTSSSETANLNEHVEGQSNLESEPIHQESPARSSPELLPSGVTDENEVTTAVTEKVCSELDNNRHSKEEDPFNVDSSSLTGPVADTNLDFFQSDPFVGSDPFKDDPFGKIDPFGGDPFKGSDPFASDCFFRQSTDPFATSSTDPFSAANNSSITSVETLKHNDPFAPGGTVVAASDSATDPFASVFGNESFGGGFADFSTLSKVNNEDPFRSATSSSVSNVVITKNVFEETSVKSEDEPPALPPKIGTPTRPCPLPPGKRSINKLDSPDPFKLNDPFQPFPGNDSPKEKDPEIFCDPFTSATTTTNKEADPSNFANFSAYPSEEDMIEWAKRESEREEEQRLARLNQQEQEDLELAIALSKSEISEA

SEQ ID NO: 42975 - protein, 914 aa, Homo sapiens
MVFMGSLKYPDENGFDAFLKKHGGSDNASTDCERTVFQFDVQRKYFKEALDRWAQFFIHPLMIRDAIDREVEAVDSEYQLARPSDANRKEMLFGSLARPGHPMGKFFWGNAETLKHEPRKNNIDTHARLREFWMRYYSSHYMTLVVQSKETLDTLEKWVTEIFSQIPNNGLPRPNFGHLTDPFDTPAFNKLYRVVPIRKIHALTITWALPPQQQHYRVKPLHYISWLVGHEGKGSILSFLRKKCWALALFGGNGETGFEQNSTYSVFSISITLTDEGYEHFYEVAYTVFQYLKMLQKLGPEKRIFEEIRKIEDNEFHYQEQTDPVEYVENMCENMQLYPLQDILTGDQLLFEYKPEVIGEALNQLVPQKANLVLLSGANEGKCDLKEKWFGTQYSIEDIENSWAELWNSNFELNPDLHLPAENKYIATDFTLKAFDCPETEYPVKIVNTPQGCLWYKKDNKFKIPKAYIRFHLISPLIQKSAANVVLFDIFVNILTHNLAEPAYEADVAQLEYKLVAGEHGLIIRVKGFNHKLPLLFQLIIDYLAEFNSTPAVFTMITEQLKKTYFNILIKPETLAKDVRLLILEYARWSMIDKYQALMDGLSLESLLSFVKEFKSQLFVEGLVQGNVTSTESMDFLKYVVDKLNFKPLEQEMPVQFQVVELPSGHHLCKVKALNKGDANSEVTVYYQSGTRSLREYTLMELLVMHMEEPCFDFLRTKQTLGYHVYPTCRNTSGILGFSVTVGTQATKYNSEVVDKKIEEFLSSFEEKIENLTEEAFNTQVTALIKLKECEDTHLGEEVDRNWNEVVTQQYLFDRLAHEIEALKSFSKSDLVNWFKAHRGPGSKMLSVHVVGYGKYELEEDGTPSSEDSNSSCEVMQLTYLPTSPLLADCIIPITDIRAFTTTLNLLPYHKIVK

SEQ ID NO: 42976 - protein, 825 aa, Homo sapiens
MEFGPEDMLLGMDEAEDDEDLEAELLALTGEAQTTGKKPAPKGQAPLPMAHIEKLAADCMRDVEEEEEEEGLEEDAELLTELQEVLGVDEETEPLDGDEVADPGGSEEENGLEDTEPPVQTAVLTASAPAAQAGASQGLHALLEERIHNYREAAASAKEAGEAAKARRCERGLKTLESQLASVRRGRKINEDEIPPPVALGKRPLAPQEPANRSPETDPPAPPALESDNPSQPETSLPGISAQPVSDLDPDPRALLSSRQREYKVAALSAKRAGELDRARELMRIGKRFGAVLEALEKGQPVDLSAMPPAPEDLKPQQASQAPTAPSVIPPAVERVQPVMAPDVPATPVAPTESQTVLDALQQRLNKYREAGIQARSGGDERKARMHERIAKQYQDAIRAHRAGRKVNFAELPVPPGFPPIPGLESTMGVEEDAVAATLAAAEKLASAEDSAPADKDEDEGEPPAQAPVAKKPARPTVPSSQRLPEPRASSSKESPSPSVREQLALLEARKLQYQRAALQAKRSQDLEQAKAYLRVAKWLEAQIIQARSGRPVDLSKVPSPLTDEEGDFILIHHEDLRLSQKAEEVYAQLQKMLLEQQEKCLLFSKQFMHQGNVAETTRFEKLAQDRKKQLEILQLAQAQGLDPPTHHFELKTFQTVRIFSELNSTEMHLIIVRGMNLPAPPGVTPDDLDAFVRFEFHYPNSDQAQKSKTAVVKNTNSPEFDQLFKLNINRNHRGFKRVIQSKGIKFEIFHKGSFFRSDKLVGTAHLKLERLENECEIREIVEVLDGRKPTGGKLEVKVRLREPLSGQDVQMVTENWLVLEPRGL

SEQ ID NO: 42977 - protein, 831 aa, Homo sapiens
MEFGPEDMLLGMDEAEDDEDLEAELLALTGEAQTTGKKPAPKGQAPLPMAHIEKLAADCMRDVEEEEEEEGLEEDAELLTELQEVLGVDEETEPLDGDEVADPGGSEEENGLEDTEPPVQTAVLTASAPAAQAGASQGLHALLEERIHNYREAAASAKEAGEAAKARRCERGLKTLESQLASVRRGRKINEDEIPPPVALGKRPLAPQEPANRSPETDPPAPPALESDNPSQPETSLPGISAQPVSDLDPDPRALLSSRQREYKVAALSAKRAGELDRARELMRIGKRFGAVLEALEKGQPVDLSAMPPAPEDLKPQQASQAPTAPSVIPPAVERVQPVMAPDVPATPVAPTESQTVLDALQQRLNKYREAGIQARSGGDERKARMHERIAKQYQDAIRAHRAGRKVNFAELPVPPGFPPIPGLESTMGVEEDAVAATLAAAEKLASAEDSAPADKDEDEPPGHLQGEPPAQAPVAKKPARPTVPSSQRLPEPRASSSKESPSPSVREQLALLEARKLQYQRAALQAKRSQDLEQAKAYLRVAKWLEAQIIQARSGRPVDLSKVPSPLTDEEGDFILIHHEDLRLSQKAEEVYAQLQKMLLEQQEKCLLFSKQFMHQGNVAETTRFEKLAQDRKKQLEILQLAQAQGLDPPTHHFELKTFQTVRIFSELNSTEMHLIIVRGMNLPAPPGVTPDDLDAFVRFEFHYPNSDQAQKSKTAVVKNTNSPEFDQLFKLNINRNHRGFKRVIQSKGIKFEIFHKGSFFRSDKLVGTAHLKLERLENECEIREIVEVLDGRKPTGGKLEVKVRLREPLSGQDVQMVTENWLVLEPRGL

SEQ ID NO: 42978 - protein, 84 aa, Homo sapiens
MEGARARGAQLRLGERVRPVGRRSAPGRSREGEAVVCPAPRGATGVNRESPWVVPSPIPPLYRNLPHWEGSGEAGGLMVSKEAG

SEQ ID NO: 42979 - protein, 549 aa, Homo sapiens
MASSGPWFDMYLSARDSVVLNFNPFMAFNPDPKSEYNDQLTRATNMTVSAIRFLKTLRAGLLEPEVFHLNPAKSDTITFKRLIRFVPSSLSWYGAYLVNAYPLDMSQYFRLFNSTRLPKPSRDELFTDDKARHLLVLRKGNFYIFDVLDQDGNIVSPSEIQAHLKYILSDSSPAPEFPLAYLTSENRDIWAELRQKLMSSGNEESLRKVDSAVFCLCLDDFPIKDLVHLSHNMLHGDGTNRWFDKSFNLIIAKDGSTAVHFEHSWGDGVAVLRFFNEVFKDSTQTPAVTPQSQPATTDSTVTVQKLNFELTDALKTGITAAKEKFDATMKTLTIDCVQFQRGGKEFLKKQKLSPDAVAQLAFQMAFLRQYGQTVATYESCSTAAFKHGRTETIRPASVYTKRCSEAFVREPSRHSAGELQQMMVECSKYHGQLTKEAAMGQGFDRHLFALRHLAAAKGIILPELYLDPAYGQINHNVLSTSTLSSPAVNLGGFAPVVSDGFGVGYAVHDNWIGCNVSSYPGRNAREFLQCVEKALEDMFDALEGKSIKS

SEQ ID NO: 42980 - protein, 374 aa, Homo sapiens
MDSFLEKFQSQPYRGGFHEDQWEKEFEKVPLFMSRAPSEIDPRENPDLACLQSIIFDEERSPEEQAKTYKDEGNDYFKEKDYKKAVISYTEGLKKKCADPDLNAVLYTNRAAAQYYLGNFRSALNDVTAARKLKPCHLKAIIRGALCHLELKHFAEAVNWCDEGLQIDAKEKKLLEMRAKADKLKRIEQRDVRKANLKEKKERNQNEALLQAIKARNIRLSEAACEDEDSASEGLGELFLDGLSTENPHGARLSLDGQGRLSWPVLFLYPEYAQSDFISAFHEDSRFIDHLMVMFGETPSWDLEQKYCPDNLEVYFEDEDRAELYRVPAKSTLLQVLQHQRYFVKALTPAFLVCVGSSPFCKNFLRGRKVYQIR

SEQ ID NO: 42981 - protein, 357 aa, Homo sapiens
MPSLSPAELWQATNRWDLMGKELLRLRDRHGKEYCLGPTHEEAITALIASQKKLSYKQLPFLLYQVTRKFRDEPRPRFGLLRGREFYMKDMYTFDSSPEAAQQTYSLVCDAYCSLFNKLGLPFVKVQADVGTIGGTVSHEFQLPVDIGEDRLAICPRCSFSANMETLDLSQMNCPACQGPLTKTKGIEVGHTFYLGTKYSSIFNAQFTNVCGKPTLAEMGCYGLGVTRILAAAIEVLSTEDCVRWPSLLAPYQACLIPPKKGSKEQAASELIGQLYDHITEAVPQLHGEVLLDDRTHLTIGNRLKDANKFGYPFVIIAGKRALEDPAHFEVWCQNTGEVAFLTKDGVMDLLTPVQTV

SEQ ID NO: 42982 - protein, 139 aa, Homo sapiens
MYTMLYLVLYLQARFTWRGARLLRPLLQFTLIMMAFYTGLSRVSDHKHHPSDVLAGFAQGALVACCIVFFVSDLFKTKTTLSLPAPAIRKEILSPVDIIDRNNHHNMILIHGMLSGVHLYWQRSFMTMMLCLLSWKTPT

SEQ ID NO: 42983 - protein, 304 aa, Homo sapiens
MSTPPDITSPPTPATPGDAFIPSSSQTLPASADVFSSVPFGTAAVPSGYVAMGAVLPSFWGQQPLVQQQMVMGAQPPVAQVMPGAQPIAWGQPGLFPATQQPWPTVAGQFPPAAFMPTQTVMPLPAAMFQGPLTPLATVPGTSDSTRSSPQTDKPRQKMGKETFKDFQMAQPPPVPSRKPDQPSLTCTSEAFSSYFNKVGVAQDTDDCDDFDISQLNLTPVTSTTPSTNSPPTPAPRQSSPSKSSASHASDPTTDDIFEEGFESPSKSEEQEAPDGSQASSNSDPFGEPSGEPSGDNISPQAGS

SEQ ID NO: 42984 - protein, 280 aa, Homo sapiens [sequence omitted]

SEQ ID NO: 42985 - protein, 327 aa, Homo sapiens [sequence omitted]

SEQ ID NO: 42986 - protein, 451 aa, Homo sapiens
MSKEEERAVKDELLSEKPEVKQKWASRLLAKLRKDIRPEYREDFVLTVTGKKPPCCVLSNPDQKGKMRRIDCLRQADKVWRLDLVMVILFKGIPLESTDGERLVKSPQCSNPGLCVQPHHIGVSVKELDLYLAYFVHAADSSQSESPSQPSDADIKDQPENGHLGFQDSFVTSGVFSVTELVRVSQTPIAAGTGPNFSLSDLESSSYYSMSPGAMRRSLPSTSSTSSTKRLKSVEDEMDSPGEEPFYTGQGRSPGSGSQSSGWHEVEPGMPSPTTLKKSEKSGFSSPSPSQTSSLGTAFTQHHRPVITGPRASPHATPSTLHFPTSPIIQQPGPYFSHPAIRYHPQETLKEFVQLVCPDAGQQAGQVGFLNPNGSSQGKVHNPFLPTPMLPPPPPPPMARPVPLPVPDTKPPTTSTEGGAASPTSPILVPGIKVAASHHPPDRPPDPFSTL

SEQ ID NO: 42987 - protein, 462 aa, Homo sapiens
MSKEEERAVKDELLSEKPEVKQKWASRLLAKLRKDIRPEYREDFVLTVTGKKPPCCVLSNPDQKGKMRRIDCLRQADKVWRLDLVMVILFKGIPLESTDGERLVKSPQCSNPGLCVQPHHIGVSVKELDLYLAYFVHAADSSQSESPSQPSDADIKDQPENGHLGFQDSFVTSGVFSVTELVRVSQTPIAAGTGPNFSLSDLESSSYYSMSPGAMRRSLPSTSSTSSTKRLKSVEDEMDSPGEEPFYTGQGRSPGSGSQSSGWHEVEPGMPSPTTLKKSEKSGFSSPSPSQTSSLGTAFTQHHRPVITGPRASPHATPSTLHFPTSPIIQQPGPYFSHPAIRYHPQETLKEFVQLVCPDAGQQAGQVGFLNPNGSSQGKVHNPFLPTPMLPPPPPPPMARPVPLPVPDTKPPTTSTEGGAASPTSPTYSTPSTSPANRFVSVGPRDPSFVNIPQQTQSWYLG

SEQ ID NO: 42988 - protein, 1781 aa, Homo sapiens
MKLQEKGDTSQNEKLSMFYETLKSPLFNQILTLQQSIKQLKGQLNHIPSDCSANFDFSRKGLLVFTDGSITNGNVHRPSNNSTVSGLFPWTPKLGNEDFNSVIQQMAQGRQIEYIDIERPSTGGLGFSVVALRSQNLGKVDIFVKDVQPGSVADRDQRLKENDQILAINHTPLDQNISHQQAIALLQQTTGSLRLIVAREPVHTKSSTSSSLNDTTLPETVCWGHVEEVELINDGSGLGFGIVGGKTSGVVVRTIVPGGLADRDGRLQTGDHILKIGGTNVQGMTSEQVAQVLRNCGNSVRMLVARDPAGDISVTPPAPAALPVALPTVASKGPGSDSSLFETYNVELVRKDGQSLGIRIVGYVGTSHTGEASGIYVKSIIPGSAAYHNGHIQVNDKIVAVDGVNIQGFANHDVVEVLRNAGQVVHLTLVRRKTSSSTSPLEPPSDRGTVVEPLKPPALFLTGAVETETNVDGEDEEIKERIDTLKNDNIQALEKLEKVPDSPENELKSRWENLLGPDYEVMVATLDTQIADDAELQKYSKLLPIHTLRLGVEVDSFDGHHYISSIVSGGPVDTLGLLQPEDELLEVNGMQLYGKSRREAVSFLKEVPPPFTLVCCRRLFDDEASVDEPRRTETSLPETEVDHNMDVNTEEDDDGELALWSPEVKIVELVKDCKGLGFSILDYQDPLDPTRSVIVIRSLVADGVAERSGGLLPGDRLVSVNEYCLDNTSLAEAVEILKAVPPGLVHLGICKPLVEDNEEESCYILHSSSNEDKTEFSGTIHDINSSLILEAPKGFRDEPYFKEELVDEPFLDLGKSFHSQQKEIEQSKEAWEMHEFLTPRLQEMDEEREILVDEEYELYQDPSPSMELYPLSHIQEATPVPSVNELHFGTQWLHDNEPSESQEARTGRTVYSQEAQPYGYCPENVMKENFVMESLPSVPSTEGNSQQGRFDDLENLNSLAKTSLDLGMIPNDVQGPSLLIDLPVVAQRREQEDLPLYQHQATRVISKASAYTGMLSSRYATDTCELPEREEGEGEETPNFSHWGPPRIVEIFREPNVSLGISIVGGQTVIKRLKNGEELKGIFIKQVLEDSPAGKTNALKTGDKILEVSGVDLQNASHSEAVEAIKNAGNPVVFIVQSLSSTPRVIPNVHNKANKITGNQNQDTQEKKEKRQGTAPPPMKLPPPYKALTDDSDENEEEDAFTDQKIRQRYADLPGELHIIELEKDKNGLGLSLAGNKDRSRMSIFVVGINPEGPAAADGRMRIGDELLEINNQILYGRSHQNASAIIKTAPSKVKLVFIRNEDAVNQMAVTPFPVPSSSPSSIEDQSGTEPISSEEDGSVEVGIKQLPESESFKLAVSQMKQQKYPTKVSFSSQEIPLAPASSYHSTDADFTGYGGFQAPLSVDPATCPIVPGQEMIIEISKGRSGLGLSIVGGKDTPLNAIVIHEVYEEGAAARDGRLWAGDQILEVNGVDLRNSSHEEAITALRQTPQKVRLVVYRDEAHYRDEENLEIFPVDLQKKAGRGLGLSIVGKRNGSGVFISDIVKGGAADLDGRLIQGDQILSVNGEDMRNASQETVATILKCAQGLVQLEIGRLRAGSWTSARTTSQNSQGSQQSAHSSCHPSFAPVITGLQNLVGTKRVSDPSQKNSGTDMEPRTVEINRELSDALGISIAGGRGSPLGDIPVFIAMIQASGVAARTQKLKVGDRIVSINGQPLDGLSHADVVNLLKNAYGRIILQVVADTNISAIAAQLENMSTGYHLGSPTAEHHPEDTEEQLQMTAD

SEQ ID NO: 42989 - protein, 94 aa, Homo sapiens
MLLSKVEKLSEEIMEIMQNLSSIQALEGSRELENLIGISCASHFLKREMQKTKELMTKVNKQKLFEKSTGLPHKGIKKKCTHHEHQLLHLPDHI

SEQ ID NO: 42990 - protein, 593 aa, Homo sapiens [sequence omitted]

SEQ ID NO: 42991 - protein, 56 aa, Homo sapiens
MFCARPGSRRRRRLSERRNAPAAPPRDAPAAPGAAGRAAAGRTRGCCPRNRAVSQC

SEQ ID NO: 42992 - protein, 874 aa, Homo sapiens
MNNITTSLGQTAELHCKVSGNPPPTIRWFKNDAPVVQEPRRLSFRSTIYGSRLRIRNLDTTDTGYFQCVATNGKEVVSSTGVLFVKFGPPPTASPGYSDEYEEDGFCQPYRGIACARFIGNRTVYMESLHMQGEIENQITAAFTMIGTSSHLSDKCSQFAIPSLCHYAFPYCDETSSVPKPRDLCRDECEILENVLCQTEYIFARSNPMILMRLKLPNCEDLPQPESPEAANCIRIGIPMADPINKNHKCYNSTGVDYRGTVSVTKSGRQCQPWNSQYPHTHTFTALRFPELNGGHSYCRNPGNQKEAPWCFTLDENFKSDLCDIPACDSKDSKEKNKMEILYILVPSVAIPLAIALLFFFICVCRNNQKSSSAPVQRQPKHVRGQNVEMSMLNAYKPKSKAKELPLSAVRFMEELGECAFGKIYKGHLYLPGMDHAQLVAIKTLKDYNNPQQWTEFQQEASLMAELHHPNIVCLLGAVTQEQPVCMLFEYINQGDLHEFLIMRSPHSDVGCSSDEDGTVKSSLDHGDFLHIAIQIAAGMEYLSSHFFVHKDLAARNILIGEQLHVKISDLGLSREIYSADYYRVQSKSLLPIRWMPPEAIMYGKFSSDSDIWSFGVVLWEIFSFGLQPYYGFSNQEVIEMVRKRQLLPCSEDCPPRMYSLMTECWNEIPSRRPRFKDIHVRLRSWEGLSSHTSSTTPSGGNATTQTTSLSASPVSNLSNPRYPNYMFPSQGITPQGQIAGFIGPPIPQNQRFIPINGYPIPPGYAAFPAAHYQPTGPPRVIQHCPPPKSRSPSSASGSTSTGHVTSLPSSGSNQEANIPLLPHMSIPNHPGGMGITVFGNKSQKPYKIDSKQASLLGDANIHGHTESMISAEL

SEQ ID NO: 42993 - protein, 330 aa, Homo sapiens [sequence omitted]

SEQ ID NO: 42994 - protein, 736 aa, Homo sapiens [sequence omitted]

SEQ ID NO: 42995 - protein, 532 aa, Homo sapiens
MPVCLFAEESYQKLAMETLEELDWCLDQLETIQTYRSVSEMASNKFKRMLNRELTHLSEMSRSGNQVSEYISNTFLDKQNDVEIPSPTQKDREKKKKQQLMTQISGVKKLMHSSSLNNTSISRFGVNTENEDHLAKELEDLNKWGLNIFNVAGYSHNRPLTCIMYAIFQERDLLKTFRISSDTFITYMMTLEDHYHSDVAYHNSLHAADVAQSTHVLLSTPALDAVFTDLEILAAIFAAAIHDVDHPGVSNQFLINTNSELALMYNDESVLENHHLAVGFKLLQEEHCDIFMNLTKKQRQTLRKMVIDMVLATDMSKHMSLLADLKTMVETKKVTSSGVLLLDNYTDRIQVLRNMVHCADLSNPTKSLELYRQWTDRIMEEFFQQGDKERERGMEISPMCDKHTASVEKSQVGFIDYIVHPLWETWADLVQPDAQDILDTLEDNRNWYQSMIPQSPSPPLDEQNRDCQGLMEKFQFELTLDEEDSEGPEKEGEGHSYFSSTKTLCVIDPENRDSLGETDIDIATEDKSPVDT

SEQ ID NO: 42996 - protein, 468 aa, Homo sapiens
MFNWFTDCLWTLFLSNYQPSVESSSPGGSATSDDHEFDPSADMLVHDFDDERTLEEEEMMEGETNFSSEIEDLAREGDMPIHELLSLYGYGSTVRLPEEDEEEEEEEEEGEDDEDADNDDNSGCSGENKEENIKDSSGQEDETQSSNDDPSQSVASQDAQEIIRPRRCKYFDTNSEVEEESEEDEDYIPSEDWKKEIMVGSMFQAEIPVGICRYKENEKVYENDDQLLWDPEYLPEDKVIIFLKDASRRTGDEKGVEAIPEGSHIKDNEQALYELVKCNFDTEEALRRLRFNVKAAREELSVWTEEECRNFEQGLKAYGKDFHLIQANKVRTRSVGECVAFYYMWKKSERYDFFAQQTRFGKKKYNLHPGVTDYMDRLLDESESAASSRAPSPPPTASNSSNSQSEKEDGTVSTANQNGVSSNGPGEILNKEEVKVEGLHINGPTGILQMLLPVHFSAISSRANAFLK

SEQ ID NO: 42997 - protein, 276 aa, Homo sapiens [sequence omitted]

SEQ ID NO: 42998 - protein, 13 aa, Homo sapiens
MDQWVPVINLPER

SEQ ID NO: 42999 - protein, 535 aa, Homo sapiens
MSTKKLCIVGGILLVFQIIAFLVGGLIGPTTAVSYMSVKCVDARKNHHKTKWFVPWGPNHCDKIRDIEEAIPREIEANDIVFSVHIPLPHMEMSPWFQFMLFILQLDIAFKLNNQIRENAEVSMDVSLAYRDDAFAEWTEMAHERVPRKLKCTFTSPKTPEHEGRYYECDVLPFMEIGSVAHKFYLLNIRLPVNEKKKINVGIGEIKDIRLVGIHQNGGFTKVWFAMKTFLTPSIFIIMVWYWRRITMMSRPPVLLEKVIFALGISMTFINIPVEWFSIGFDWTWMLLFGDIRQGIFYAMLLSFWIIFCGEHMMDQHERNHIAGYWKQVGPIAVGSFCLFIFDMCERGVQLTNPFYSIWTTDIGTELAMAFIIVAGICLCLYFLFLCFMVFQVFRNISGKQSSLPAMSKVRRLHYEGLIFRFKFLMLITLACAAMTVIFFIVSQVTEGHWKWGGVTVQVNSAFFTGIYGMWNLYVFALMFLYAPSHKNYGEDQSNGMQLPCKSREDCALFVSELYQELFSASKYSFINDNAASGI

SEQ ID NO: 43000 - protein, 533 aa, Homo sapiens [sequence omitted]

SEQ ID NO: 43001 - protein, 303 aa, Homo sapiens
MANTSKRGVVILQNKSDDLPHWVLSAMKCLANWPRSNDMNNPTYVGFERDVFRTIADYFLDLPEPLLTFEYYELFVNILGLLQPHLERVAIDALQLCCLLLPPPNRRKLQLLMRMISRMSQNVDMPKLHDAMGTRSLMIHTFSRCVLCCAEEVDLDELLAGRLVSFLMDHHQEILQVPSYLQTAVEKHLDYLKKGHIENPGDGLFAPLPTYSYCKQISAQEFDEQKVSTSQAAIAELLENIIKNRSLPLKEKRKKLKQFQKEYPLIYQKRFPTTESEAALFGDKPTIKQPMLILRKPKFRSLR

SEQ ID NO: 43002 - protein, 389 aa, Homo sapiens [sequence omitted]

SEQ ID NO: 43003 - protein, 379 aa, Homo sapiens
MWAPERSAEARGNLTRPPGSGEDCGSVSVAFPITMLLTGFVGNALAMLLVSRSYRRRESKRKKSFLLCIGWLALTDLVGQLLTTPVVIVVYLSKQRWEHIDPSGRLCTFFGLTMTVFGLSSLFIASAMAVERALAIRAPHWYASHMKTRATRAVLLGVWLAVLAFALLPVLGVGQYTVQWPGTWCFISTGRGGNGTSSSHNWGNLFFASAFAFLGLLALTVTFSCNLATIKALVSRCRAKATASQSSAQWGRITTETAIQLMGIMCVLSVCWSPLLIMMLKMIFNQTSVEHCKTHTEKQKECNFFLIAVRLASLNQILDPWVYLLLRKILLRKFCQMRKRRLREQEMGPDGRCFCHAWRQVPRTWCSSHDREPCSVQLS

SEQ ID NO: 43004 - protein, 367 aa, Homo sapiens
MWAPERSAEARGNLTRPPGSGEDCGSVSVAFPITMLLTGFVGNALAMLLVSRSYRRRESKRKKSFLLCIGWLALTDLVGQLLTTPVVIVVYLSKQRWEHIDPSGRLCTFFGLTMTVFGLSSLFIASAMAVERALAIRAPHWYASHMKTRATRAVLLGVWLAVLAFALLPVLGVGQYTVQWPGTWCFISTGRGGNGTSSSHNWGNLFFASAFAFLGLLALTVTFSCNLATIKALVSRCRAKATASQSSAQWGRITTETAIQLMGIMCVLSVCWSPLLIMMLKMIFNQTSVEHCKTHTEKQKECNFFLIAVRLASLNQILDPWVYLLLRKILLRKFCQIRYHTNNYASSSTSLPCQCSSTLMWSDHLER

SEQ ID NO: 43005 - protein, 365 aa, Homo sapiens
MWAPERSAEARGNLTRPPGSGEDCGSVSVAFPITMLLTGFVGNALAMLLVSRSYRRRESKRKKSFLLCIGWLALTDLVGQLLTTPVVIVVYLSKQRWEHIDPSGRLCTFFGLTMTVFGLSSLFIASAMAVERALAIRAPHWYASHMKTRATRAVLLGVWLAVLAFALLPVLGVGQYTVQWPGTWCFISTGRGGNGTSSSHNWGNLFFASAFAFLGLLALTVTFSCNLATIKALVSRCRAKATASQSSAQWGRITTETAIQLMGIMCVLSVCWSPLLIMMLKMIFNQTSVEHCKTHTEKQKECNFFLIAVRLASLNQILDPWVYLLLRKILLRKFCQVANAVSSCSNDGQKGQPISLSNEIIQTEA

SEQ ID NO: 43006 - protein, 277 aa, Homo sapiens
MMKAGGTEIGKTLAEKSRGLFSANDWQCKTCSNVNWARRSECNMCNTPKYAKLEERTGYGGGFNERENVEYIEREESDGEYDEFGRKKKKYRGKAVGPASILKEVEDKESEGEEEDEDEDLSKYKLDEDEDEDDADLSKYNLDASEEEDSNKKKSNRRSRSKSRSSHSRSSSRSSSPSSSRSRSRSRSRSSSSSQSRSRSSSRERSRSRGSKSRSSSRSHRGSSSPRKRSYSSSSSSPERNRKRSRSRSSSSGDRKKRRTRSRSPESQVIGENTKQP

SEQ ID NO: 43007 - protein, 351 aa, Homo sapiens [sequence omitted]

SEQ ID NO: 43008 - protein, 359 aa, Homo sapiens [sequence omitted]

SEQ ID NO: 43009 - protein, 215 aa, Homo sapiens
MCSKPEDPVEYLESCLQKVKELGGCDKVKWDTFVSQEKKTLPPLNGGQSRRSFLRNESDTDLSETAELIEEYEVFDPTRPRPKIILVIGGPGSGKGTQSLKIAERYGFQYISVGELLRKKIHSTSSNRKWSLIAKIITTGELAPQETTITEIKQKLMQIPDEEGIVIDGFPRDVAQALSFEDQYSLRPQTKMPVQSDPLPYAAPCGVCPVRQDSP

SEQ ID NO: 43010 - protein, 479 aa, Homo sapiens
MPENSNFPYRRYDRLPPIHQFSIESDTDLSETAELIEEYEVFDPTRPRPKIILVIGGPGSGKGTQSLKIAERYGFQYISVGELLRKKIHSTSSNRKWSLIAKIITTGELAPQETTITEIKQKLMQIPDEEGIVIDGFPRDVAQALSFEDQICTPDLVVFLACANQRLKERLLKRAEQQGRPDDNVKATQRRLMNFKQNAAPLVKYFQEKGLIMTFDADRDEDEVFYDISMAVDNKLFPNKEAAAGSSDLDPSMILDTGEIIDTGSDYEDQGDDQLNVFGEDTMGGFMEDLRKCKIIFIIGGPGSGKGTQCEKLVEKYGFTHLSTGELLREELASESERSKLIRDIMERGDLVPSGIVLELLKEAMVASLGDTRGFLIDGYPREVKQGEEFGRRIGDPQLVICMDCSADTMTNRLLQRSRSSLPVDDTTKTIAKRLEAYYRASIPVIAYYETKTQLHKINAEGTPEDVFLQLCTAIDSIF

SEQ ID NO: 43011 - protein, 558 aa, Homo sapiens [sequence omitted]

SEQ ID NO: 43012 - protein, 421 aa, Homo sapiens
MGMELFEEALRRWEQALTFRNRQAEDEACGSIKLGAGDAIAEENVDDIISTEFIHKLEALLQRAYRLQEEFEATLGASDPNSLADDIDKDTDITMKGNVEDFGLRDTLSIASTDSFASAAELAEHREVRHTYSLESLCHCPFYEEAMHLVEEGKIYSRVLRTEMLECLGDSDFLAKLHCIRQAFQVILSESANRIFLAESGRKILSALIVKARKNPKKFEDVFDEMIYFLEQTDHWGSTEMELAARGVKNLNFYDVVLDFILMDSFEDLENPPTSIQNVVNNRWLNSSFKETAVASSCWSVLKQKRQQMKIPDGFFAHFYAICEHISPVLAWGFLGPRNSLYDLCCFFKNQVLLFLKDIFDFEKVRYSSTETLAEDLMQLLIRRTELLMAYLEADALRHTSSCLSSHGHVMSTGLLEAKVQ

SEQ ID NO: 43013 - protein, 159 aa, Homo sapiens [sequence omitted]

SEQ ID NO: 43014 - protein, 35 aa, Homo sapiens
MAHRAAPSSAPQRARLAAWDDKMSGLQSCTVLRGR

SEQ ID NO: 43015 - protein, 606 aa, Homo sapiens
MCVPGFRSSSNQDRFITNDGTVCIENVNANCHLDNVCIAANINKTLTKIRSIKEPVALLQEVYRNSVTDLSPTDIITYIEILAESSSLLGYKNNTISAKDTLSNSTLTEFVKTVNNFVQRDTFVVWDKLSVNHRRTHLTKLMHTVEQATLRISQSFQKTTEFDTNSTDIALKVFFFDSYNMKHIHPHMNMDGDYINIFPKRKAAYDSNGNVAVAFVYYKSIGPLLSSSDNFLLKPQNYDNSEEEERVISSVISVSMSSNPPTLYELEKITFTLSHRKVTDRYRSLCAFWNYSPDTMNGSWSSEGCELTYSNETHTSCRCNHLTHFAILMSSGPSIGIKDYNILTRITQLGIIISLICLAICIFTFWFFSEIQSTRTTIHKNLCCSLFLAELVFLVGINTNTNKLFCSIIAGLLHYFFLAAFAWMCIEGIHLYLIVVGVIYNKGFLHKNFYIFGYLSPAVVVGFSAALGYRYYGTTKVCWLSTENNFIWSFIGPACLIILVNLLAFGVIIYKVFRHTAGLKPEVSCFENIRSCARGALALLFLLGTTWIFGVLHVVHASVVTAYLFTVSNAFQGMFIFLFLCVLSRKIQEEYYRLFKNVPCCFGCLR

SEQ ID NO: 43016 - protein, 233 aa, Homo sapiens [sequence omitted]

SEQ ID NO: 43017 - protein, 59 aa, Homo sapiens
MKKVVQQLRLEAGLNRVKVSQAAADLKQFCLQNAQHDPLLTGVSSSTNPFRPQKVCSFL

SEQ ID NO: 43018 - protein, 708 aa, Homo sapiens
MISRKRSEFGAPIKFSDQNASSVKDAYIECTAYPDKNFTLKQLEKDVGMQVIPQIKDISTQTKWTYPKNATTQYYPREFSEEEKETLKQSKPLVDFLNNASISVEIALQQNEIMNTFIDDWKYLAEEEGTFGDKTDTHLKEYQSFTDLHSPTEKMITCVSWHPTIYGLIAVSVAVRLSFEDRVHFSGKLLLQPSLILFWSFSDPIHPQLMLESPDDIFCFKFCPSDPNIIAGGCINGQIVMWDITAHADRIENIKAGGSRSKRATLKPMFLLEPESNKEAMYIRHCAVSSIENGHKKVITDIHWLSDTFEINRMGSVFENRSGICCQLVTCSADCTICFWDIRPQKPLTPQTTEKKKEESIEIPFDVPSTFLHLDLSWKPLTKVRLSKGETSLDHCPTKISLNEDHLLCKTQDKMLAQSKTEKAEEMNPYHNLESGMANLLKPIDDFCTKFFVGTEEGEVIYTDWKMEKDPETGRLMSKKPVSHHTIHDGTVHTIQRSPFYNDIILTVGGWNVAIWKEGVMTGPLLQSCCAPKRYTSGHWSLTRPGVFYIGREDGYIDIWDLLEKTHEPAQSQNICITMITYIKPWIFSSKQQFIATADYYGTLHILEIPWTLSRPSTNEMASVNHYFEREVKHLEYVEQRKKIREQEKKEMELEMAKKKVKTYQKSKEQMQAELKMDYESYLELEKTVLINLGLIKVTEKGSYMEVM

SEQ ID NO: 43019 - protein, 59 aa, Homo sapiens [sequence omitted]

SEQ ID NO: 43020 - protein, 120 aa, Homo sapiens
MEPTAPSLTEEDLTEVKKDALENLRVYLCEKIIAERHFDHLRAKKILSREDTEEISCRTSSRKRAGKLLDYLQENPKGLDTLVESIRREKTQNFLIQKITDEVLKLRNIKLEHLKVLEAG

SEQ ID NO: 43021 - protein, 398 aa, Homo sapiens [sequence omitted]

SEQ ID NO: 43022 - protein, 362 aa, Homo sapiens
MDFNVKKLAADAGTFLSRAVQFTEEKLGQAEKTELDAHLENLLSKAECTKIWTEKIMKQTEVLLQPNPNARIEEFVYEKLDRKAPSRINNPELLGQYMIDAGTEFGPGTAYGNALIKCGETQKRIGTADRELIQTSALNFLTPLRNFIEGDYKTIAKERKLLQNKRLDLDAAKTRLKKAKAAETRNSSEQELRITQSEFDRQAEITRLLLEGISSTHAHHLRCLNDFVEAQMTYYAQCYQYMLDLQKQLGSFPSNYLSNNNQTSVTPVPSVLPNAIGSSAMASTSGLVITSPSNLSDLKECSGSRKARVLYDYDAANSTELSLLADEVITVFSVVGMDSDWLMGERGNQKGKVPITYLELLN

SEQ ID NO: 43023 - protein, 271 aa, Homo sapiens
MDGPRQDATLDEEEDMVIIYNRVPKTASTSFTNIAYDLCAKNKYHVLHINTTKNNPVMSLQDQVRFVKNITSWKEMKPGFYHGHVSYLDFAKFGVKKKPIYINVIRDPIERLVSYYYFLRFGDDYRPGLRRRKQGDKKTFDECVAEGGSDCAPEKLWLQIPFFCGHSSECWNVGSRWAMDQAKYNLINEYFLVGVTEELEDFIMLLEAALPRFFRGATELYRTAPDTATPSHRHGPICGSKSISSLLVKVSPVCKDSHCLGKCSRNGLSAV

SEQ ID NO: 43024 - protein, 234 aa, Homo sapiens
MIGKGTGAASFDEFGNSKYQNRRTMSSSDRAMMNAFKEITTMADRINLPRNIVDRTNNLFKQVYEQKSLKGRANDAIASACLYIACRQEGVPRTFKEICAVSRISKKEIGRCFKLILKALETSVDLITTGDFMSRFCSNLCLPKQVQMAATHIARKAVELDLVPGRSPISVAAAAIYMASQASAEKRTQKEIGDIAGVADVTIRQSYRLIYPRAPDLFPTDFKFDTPVDKLPQL

SEQ ID NO: 43025 - protein, 516 aa, Homo sapiens
MWCVPHPKKPEHTLVLLDTEGLGDVKKGDNQNDSWIFTLAVLLSSTLVYNSMGTINQQAMDQLYYVTELTHRIRSKSSPDENENEDSADFVSFFPDFVWTLRDFSLDLEADGQPLTPDEYLEYSLKLTQGTSQKDKNFNLPRLCIRKFFPKKKCFVFDLPIHRRKLAQLEKLQDEELDPEFVQQVADFCSYIFSNSKTKTLSGGIKVNGPRLESLVLTYINAISRGDLPCMENAVLALAQIENSAAVQKAIAHYDQQMGQKVQLPAETLQELLDLHRVSEREATEVYMKNSFKDVDHLFQKKLAAQLDKKRDDFCKQNQEASSDRCSALLQVIFSPLEEEVKAGIYSKPGGYCLFIQKLQDLEKKYYEEPRKGIQAEEILQTYLKSKESVTDAILQTDQILTEKEKEIEVECVKAESAQASAKMVEEMQIKYQQMMEEKEKSYQEHVKQLTEKMERERAQLLEEQEKTLTSKLQEQARVLKERCQGESTQLQNEIQKLQKTLKKKTKRYMSHKLKI

SEQ ID NO: 43026 - protein, 586 aa, Homo sapiens
MTGPMCLIENTNGRLMANPEALKILSAITQPMVVVAIVGLYRTGKSYLMNKLAGKKKGFSLGSTVQSHTKGIWMWCVPHPKKPGHILVLLDTEGLGDVEKGDNQNDSWIFALAVLLSSTFVYNSIGTINQQAMDQLYYVTELTHRIRSKSSPDENENEVEDSADFVSFFPDFVWTLRDFSLDLEADGQPLTPDEYLTYSLKLKKGTSQKDETFNLPRLCIRKFFPKKKCFVFDRPVHRRKLAQLEKLQDEELDPEFVQQVADFCSYIFSNSKTKTLSGGIQVNGPRLESLVLTYVNAISSGDLPCMENAVLALAQIENSAAVQKAIAHYEQQMGQKVQLPTETLQELLDLHRDSEREAIEVFIRSSFKDVDHLFQKELAAQLEKKRDDFCKQNQEASSDRCSALLQVIFSPLEEEVKAGIYSKPGGYRLFVQKLQDLKKKYYEEPRKGIQAEEILQTYLKSKESMTDAILQTDQTLTEKEKEIEVERVKAESAQASAKMLQEMQRKNEQMMEQKERSYQEHLKQLTEKMENDRVQLLKEQERTLALKLQEQEQLLKEGFQKESRIMKNEIQDLQTKMRRRKACTIS

SEQ ID NO: 43027 - protein, 690 aa, Homo sapiens
MCYERALHWYAKYFPYLVLIHTLVFMLCSNFWFKFPGSSSKIEHFISILGKCFDSPWTTRALSEVSGEDSEEKDNRKNNMNRSNTIQSGPEDSLVNSQSLKSIPEKFVVDKSTAGALDKKEGEQAKALFEKVKKFRLHVEEGDILYAMYVRQTVLKVIKFLIIIAYNSALVSKVQFTVDCNVDIQDMTGYKNFSCNHTMAHLFSKLSFCYLCFVSIYGLTCLYTLYWLFYRSLREYSFEYVRQETGIDDIPDVKNDFAFMLHMIDQYDPLYSKRFAVFLSEVSENKLKQLNLNNEWTPDKLRQKLQTNAHNRLELPLIMLSGLPDTVFEITELQSLKLEIIKNVMIPATIAQLDNLQELSLHQCSVKIHSAALSFLKENLKVLSVKFDDMRELPPWMYGLRNLEELYLVGSLSHDISRNVTLESLRDLKSLKILSIKSNVSKIPQAVVDVSSHLQKMCIHNDGTKLVMLNNLKKMTNLTELELVHCDLERIPHAVFSLLSLQELDLKENNLKSIEEIVSFQHLRKLTVLKLWHNSITYIPEHIKKLTSLERLSFSHNKIEVLPSHLFLCNKIRYLDLSYNDIRFIPPEIGVLQSLQYFSITCNKVESLPDELYFCKKLKTLKIGKNSLSVLSPKIGNLLFLSYLDVKGNHFEILPPELGDCRALKRAGLVVEDALFETLPSDVREQMKTE

SEQ ID NO: 43028 - protein, 831 aa, Homo sapiens [sequence omitted]

SEQ ID NO: 43029 - protein, 229 aa, Homo sapiens
MEFLHECMVNKFKKTSIRKQQTNNQTEVVKIIEKDVMEGVTVDDHMMKVETVHCSACSVYIPALHSSVQQHLKSPDHIKGKQAYKEQIKRESVLTATSILNNPIVKARYERFVKGENPFEIQDHSQDQQIEGDEEDEEKIDEPIEEEEDEDEEEEAEEVGEVEEVEEVEEVREGGIEGEGNIQGVGEGGEVGVVGEVEGVGEVEEVEELEEETAKEEPADFPVEQPEEN

SEQ ID NO: 43030 - protein, 1781 aa, Homo sapiens
MVLLGSAGVCSKGLQRKGPCERRRLKATVSEQLSQDLLRLLREEFHTDVTFSVGCTLFKAHKAVLLARVPDFYFHTIGQTSNSLTNQEPIAVENVEALEFRTFLQIIYSSNRNIKNYEEEILRKKIMEIGISQKQLDISFPKCENSSDCSLQKHEIPEDISDRDDDFISNDNYDLEPASELGEDLLKLYVKPCCPDIDIFVDGKRFKAHRAILSARSSYFAAMLSGCWAESSQEYVTLQGISHVELNVMMHFIYGGTLDIPDKTNVGQILNMADMYGLEGLKEVAIYILRRDYCNFFQKPVPRTLTSILECLIIAHSVGVESLFADCMKWIVKHFARFWSERSFANIPPEIQKSCLNMLIQSLNDKNAAFLLMESDRLIISLPRVKWTEAALTMASQLQEKCIAFIVDNFSKIIQSENFALLLQSQAMSSTADLLDTILKAIEENITTENSCSLLMALDTLLNSDSTKEMGFTCKIQALRDKLWIFLVQSFYAVRHTESWKLMSTDDQQKIQAAAFDKGDDRRLGKKPIFSSSQQRKQVSDSGDIKIKSWRGNNKKECWSYLSTNKKMKSDGLGASGHSSSTNRNSINKTLKQDDVKEKDGTKIASKITKELKTGGKNVSGKPKTVTKSKTENGDKARLENMSPRQVVERSATAAAAATGQKNLLNGKGVRNQEGQISGARPKVLTGNLNVQAKAKPLKKATGKDSPCLSIAGPSSRSTDSSMEFSISTECLDEPKENGSTEEEKPSGHKLSFCDSPGQMMKNSVDSVKNSTVAIKSRPVSRVTNGTSNKKSIHEQDTNVNNSVLKKVSGKGCSEPVPQAILKKRGTSNGCTAAQQRTKSTPSNLTKTQGSQGESPNSVKSSVSSRQSDENVAKLDHNTTTEKQAPKRKMVKQVHTALPKVNAKIVAMPKNLNQSKKGETLNNKDSKQKMPPGQVISKTQPSSQRPLKHETSTVQKSMFHDVRDNNNKDSVSEQKPHKPLINLASEISDAEALQSSCRPDPQKPLNDQEKEKLALECQNISKLDKSLKHELESKQICLDKSETKFPNHKETDDCDAANICCHSVGSDNVNSKFYSTTALKYMVSNPNENSLNSNPVCDLDSTSAGQIHLISDRENQVGRKDTNKQSSIKCVEDVSLCNPERTNGTLNSAQEDKKSKVPVEGLTIPSKLSDESAMDEDKHATADSDVSSKCFSGQLSEKNSPKNMETSESPESHETPETPFVGHWNLSTGVLHQRESPESDTGSATTSSDDIKPRSEDYDAGGSQDDDGSNDRGISKCGTMLCHDFLGRSSSDTSTPEELKIYDSNLRIEVKMKKQSNNDLFQVNSTSDDEIPRKRPEIWSRSAIVHSRERENIPRGSVQFAQEIDQVSSSADETEDERSEAENVAENFSISNPAPQQFQGIINLAFEDATENECREFSATKKFKRSVLLSVDECEELGSDEGEVHTPFQASVDSFSPSDVFDGISHEHHGRTCYSRFSRESEDNILECKQNKGNSVCKNESTVLDLSSIDSSRKNKQSVSATEKKNTIDVLSSRSRQLLREDKKVNNGSNVENDIQQRSKFLDSDVKSQERPCHLDLHQREPNSDIPKNSSTKSLDSFRSQVLPQEGPVKESHSTTTEKANIALSAGDIDDCDTLAQTRMYDHRPSKTLSPIYEMDVIEAFEQKVESETHVTDMDFEDDQHFAKQDWTLLKQLLSEQDSNLDVTNSVPEDLSLAQYLINQTLLLARDSSKPQGITHIDTLNRWSELTSPLDSSASITMASFSSEDCSPQGEWTILELETQH

SEQ ID NO: 43031 - protein, 990 aa, Homo sapiens
MSPRQVVERSATAAAAATGQKNLLNGKGVRNQEGQISGARPKVLTGNLNVQAKAKPLKKATGKDSPCLSIAGPSSRSTDSSMEFSISTECLDEPKENGSTEEEKPSGHKLSFCDSPGQMMKNSVDSVKNSTVAIKSRPVSRVTNGTSNKKSIHEQDTNVNNSVLKKVSGKGCSEPVPQAILKKRGTSNGCTAAQQRTKSTPSNLTKTQGSQGESPNSVKSSVSSRQSDENVAKLDHNTTTEKQAPKRKMVKQVHTALPKVNAKIVAMPKNLNQSKKGETLNNKDSKQKMPPGQVISKTQPSSQRPLKHETSTVQKSMFHDVRDNNNKDSVSEQKPHKPLINLASEISDAEALQSSCRPDPQKPLNDQEKEKLALECQNISKLDKSLKHELESKQICLDKSETKFPNHKETDDCDAANICCHSVGSDNVNSKFYSTTALKYMVSNPNENSLNSNPVCDLDSTSAGQIHLISDRENQVGRKDTNKQSSIKCVEDVSLCNPERTNGTLNSAQEDKKSKVPVEGLTIPSKLSDESAMDEDKHATADSDVSSKCFSGQLSEKNSPKNMETSESPESHETPETPFVGHWNLSTGVLHQRESPESDTGSATTSSDDIKPRSEDYDAGGSQDDDGSNDRGISKCGTMLCHDFLGRSSSDTSTPEELKIYDSNLRIEVKMKKQSNNDLFQVNSTSDDEIPRKRPEIWSRSAIVHSRERENIPRGSVQFAQEIDQVSSSADETEDERSEAENVAENFSISNPAPQQFQGIINLAFEDATENECREFSATKKFKRSVLLSVDECEELGSDEGEVHTPFQASVDSFSPSDVFDGISHEHHGRTCYSRFSRESEDNILECKQNKGNSVCKNESTVLDLSSIDSSRKNKQSVSATEKKNTIDVLSSRSRQLLREDKKVNNGSNVENDIQQRSKFLDSDVKSQERPCHLDLHQREPNSDIPKNSSTKSLDSFRSQVLPQEGPVKESHSTTTEKANIALSAGNVQK

SEQ ID NO: 43032 - protein, 617 aa, Homo sapiens
MTSPCEKLIRRDIARTYPEHNFFKEKDSLGQEVLFNVMKAYSLVDREVGYCQGSAFIVGLLLMQMPEEEAFCVFVKLMQDYRLRELFKPSMAELGLCMYQFECMIQEHLPELFVHFQSQSFHTSMYASSWFLTIFLTTFPLPIATRIFDIFMSEGLEIVFRVGLALLQMNQAELMQLDMEGMLQHFQKVIPHQFDGVPDKLIQAAYQVKYNSKKMKKLEKEYTTIKTKEMEEQVEIKRLRTENRLLKQRIETLEKHKCSSNYNEDFVLQLEKELVQARLSEAESQCALKEMQDKVLDIEKRNNSLPDENNIARLQEELIAVKLREAEAIMGLKELRQQVKDLEEHWQRHLARTTGRWKDPPKKNAMNELQDELMTIRLREAETQAEIREIKQRMMEMETQNQINSNHLRRAEQEVISLQEKVQYLSAQNKGLLTQLSEAKRKQAEIECKNKEEVMAVRLREADSIAAVAELRQHIAELEIQKEEGKLQGQLNKSDSNQYIGELKDQIAELNHELRCLKGQRGFSGQPPFDGIHIVNHLIGDDESFHSSDEDFIDNSLQETGVGFPLHGKSGSMSLDPAVADGSESETEDSVLETRESNQVVQKERPPRRRESYSTTV

SEQ ID NO: 43033 - protein, 628 aa, Homo sapiens
MTSPCEKLIRRDIARTYPEHNFFKEKDSLGQEVLFNVMKAYSLVDREVGYCQGSAFIVGLLLMQMPEEEAFCVFVKLMQDYRLRELFKPSMAELGLCMYQFECMIQEHLPELFVHFQSQSFHTSMYASSWFLTIFLTTFPLPIATRIFDIFMSEGLEIVFRVGLALLQMNQAELMQLDMEGMLQHFQKVIPHQFDGVPDKLIQAAYQVKYNSKKMKKLEKEYTTIKTKEMEEQVEIKRLRTENRLLKQRIETLEKESASLADRLIQHKCSSNYNEDFVLQLEKELVQARLSEAESQCALKEMQDKVLDIEKRNNSLPDENNIARLQEELIAVKLREAEAIMGLKELRQQVKDLEEHWQRHLARTTGRWKDPPKKNAMNELQDELMTIRLREAETQAEIREIKQRMMEMETQNQINSNHLRRAEQEVISLQEKVQYLSAQNKGLLTQLSEAKRKQAEIECKNKEEVMAVRLREADSIAAVAELRQHIAELEIQKEEGKLQGQLNKSDSNQYIGELKDQIAELNHELRCLKGQRGFSGQPPFDGIHIVNHLIGDDESFHSSDEDFIDNSLQETGVGFPLHGKSGSMSLDPAVADGSESETEDSVLETRESNQVVQKERPPRRRESYSTTV

SEQ ID NO: 43034 - protein, 247 aa, Homo sapiens
MIVRVTNRDIICQIAYARIEGDMIVCAAYAHELPKYGVKVGLTNYAAAYCTGLLLARRLLNRFGMDKIYEGQVEVTGDEYNVESIDGQPGAFTCYLDAGLARTTTGNKVFGALKGAVDGGLSIPHSTKRFPGYDSESKEFNAEVHRKHIMGQNVADYMRYLMEEDEDAYKKQFSQYIKNSVTPDMMEEMYKKAHAAIRENPVYEKKPKKEVKKKRWNRPKMSLAQKKDRVAQKKASFLRAQERAAES

SEQ ID NO: 43035 - protein, 120 aa, Homo sapiens
MIVRVTNRDIICQIAYARIEGDMIVCAAYAHELPKYGVKVGLTNYAAAYCTGLLLARRMEEMYKKAHAAIRENPVYEKKPKKEVKKKRWNRPKMSLAQKKDRVAQKKASFLRAQERAAES

SEQ ID NO: 43036 - protein, 125 aa, Homo sapiens [sequence omitted]

SEQ ID NO: 43037 - protein, 58 aa, Homo sapiens
MFCFDNTFSTISEKVIFFELILDNMGEQAQEQEDWKKYITGTDILDMKLEDILVSMVF

SEQ ID NO: 43038 - protein, 1353 aa, Homo sapiens
MFSSSAPVDQEIKSLREKLNKLRQQNACLVTQNHSLMTKFESIHFELTQSRAKVSMLESAQQQAASVPILEEQIINLEAEVSAQDKVLREAENKLEQSQKMVIEKEQSLQESKEECIKLKVDLLEQTKQGKRAERQRNEALYNAEELSKAFQQYKKKVAEKLEKVQAEEEILERNLTNCEKENKRLQERCGLYKSELEILKEKLRQLKEENNNGKEKLRIMAVKNSEVMAQLTESRQSILKLESELENKDEILRDKFSLMNENRELKVRVAAQNERLDLCQQEIESSRVELRSLEKIISQLPLKRELFGFKSYLSKYQMSSFSNKEDRCIGCCEANKLVISELRIKLAIKEAEIQKLHANLTANQLSQSLITCNDSQESSKLSSLETEPVKLGGHQVESVKDQNQHTMNKQYEKERQRLVTGIEELRTKLIQIEAENSDLKVNMAHRTSQFQLIQEELLEKASNSSKLESEMTKKCSQLLTLEKQLEEKIVAYSSIAAKNAELEQELMEKNEKIRSLETNINTEHEKICLAFEKAKKIHLEQHKEMEKQIERLEAQLEKKDQQFKEQEKTMSMLQQDIICKQHHLESLDRLLTESKGEMKKENMKKDEALKALQNQVSEETIKVRQLDSALEICKEELVLHLNQLEGNKEKFEKQLKKKSEEVYCLQKELKIKNHSLQETSEQNVILQHTLQQQQQMLQQETIRNGELEDTQTKLEKQVSKLEQELQKQRESSAEKLRKMEEKCESAAHEADLKRQKVIELTGTARQVKIEMDQYKEELSKMEKEIMHLKRDGENKAMHLSQLDMILDQTKTELEKKTNAVKELEKLQHSTETELTEALQKREVLETELQNAHGELKSTLRQLQELRDVLQKAQLSLEEKYTTIKDLTAELRECKMEIEDKKQELLEMDQALKERNWELKQRAAQVTHLDMTIREHRGEMEQKIIKLEGTLEKSELELKECNKQIESLNDKLQNAKEQLREKEFIMLQNEQEISQLKKEIERTQQRMKEMESVMKEQEQYIATQYKEAIDLGQELRLTREQVQNSHTELAEARHQQVQAQREIERLSSELEDMKQLSKEKDAHGNHLAEELGASKVREAHLEARMQAEIKKLSAEVESLKEAYHMEMISHQENHAKWKISADSQKSSVQQLNEQLEKAKLELEEAQDTVSNLHQQVQDRNEVIEAANEALLTKESELTRLQAKISGHEKAEDIKFLPAPFTSPTEIMPDVQDPKFAKCFHTSFSKCTKLRRSISASDLTFKIHGDEDLSEELLQDLKKMQLEQPSTLEESHKNLTYTQPDSFKPLTYNLEADSSENNDFNTLSGMLRYINKEVRLLKKSSMQTGAGLNQGENV

SEQ ID NO: 43039 - protein, 1233 aa, Homo sapiens
MGLKSLSSNSIFDPDYIKELVNDIRKFSHMLLYLKEAIFSDCFKEVIHIRLEELLRVLKSIMNKHQNLNSVDLQNAAEMLTAKVKAVNFTEVNEENKNDLFQEVFSSIETLAFTFGNILTNFLMGDVGNDSLLRLPVSRETKSFENVSVESVDSSSEKGNFSPLELDNVLLKNTDSIELALSYAKTWSKYTKNIVSWVEKKLNLELESTRNMVKLAEATRTNIGIQEFMPLQSLFTNALLNDIESSHLLQQTIAALQANKFVQPLLGRKNEMEKQRKEIKELWKQEQNKMLEAENALKKAKLLCMQRQDEYEKAKSSMFRAEEEHLSSSGGLAKNLNKQLEKKRRLEEEALQKVEEANELYKVCVTNVEERRNDLENTKREILAQLRTLVFQCDLTLKAVTVNLFHMQHLQAASLADSLQSLCDSAKLYDPGQEYSEFVKATNSTEEEKVDGNVNKHLNSSQPSGFGPANSLEDVVRLPDSSNKIEEDRCSNSADITGPSFIRSWTFGMFSDSESTGGSSESRSLDSESISPGDFHRKLPRTPSSGTMSSADDLDEREPPSPSETGPNSLGTFKKTLMSKAALTHKFRKLRSPTKCRDCEGIVVFQGVECEECLLVCHRKCLENLVIICGHQKLPGKIHLFGAEFTQVAKKEPDGIPFILKICASEIENRALCLQGIYRVCGNKIKTEKLCQALENGMHLVDISEFSSHDICDVLKLYLRQLPEPFILFRLYKEFIDLAKEIQHVNEEQETKKNSLEDKKWPNMCIEINRILLKSKDLLRQLPASNFNSLHFLIVHLKRVVDHAEENKMNSKNLGVIFGPSLIRPRPTTAPITISSLAEYSNQARLVEFLITYSQKIFDGSLQPQDVMCSIGVVDQGCFPKPLLSPEERDIERSMKSLFFSSKEDIHTSESESKIFERATSFEESERKQNALGKCDACLSDKAQLLLDQEAESASQKIEDGKTPKPLSLKSDRSTNNVERHTPRTKIRPVSLPVDRLLLASPPNERNGRNMGNVNLDKFCKNPAFEGVNRKDAATTVCSKFNGFDQQTLQKIQDKQYEQNSLTAKTTMIMPSALQEKGVTTSLQISGDHSINATQPSKPYAEPVRSVREASERRSSDSYPLAPVRAPRTLQPQHWTTFYKPHAPIISIRGNEEKPASPSAAVPPGTDHDPHGLVVKSMPDPDKASACPGQATGQPKEDSEELGLPDVNPMCQRPRLKRMQQFEDLEGEIPQFV

SEQ ID NO: 43040 - protein, 44 aa, Homo sapiens
MPGRTPPPAAGTPIAALEPLGRRNWGLHRHLLLPSPRSLPHLLI

SEQ ID NO: 43041 - protein, 61 aa, Homo sapiens [sequence omitted]

SEQ ID NO: 43042 - protein, 911 aa, Homo sapiens [sequence omitted]

SEQ ID NO: 43043 - protein, 334 aa, Homo sapiens
MNSFSPMMPTSPLSMINQIKFEDEPDLKDLFITVDEPESHVTTIETFITYRIITKTSRGEFDSSEFEVRRRYQDFLWLKGKLEEAHPTLIIPPLPEKFIVKGMVERFNDDFIETRRKALHKFLNRIADHPTLTFNEDFKIFLTAQAWELSSHKKQGPGLLSRMGQTVRAVASSMRGVKNRPEEFMEMNNFIELFSQKINLIDKISQRIYKEEREYFDEMKEYGPIHILWSASEEDLVDTLKDVASCIDRCCKATEKRMSGLSEALLPVVHEYVLYSEMLMGVMKRRDQIQAELDSKVEVLTYKKADTDLCLATWESFLTSQTNLHLEEASEDKP

SEQ ID NO: 43044 - protein, 558 aa, Homo sapiens [sequence omitted]

SEQ ID NO: 43045 - protein, 21 aa, Homo sapiens
MQYYDLKASTFIWTGNDSRFV

SEQ ID NO: 43046 - protein, 229 aa, Homo sapiens [sequence omitted]

SEQ ID NO: 43047 - protein, 735 aa, Homo sapiens
MVVILGASNILWIMFAASQAFKIETTPESRYLAQIGDSVSLTCSTTGCESPFFSWRTQIDSPLNGKVTNEGTTSTLTMNPVSFGNEHSYLCTATCESRKLEKGIQVEIYSFPKDPEIHLSGPLEAGKPITVKCSVADVYPFDRLEIDLLKGDHLMKSQEFLEDADRKSLETKSLEVTFTPVIEDIGKVLVCRAKLHIDEMDSVPTVRQAVKELQVYISPKNTVISVNPSTKLQEGGSVTMTCSSEGLPAPEIFWSKKLDNGNLQHLSGNATLTLIAMRMEDSGIYVCEGVNLIGKNRKEVELIVQEKPFTVEISPGPRIAAQIGDSVMLTCSVMGCESPSFSWRTQIDSPLSGKVRSEGTNSTLTLSPVSFENEHSYLCTVTCGHKKLEKGIQVELYSFPRDPEIEMSGGLVNGSSVTVSCKVPSVYPLDRLEIELLKGETILENIEFLEDTDMKSLENKSLEMTFIPTIEDTGKALVCQAKLHIDDMEFEPKQRQSTQTLYVNVAPRDTTVLVSPSSILEEGSSVNMTCLSQGFPAPKILWSRQLPNGELQPLSENATLTLISTKMEDSGVYLCEGINQAGRSRKEVELIIQVTPKDIKLTAFPSESVKEGDTVIISCTCGNVPETWIILKKKAETGDTVLKSIDGAYTIRKAQLKDAGVYECESKNKVGSQLRSLTLDVQGRENNKDYFSPELLVLYFASSLIIPAIGMIIYFARKANMKGSYSLVEAQKSKV

SEQ ID NO: 43048 - protein, 1590 aa, Homo sapiens
MIVDCKKKTTKPLDRSERAIVDTNGITVFGTRILDEEVFEGDIQQFLITGDPKAAYDYCEHYSPDCDSSAPKAAQAQEPQIDEANIVDDFQEYNYGTMESYQTEAPRHVSGTNEPNPVEEIFTEEYLTGEDYDSQRKNSEDTLYENKEIDGRDSDLLVDGDLGEYDFYEYKEYEDKPTSPPNEEFGPGVPAETDITETSINGHGAYGEKGQKGEPAVVEPGMLVEGPPGPAGPAGIMGPPGLQGPTGPPGDPGDRGPPGRPGLPGADGLPGPPGTMLMLPFRYGGDGSKGPTISAQEAQAQAILQQARIALRGPPGPMGLTGRPGPVGGPGSSGAKGESGDPGPQGPRGVQGPPGPTGKPGKRGRPGADGGRGMPGEPGAKGDRGFDGLPGLPGDKGHRGERGPQGPPGPPGDDGMRGEDGEIGPRGLPGEAGPRGLLGPRGTPGAPGQPGMAGVDGPPGPKGNMGPQGEPGPPGQQGNPGPQGLPGPQGPIGPPGEKGPQGKPGLAGLPGADGPPGHPGKEGQSGEKGALGPPGPQGPIGYPGPRGVKGADGVRGLKGSKGEKGEDGFPGFKGDMGLKGDRGEVGQIGPRGEDGPEGPKGRAGPTGDPGPSGQAGEKGKLGVPGLPGYPGRQGPKGSTGFPGFPGANGEKGARGVAGKPGPRGQRGPTGPRGSRGARGPTGKPGPKGTSGGDGPPGPPGERGPQGPQGPVGFPGPKGPPGPPGKDGLPGHPGQRGETGFQGKTGPPGPGGVVGPQGPTGETGPIGERGHPGPPGPPGEQGLPGAAGKEGAKGDPGPQGISGKDGPAGLRGFPGERGLPGAQGAPGLKGGEGPQGPPGPVGSPGERGSAGTAGPIGLPGRPGPQGPPGPAGEKGAPGEKGPQGPAGRDGVQGPVGLPGPAGPAGSPGEDGDKGEIGEPGQKGSKGDKGENGPPGPPGLQGPVGAPGIAGGDGEPGPRGQQGMFGQKGDEGARGFPGPPGPIGLQGLPGPPGEKGENGDVGPMGPPGPPGPRGPQGPNGADGPQGPPGSVGSVGGVGEKGEPGEAGNPGPPGEAGVGGPKGERGEKGEAGPPGAAGPPGAKGPPGDDGPKGNPGPVGFPGDPGPPGEPGPAGQDGVGGDKGEDGDPGQPGPPGPSGEAGPPGPPGKRGPPGAAGAEGRQGEKGAKGEAGAEGPPGKTGPVGPQGPAGKPGPEGLRGIPGPVGEQGLPGAAGQDGPPGPMGPPGLPGLKGDPGSKGEKGHPGLIGLIGPPGEQGEKGDRGLPGTQGSPGAKGDGGIPGPAGPLGPPGPPGLPGPQGPKGNKGSTGPAGQKGDSGLPGPPGSPGPPGEVIQPLPILSSKKTRRHTEGMQADADDNILDYSDGMEEIFGSLNSLKQDIEHMKFPMGTQTNPARTCKDLQLSHPDFPDGEYWIDPNQGCSGDSFKVYCNFTSGGETCIYPDKKSEGVRISSWPKEKPGSWFSEFKRGKLLSYLDVEGNSINMVQMTFLKLLTASARQNFTYHCHQSAAWYDVSSGSYDKALRFLGSNDEEMSYDNNPFIKTLYDGCASRKGYEKTVIEINTPKIDQVPIVDVMINDFGDQNQKFGFEVGPVCFLG

SEQ ID NO: 43049 - protein, 1629 aa, Homo sapiens
MIVDCKKKTTKPLDRSERAIVDTNGITVFGTRILDEEVFEGDIQQFLITGDPKAAYDYCEHYSPDCDSSAPKAAQAQEPQIDEYAPEDIIEYDYEYGEAEYKEAESVTEGPTVTEETIAQTEANIVDDFQEYNYGTMESYQTEAPRHVSGTNEPNPVEEIFTEEYLTGEDYDSQRKNSEDTLYENKEIDGRDSDLLVDGDLGEYDFYEYKEYEDKPTSPPNEEFGPGVPAETDITETSINGHGAYGEKGQKGEPAVVEPGMLVEGPPGPAGPAGIMGPPGLQGPTGPPGDPGDRGPPGRPGLPGADGLPGPPGTMLMLPFRYGGDGSKGPTISAQEAQAQAILQQARIALRGPPGPMGLTGRPGPVGGPGSSGAKGESGDPGPQGPRGVQGPPGPTGKPGKRGRPGADGGRGMPGEPGAKGDRGFDGLPGLPGDKGHRGERGPQGPPGPPGDDGMRGEDGEIGPRGLPGEAGPRGLLGPRGTPGAPGQPGMAGVDGPPGPKGNMGPQGEPGPPGQQGNPGPQGLPGPQGPIGPPGEKGPQGKPGLAGLPGADGPPGHPGKEGQSGEKGALGPPGPQGPIGYPGPRGVKGADGVRGLKGSKGEKGEDGFPGFKGDMGLKGDRGEVGQIGPRGEDGPEGPKGRAGPTGDPGPSGQAGEKGKLGVPGLPGYPGRQGPKGSTGFPGFPGANGEKGARGVAGKPGPRGQRGPTGPRGSRGARGPTGKPGPKGTSGGDGPPGPPGERGPQGPQGPVGFPGPKGPPGPPGKDGLPGHPGQRGETGFQGKTGPPGPGGVVGPQGPTGETGPIGERGHPGPPGPPGEQGLPGAAGKEGAKGDPGPQGISGKDGPAGLRGFPGERGLPGAQGAPGLKGGEGPQGPPGPVGSPGERGSAGTAGPIGLPGRPGPQGPPGPAGEKGAPGEKGPQGPAGRDGVQGPVGLPGPAGPAGSPGEDGDKGEIGEPGQKGSKGDKGENGPPGPPGLQGPVGAPGIAGGDGEPGPRGQQGMFGQKGDEGARGFPGPPGPIGLQGLPGPPGEKGENGDVGPMGPPGPPGPRGPQGPNGADGPQGPPGSVGSVGGVGEKGEPGEAGNPGPPGEAGVGGPKGERGEKGEAGPPGAAGPPGAKGPPGDDGPKGNPGPVGFPGDPGPPGEPGPAGQDGVGGDKGEDGDPGQPGPPGPSGEAGPPGPPGKRGPPGAAGAEGRQGEKGAKGEAGAEGPPGKTGPVGPQGPAGKPGPEGLRGIPGPVGEQGLPGAAGQDGPPGPMGPPGLPGLKGDPGSKGEKGHPGLIGLIGPPGEQGEKGDRGLPGTQGSPGAKGDGGIPGPAGPLGPPGPPGLPGPQGPKGNKGSTGPAGQKGDSGLPGPPGSPGPPGEVIQPLPILSSKKTRRHTEGMQADADDNILDYSDGMEEIFGSLNSLKQDIEHMKFPMGTQTNPARTCKDLQLSHPDFPDGEYWIDPNQGCSGDSFKVYCNFTSGGETCIYPDKKSEGVRISSWPKEKPGSWFSEFKRGKLLSYLDVEGNSINMVQMTFLKLLTASARQNFTYHCHQSAAWYDVSSGSYDKALRFLGSNDEEMSYDNNPFIKTLYDGCASRKGYEKTVIEINTPKIDQVPIVDVMINDFGDQNQKFGFEVGPVCFLG

SEQ ID NO: 43050 - protein, 552 aa, Homo sapiens
MIVDCKKKTTKPLDRSERAIVDTNGITVFGTRILDEEVFEGDIQQFLITGDPKAAYDYCEHYSPDCDSSAPKAAQAQEPQIDEYAPEDIIEYDYEYGEAEYKEAESVTEGPTVTEETIAQTEANIVDDFQEYNYGTMESYQTEAPRHVSGTNEPNPVEEIFTEEYLTGEDYDSQRKNSEDTLYENKEIDGRDSDLLVDGDLGEYDFYEYKEYEDKPTSPPNEEFGPGVPAETDITETSINGHGAYGEKGQKGEPAVVEPGMLVEGPPGPAGPAGIMGPPGLQGPTGPPGDPGDRGPPGRPGLPGADGLPGPPGTMLMLPFRYGGDGSKGPTISAQEAQAQAILQQARIALRGPPGPMGLTGRPGPVGGPGSSGAKGESGDPGPQGPRGVQGPPGPTGKPGKRGRPGADGGRGMPGEPGAKGDRGFDGLPGLPGDKGHRGERGPQGPPGPPGDDGMRGEDGEIGPRGLPGEAGPRGLLGPRGTPGAPGQPGMAGVDGPPGPKGNMGPQGEPGPPGQQGNPGPQGLPGPQGPIGPPGEKMCCNLSFGILIPLQK

SEQ ID NO: 43051 - protein, 210 aa, Homo sapiens
MLSSVLHARTKWLKEGGLLLPASAELFIAPISDQMLEWRLGFWSQVKQHYGVDMSCLEGFATRCLMGHSEIVVQGLSGEDVLARPQRFAQLELSRAGLEQELEAGVGGRFRCSCYGSAPMHGFAIWFQVTFPGGESEKPLVLSTSPFHPATHWKQALLYLNEPVQVEQDTDVSGEITLLPSRDNPRRLRVLLRYKVGDQEEKTKDFAMED

SEQ ID NO: 43052 - protein, 359 aa, Homo sapiens
MKKKKFKFKVDFELEELSSVPFVNGVLFCKMRLLDGGSFTAESSREVVQANCVRWRKKFSFMCKMSASAATGILDPCIYRVSVRKELKGGKAYAKLGFADLNLAEFAGSGNTTRRCLLEGYDTKNTRQDNSILKVLISMQLMSGDPCFKTPPSTSMSIPIAGESESLQEDRKGGETLKVHLGIADLSAKSASVPDELGACGHSRTSSYASQQSKVSGYSTCHSRSSSFSELCHRRNTSVGSTSTGVESILEPCDEIEQKIAEPNLDTADKEDTASEKLSRCPVKQDSVESQLKRVDDTRVDADDIVEKILQSQDFSLDSSAEEEGLRLFVGPGGSTTFGSHHLPNRVGSGAYEQVVIKR

SEQ ID NO: 43053 - protein, 523 aa, Homo sapiens
MLNYDAASGTMRKSQAKYGISGEKDVSPDLSCADEISECYHKLDSLTYKIDECEKKKREDYESQSNPVFRRYLNKILIEAGKLGLPDENKGDMHYDAEIILKRETLLEIQKFLNGEDWKPGALDDALSDILINFKFHDFETWKWRFEDSFGVDPYNVLMVLLCLLCIVVLVATELWTYVRWYTQLRRVLIISFLFSLGWNWMYLYKLAFAQHQAEVAKMEPLNNVCAKKMDWTGSIWEWFRSSWTYKDDPCQKYYELLLVNPIWLVPPTKALAVTFTTFVTEPLKHIGKGTGEFIKALMKEIPALLHLPVLIIMALAILSFCYGAGKSVHVLRHIGGPESEPPQALRPRDRRRQEEIDYRPDGGAGDADFHYRGQMGPTEQGPYAKTYEGRREILRERDVDLRFQTGNKSPEVLRAFDVPDAEAREHPTVVPSHKSPVLDTKPKETGGILGEGTPKESSTESSQSAKPVSGQDTSGNTEGSPAAEKAQLKSEAAGSPDQGSTYSPARGVAGPRGQDPVSSPCG

SEQ ID NO: 43054 - protein, 473 aa, Homo sapiens
MLNYDAASGTMRKSQAKYGISGEKDVSPDLSCADEISECYHKLDSLTYKIDECEKKKREDYESQSNPVFRRYLNKILIEAGKLGLFHDFETWKWRFEDSFGVDPYNVLMVLLCLLCIVVLVATELWTYVRWYTQLRRVLIISFLFSLGWNWMYLYKLAFAQHQAEVAKMEPLNNVCAKKMDWTGSIWEWFRSSWTYKDDPCQKYYELLLVNPIWLVPPTKALAVTFTTFVTEPLKHIGKGTGEFIKALMKEIPALLHLPVLIIMALAILSFCYGAGKSVHVLRHIGGPESEPPQALRPRDRRRQEEIDYRPDGGAGDADFHYRGQMGPTEQGPYAKTYEGRREILRERDVDLRFQTGNKSPEVLRAFDVPDAEAREHPTVVPSHKSPVLDTKPKETGGILGEGTPKESSTESSQSAKPVSGQDTSGNTEGSPAAEKAQLKSEAAGSPDQGSTYSPARGVAGPRGQDPVSSPCG

SEQ ID NO: 43055 - protein, 86 aa, Homo sapiens
MMYGFGDDQNPYTESVDILEDLVIEFITEMTHKAMSIGRQGRVQVEDIVFLIRKDPRKFARVKDLLTMNEELKRARKAFDEANYGS

SEQ ID NO: 43056 - protein, 911 aa, Homo sapiens
MKDQSCKPCAEGRYSLGTGIRFDEWDELPHGFASLSANMELDDSAAESTGNCTSSKWVPRGDYIASNTDECTATLMYAVNLKQSGTVNFEYYYPDSSIIFEFFVQNDQCQPNADDSRWMKTTEKGWEFHSVELNRGNNVLYWRTTAFSVWTKVPKPVLVRNIAITGVAYTSECFPCKPGTYADKQGSSFCKLCPANSYSNKGETSCHQCDPDKYSEKGSSSCNVRPACTDKDYFYTHTACDANGETQLMYKWAKPKICSEDLEGAVKLPASGVKTHCPPCNPGFFKTNNSTCQPCPYGSYSNGSDCTRCPAGTEPAVGFEYKWWNTLPTNMETTVLSGINFEYKGMTGWEVAGDHIYTAAGASDNDFMILTLVVPGFRPPQSVMADTENKEVARITFVFETLCSVNCELYFMVGVNSRTNTPVETWKGSKGKQSYTYIIEENTTTSFTWAFQRTTFHEASRKYTNDVAKIYSINVTNVMNGVASYCRPCALEASDVGSSCTSCPAGYYIDRDSGTCHSCPTNTILKAHQPYGVQACVPCGPGTKNNKIHSLCYNDCTFSRNTPTRTFNYNFSALANTVTLAGGPSFTSKGLKYFHHFTLSLCGNQGRKMSVCTDNVTDLRIPEGESGFSKSITAYVCQAVIIPPEVTGYKAGVSSQPVSLADRLIGVTTDMTLDGITSPAELFHLESLGIPDVIFFYRSNDVTQSCSSGRSTTIRVRCSPQKTVPGSLLLPGTCSDGTCDGCNFHFLWESAAACPLCSVADYHAIVSSCVAGIQKTTYVWREPKLCSGGISLPEQRVTICKTIDFWLKVGISAGTCTAILLTVLTCYFWKKNQKLEYKYSKLVMNATLKDCDLPAADSCAIMEGEDVEDDLIFTSKKSLFGKIKSFTSKRTPDGFDSVPLKTSSGGLDMDL

SEQ ID NO: 43057 - protein, 695 aa, Homo sapiens
MTFGQSKLYRSEDYGKNFKDITDLINNTFIRTEFGMAIGPENSGKVVLTAEVSGGSRGGRIFRSSDFAKNFVQTDLPFHPLTQMMYSPQNSDYLLALSTENGLWVSKNFGGKWEEIHKAVCLAKWGSDNTIFFTTYANGSCKADLGALELWRTSDLGKSFKTIGVKIYSFGLGGRFLFASVMADKDTTRRIHVSTDQGDTWSMAQLPSVGQEQFYSILAANDDMVFMHVDEPGDTGFGTIFTSDDRGIVYSKSLDRHLYTTTGGETDFTNVTSLRGVYITSVLSEDNSIQTMITFDQGGRWTHLRKPENSECDATAKNKNECSLHIHASYSISQKLNVPMAPLSEPNAVGIVIAHGSVGDAISVMVPDVYISDDGGYSWTKMLEGPHYYTILDSGGIIVAIEHSSRPINVIKFSTDEGQCWQTYTFTRDPIYFTGLASEPGARSMNISIWGFTESFLTSQWVSYTIDFKDILERNCEEKDYTIWLAHSTDPEDYEDGCILGYKEQFLRLRKSSVCQNGRDYVVTKQPSICLCSLEDFLCDFGYYRPENDSKCVEQPELKGHDLEFCLYGREEHLTTNGYRKIPGDKCQGGVNPVREVKDLKKKCTSNFLSPEKQNSKSNSVPIILAIVGLMLVTVVAGVLIVKKYVCGGRFLVHRYSVLQQHAEANGVDGVDALDTASHTNKSGYHDDSDEDLLE

SEQ ID NO: 43058 - protein, 276 aa, Homo sapiens
MWKKIPPAAEPPAHLVNSPLSAPLSPSSTGTCPRLPGPTLRPACPASMPPTKDNLVPSYPAGSPSVAAACSQAECMGGSQAITSPLPANTPSPSFSKLPPSKASKSSKGKDGVEVEAPSRKRKLSPGPTTLKRTCILEPTGKGKPSGCRGLSAKTKTALSMGLNGTMGPRVKRAGPLDCRGSPHQLPTPVKASQLENRGAAGHPAKALPTNCLSEEEVAKKRKNLATYCRPVKAKHCQAGAPADVACSVRRKKPGPALAFEEKCSTLKVPARLPED

SEQ ID NO: 43059 - protein, 555 aa, Homo sapiens
MVRGVVHVYTRREPDEHCSEVELPYPDLQEFVADVNVLMALIINGPIKSFCYRRLQYLSSKFQMHVLLNEMKELAAQKKVPHRDFYNIRKVDTHIHASSCMNQKHLLRFIKRAMKRHLEEIVHVEQGREQTLREVFESMNLTAYDLSVDTLDVHADRNTFHRFDKFNAKYNPIGESVLREIFIKTDNRVSGKYFAHIIKEVMSDLEESKYQNAELRLSIYGRSRDEWDKLARWAVMHRVHSPNVRWLVQVPRLFDVYRTKGQLANFQEMLENIFLPLFEATVHPASHPELHLFLEHVDGFDSVDDESKPENHVFNLESPLPEAWVEEDNPPYAYYLYYTFANMAMLNHLRRQRGFHTFVLRPHCGEAGPIHHLVSAFMLAENISHGLLLRKAPVLQYLYYLAQIGIAMSPLSNNSLFLSYHRNPLPEYLSRGLMVSLSTDDPLQFHFTKEPLMEEYSIATQVWKLSSCDMCELARNSVLMSGFSHKVKSHWLGPNYTKEGPEGNDIRRTNVPDIRVGYRYETLCQELALITQAVQSEMLETIPEEAGITMSPGPQ

SEQ ID NO: 43060 - protein, 216 aa, Homo sapiens [sequence omitted]

SEQ ID NO: 43061 - protein, 110 aa, Homo sapiens
MELVRLCYDPDFEKLKPKYLEELPEKLKLYSEFLGKRPWFAGDKITFVDFLAYDVLDMKRIFEPKCLDAFLNLKDFISRFEGLKKISAYMKSSQFLRGLLFGKSATWNSK

SEQ ID NO: 43062 - protein, 379 aa, Homo sapiens
MKAEKRSILGLPPLPEDSIKVIRNMRAASPPASASDLIEQQQKRGRREHKALIKQDNLDAFNERDPYKADDSREEEEENDDDNSLEGETFPLERDEVMPPPLQHPQTDRLTCPKGLPWAPKVREKDIEMFLESSRSKFIGYTLGSDTNTVVGLPRPIHESIKTLKQHKYTSIAEVQAQMEEEYLRSPLSGGEEEVEQVPAETLYQGLLPSLPQYMIALLKILLAAAPTSKAKTDSINILADVLPEEMPTTVLQSMKLGVDVNRHKEVIVKAISAVLLLLLKHFKLNHVYQVPTGLSLLSCGLGPRALLLLQPTRTGALAFDPLELCMNVLRHGPSAKAFHPWRKEGKVPRAAPFFFFFFPVGFSLNTWPSTWCLPTAFL

SEQ ID NO: 43063 - protein, 145 aa, Homo sapiens
MFSSKERGRCTVINFVPLEAPLRSTPRSRQVTEACGGEGRAVPLGSEPEWSVGGMEATLEQHLEDTMKNPSIVGVLCTDSQGLNLGCRGTLSDEHAGVISVLAQQAAKLTSDPTDIPVVCLESDNGNIMIQKHDGITVAVHKMAS

SEQ ID NO: 43064 - protein, 385 aa, Homo sapiens
MDQKSLWAGVVVLLLLQGGSAYKLVCYFTNWSQDRQEPGKFTPENIDPFLCSHLIYSFASIENNKVIIKDKSEVMLYQTINSLKTKNPKLKILLSIGGYLFGSKGFHPMVDSSTSRLEFINSIILFLRNHNFDGLDVSWIYPDQKENTHFTVLIHELAEAFQKDFTKSTKERLLLTAGVSAGRQMIDNSYQVEKLAKDLDFINLLSFDFHGSWEKPLITGHNSPLSKGWQDRGPSSYYNVEYAVGYWIHKGMPSEKVVMGIPTYGHSFTLASAETTVGAPASGPGAAGPITESSGFLAYYEICQFLKGAKITRLQDQQVPYAVKGNQWVGYDDVKSMETKVQFLKNLNLGGAMIWSIDMDDFTGKSCNQGPYPLVQAVKRSLGSL

SEQ ID NO: 43065 - protein, 148 aa, Homo sapiens
MVYGIKKYGPFVADFADKLNEQKLAQLEEAKQASIQHIQNAIDTEKSQQALVQKRHYLFDVQRNNIAMALEVTYRERLYRVYKEVKNRLDYHISVQNMMRRKEQEHMINWVEKHVVQSISTQQEKETIAKCIADLKLLAKKAQAQPVM

SEQ ID NO: 43066 - protein, 807 aa, Homo sapiens [sequence omitted]

SEQ ID NO: 43067 - protein, 629 aa, Homo sapiens [sequence omitted]

SEQ ID NO: 43068 - protein, 453 aa, Homo sapiens
MGGTESSISEPGSPSRNRENETSRQNLSECKVWRNPLNLFRGAEYRRYTWVTGKEPLTYYDMNLSAQDHQTFFTCDTDFLRPSDTVMQKAWRERNPPARIKAAYQALELNNDCATAYVLLAEEEATTIVDAERLFKQALKAGETIYRQSQQCQHQSPQHEAQLRRDTNVLVYIKRRLAMCARKLGRIREAVKIMRDLMKEFPPLTMLNIHENLLESLLELQAYPDVQAVLAKYDDISLPKSAAICYTAALLKTRTVSEKFSPETASRRGLSTAEINAVEAIHRAVEFNPHVPKYLLEMKSLILPPEHILKRGDSEAIAYAFFHLQHWKRIEGALNLLQCTWEGTFRMIPYPLEKGHLFYPYPSCTETADRELLPTFHHVSVYPKKELPLFIHFTAGFCSSTAMIAILTHQFPEIMGIFAKAVLGLWCPQPWASSGFEENTQDLKSEDLGLSSG

SEQ ID NO: 43069 - protein, 433 aa, Homo sapiens
MGGTESSISEPGSPSRNRENETSRQNLSECKVWRNPLNLFRGAEYRRYTWVTGKEPLTYYDMNLSAQDHQTFFTCDTDFLRPSDTVMQKAWRERNPPARIKAAYQALELNNDCATAYVLLAEEEATTIVDAERLFKQALKAGETIYRQSQQCQHQSPQHEAQLRRDTNVLVYIKRRLAMCARKLGRIREAVKIMRDLMKEFPPLTMLNIHENLLESLLELQAYPDVQAVLAKYDDISLPKSAAICYTAALLKTRTVSEKFSPETASRRGLSTAEINAVEAIHRAVEFNPHVPKYLLEMKSLILPPEHILKRGDSEAIAYAFFHLQHWKRIEGALNLLQCTWEGTFRMIPYPLEKGHLFYPYPSCTETADRELLPTFHHVSVYPKKELPLFIHFTAGFCSSTAMIAILTHQFPEIMGIFAKAVVGVKTQKENAD

SEQ ID NO: 43070 - protein, 433 aa, Homo sapiens
MGGTESSISEPGSPSRNRENETSRQNLSECKVWRNPLNLFRGAEYRRYTWVTGKEPLTYYDMNLSAQDHQTFFTCDTDFLRPSDTVMQKAWRERNPPARIKAAYQALELNNDCATAYVLLAEEEATTIVDAERLFKQALKAGETIYRQSQQCQHQSPQHEAQLRRDTNVLVYIKRRLAMCARKLGRIREAVKIMRDLMKEFPPLTMLNIHENLLESLLELQAYPDVQAVLAKYDDISLPKSAAICYTAALLKTRTVSEKFSPETASRRGLSTAEINAVEAIHRAVEFNPHVPKYLLEMKSLILPPEHILKRGDSEAIAYAFFHLQHWKRIEGALNLLQCTWEGTFRMIPYPLEKGHLFYPYPSCTETADRELLPTFHHVSVYPKKELPLFIHFTAGFCSSTAMIAILTHQFPEIMGIFAKAVSMISRTCVDYL

SEQ ID NO: 43071 - protein, 41 aa, Homo sapiens
MGGTESSISEPGSPSRNRENETSRQNLSGDYFSNVFSELCI

SEQ ID NO: 43072 - protein, 228 aa, Homo sapiens [sequence omitted]

SEQ ID NO: 43073 - protein, 443 aa, Homo sapiens [sequence omitted]

SEQ ID NO: 43074 - protein, 74 aa, Homo sapiens
MLPLLEVAEKEREALRTEADTISGRVDRLEREVDYLETQNPALPCVEFDEKVTGGPGTKGKGRRNEKYDMVTGK

SEQ ID NO: 43075 - protein, 45 aa, Homo sapiens
MESNWVSLVSKNYEIERTIVQLENEIYQIKQQHGEANKENIRQDF

SEQ ID NO: 43076 - protein, 369 aa, Homo sapiens
MAFKLLILLIGTWALFFRKRRADMPRVFVFRALLLVLIFLFVVSYWLFYGVRILDSRDRNYQGIVQYAVSLVDALLFIHYLAIVLLELRQLQPMFTLQVVRSTDGESRFYSLGHLSIQRAALVVLENYYKDFTIYNPNLLTASKFRAAKHMAGLKVYNVDGPSNNATGQSRAMIAAAARRRDSSHNELYYEEAEHERRVKKRKARLVVAVEEAFIHIQRLQAEEQQKAPGEVMDPREAAQAIFPSMARALQKYLRITRQQNYHSMESILQHLAFCITNGMTPKAFLERYLSAGPTLQYDKDRWLSTQWRLVSDEAVTNGLRDGIVFVLKCLDFSLVVNVKKIPFIILSEEFIDPKSHKFVLRLQSETSV

SEQ ID NO: 43077 - protein, 181 aa, Homo sapiens
MGHLACFAGGMFALGADGSRADKAGHYLELGAEIARTCHESYDRTALKLGPESFKFDGAVEAVAVRQAEKYYILRPEVIETYWYLWRFTHDPRYRQWGWEAALAIEKYCRVNGGFSGVKDVYSSTPTHDDVQQSFFLAETLKYLYLLFSGDDLLPLDHWVFNTEAHPLPVLHLANTTLSES

SEQ ID NO: 43078 - protein, 407 aa, Homo sapiens
MLAGPDLKEDLQKLKGCRTGEAKLTKGFNLAARFIIHTVGPKYKSRYRTAAESSLYSCYRNVLQLAKEQSMSSVGFCVINSAKRGYPLEDATHIALRTVRRFLEIHGETIEKVVFAVSDLEEGTYQKLLPLYFPRSLKEENRSLPYLPADIGNAEGEPVVPERQIRISEKPGAPEDNQEEEDEGLGVDLSFIGSHAFARMEGDIDKQRKLILQGQLSEAALQKQHQRNYNRWLCQARSEDLSDIASLKALYQTGVDNCGRTVMVVVGRNIPVTLIDMDKALLYFIHVMDHIAVKEYVLVYFHTLTSEYNHLDSDFLKKLYDVVDVKYKRNLKAVYFVHPTFRSKVSTWFFTTFSVSGLKDKIHHVDSLHQLFSAISPEQIDFPPFVLEYDARENGPYYTSYPPSPDL

SEQ ID NO: 43079 - protein, 757 aa, Homo sapiens
MVGHRTEVWGLVLLSEEKRLITGASDSELRVWDIAYLQEIEDPEEPDPKKIKGSSPGIQDTLEAEDGAFETDEAPEDRILSCRKAGSIMREGRDRVVNLAVDKTGRILACHGTDSVLELFCILSKKEIQKKMDKKMKKARKKAKLHSSKGEEEDPEVNVEMSLQDEIQRVTNIKTSAKIKSFDLIHSPHGELKAVFLLQNNLVELYSLNPSLPTPQPVRTSRITIGGHRSDVRTLSFSSDNIAVLSAAADSIKIWNRSTLQCIRTMTCEYALCSFFVPGDRQVVIGTKTGKLQLYDLASGNLLETIDAHDGALWSMSLSPDQRGFVTGGADKSVKFWDFELVKDENSTQKRLSVKQTRTLQLDEDVLCVSYSPNQKLLAVSLLDCTVKIFYVDTLKFFLSLYGHKLPVICMDISHDGALIATGSADRNVKIWGLDFGDCHKSLFAHDDSVMYLQFVPKSHLFFTAGKDHKIKQWDADKFEHIQTLEGHHQEIWCLAVSPSGDYVVSSSHDKSLRLWERTREPLILEEEREMEREAEYEESVAKEDQPAVPGETQGDSYFTGKKTIETVKAAERIMEAIELYREETAKMKEHKAICKAAGKEVPLPSNPILMAYGSISPSAYVLEIFKGIKSSELEESLLVLPFSYVPDILKLFNEFIQLGSDVELICRCLFFLLRIHFGQITSNQMLVPVIEKLRETTISKVSQVRDVIGFNMAGLDYLKRECEAKSEVMFFADATSHLEEKKRKRKKREKLILTLT

SEQ ID NO: 43080 - protein, 266 aa, Homo sapiens
MTAVLLACGINPEKSILFQQSQVSEHTQLSWILSCMVRLPRLQHLHQWKAKTTKQKHDGTVGLLTYPVLQAADILLYKSTHVPVGEDQVQHMELVQDLAQGFNKKYGEFFPVPESILTSMKKVKSLRDPSAKMSKSDPDKLATVRITDSPEEIVQKFRKAVTDFTSEVTYDPAGRAGVSNIVAVHAAVTGLSVEEVVRRSAGMNTARYKLAVADAVIEKFAPIKREIEKLKLDKDHLEKVLQIGSAKAKELAYTVCQEVKKLVGFL

SEQ ID NO: 43081 - protein, 126 aa, Homo sapiens
MTAVLLACGINPEKSILFQQSQVSEHTQLSWILSCMVRLPRLQHLHQWKAKTTKQKHDGTVGLLTYPVLQAADILLYKSTHVPVGEDQVQHMELVQDLAQGFNKKYGEFFPVPESILSMCVLVFLT

SEQ ID NO: 43082 - protein, 2349 aa, Homo sapiens
MLSRDTYECTCQVGFTGKECQWTDACLSHPCANGSTCTTVANQFSCKCLTGFTGQKCETDVNECDIPGHCQHGGTCLNLPGSYQCQCPQGFTGQYCDSLYVPCAPSPCVNGGTCRQTGDFTFECNCLPGFEGSTCERNIDDCPNHRCQNGGVCVDGVNTYNCRCPPQWTGQFCTEDVDECLLQPNACQNGGTCANRNGGYGCVCVNGWSGDDCSENIDDCAFASCTPGSTCIDRVASFSCMCPEGKAGLLCHLDDACISNPCHKGALCDTNPLNGQYICTCPQGYKGADCTEDVDECAMANSNPCEHAGKCVNTDGAFHCECLKGYAGPRCEMDINECHSDPCQNDATCLDKIGGFTCLCMPGFKGVHCELEINECQSNPCVNNGQCVDKVNRFQCLCPPGFTGPVCQIDIDDCSSTPCLNGAKCIDHPNGYECQCATGFTGVLCEENIDNCDPDPCHHGQCQDGIDSYTCICNPGYMGAICSDQIDECYSSPCLNDGRCIDLVNGYQCNCQPGTSGVNCEINFDDCASNPCIHGICMDGINRYSCVCSPGFTGQRCNIDIDECASNPCRKGATCINGVNGFRCICPEGPHHPSCYSQVNECLSNPCIHGNCTGGLSGYKCLCDAGWVGINCEVDKNECLSNPCQNGGTCDNLVNGYRCTCKKGFKGYNCQVNIDECASNPCLNQGTCFDDISGYTCHCVLPYTGKNCQTVLAPCSPNPCENAAVCKESPNFESYTCLCAPGWQGQRCTIDIDECISKPCMNHGLCHNTQGSYMCECPPGFSGMDCEEDIDDCLANPCQNGGSCMDGVNTFSCLCLPGFTGDKCQTDMNECLSEPCKNGGTCSDYVNSYTCKCQAGFDGVHCENNINECTESSCFNGGTCVDGINSFSCLCPVGFTGSFCLHEINECSSHPCLNEGTCVDGLGTYRCSCPLGYTGKNCQTLVNLCSRSPCKNKGTCVQKKAESQCLCPSGWAGAYCDVPNVSCDIAASRRGVLVEHLCQHSGVCINAGNTHYCQCPLGYTGSYCEEQLDECASNPCQHGATCSDFIGGYRCECVPGYQGVNCEYEVDECQNQPCQNGGTCIDLVNHFKCSCPPGTRGLLCEENIDDCARGPHCLNGGQCMDRIGGYSCRCLPGFAGERCEGDINECLSNPCSSEGSLDCIQLTNDYLCVCRSAFTGRHCETFVDVCPQMPCLNGGTCAVASNMPDGFICRCPPGFSGARCQSSCGQVKCRKGEQCVHTASGPRCFCPSPRDCESGCASSPCQHGGSCHPQRQPPYYSCQCAPPFSGSRCELYTAPPSTPPATCLSQYCADKARDGVCDEACNSHACQWDGGDCSLTMENPWANCSSPLPCWDYINNQCDELCNTVECLFDNFECQGNSKTCKYDKYCADHFKDNHCDQGCNSEECGWDGLDCAADQPENLAEGTLVIVVLMPPEQLLQDARSFLRALGTLLHTNLRIKRDSQGELMVYPYYGEKSAAMKKQRMTRRSLPGEQEQEVAGSKVFLEIDNRQCVQDSDHCFKNTDAAAALLASHAIQGTLSYPLVSVVSESLTPERTQLLYLLAVAVVIILFIILLGVIMAKRKRKHGSLWLPEGFTLRRDASNHKRREPVGQDAVGLKNLSVQVSEANLIGTGTSEHWVDDEGPQPKKVKAEDEALLSEEDDPIDRRPWTQQHLEAADIRRTPSLALTPPQAEQEVDVLDVNVRGPDGCTPLMLASLRGGSSDLSDEDEDAEDSSANIITDLVYQGASLQAQTDRTGEMALHLAARYSRADAAKRLLDAGADANAQDNMGRCPLHAAVAADAQGVFQILIRNRVTDLDARMNDGTTPLILAARLAVEGMVAELINCQADVNAVDDHGKSALHWAAAVNNVEATLLLLKNGANRDMQDNKEETPLFLAAREGSYEAAKILLDHFANRDITDHMDRLPRDVARDRMHHDIVRLLDEYNVTPSPPGTVLTSALSPVICGPNRSFLSLKHTPMGKKSRRPSAKSTMPTSLPNLAKEAKDAKGSRRKKSLSEKVQLSESSVTLSPVDSLESPHTYVSDTTSSPMITSPGILQASPNPMLATAAPPAPVHAQHALSFSNLHEMQPLAHGASTVLPSVSQLLSHHHIVSPGSGSAGSLSRLHPVPVPADWMNRMEVNETQYNEMFGMVLAPAEGTHPGIAPQSRPPEGKHITTPREPLPPIVTFQLIPKGSIAQPAGAPQPQSTCPPAVAGPLPTMYQIPEMARLPSVAFPTAMMPQQDGQVAQTILPAYHPFPASVGKYPTPPSQHSYASSNAAERTPSHSGHLQGEHPYLTPSPESPDQWSSSSPHSASDWSDVTTSPTPGGAGGGQRGPGTHMSEPPHNNMQVYA

SEQ ID NO: 43083 - protein, 223 aa, Homo sapiens
MFFQDFRPFLSSSPLDQDNRANERGHQTHTDFWGARPPRLPLGRRYRSRGSSRPDRSPAIEGILQHIFAGFFANSAIPGSPHPFSWSGMLHSNPGDYAWGQTGLDAIVTQLLGQLENTGPPPADKEKITSLPTVTVTQEQVDMGLECPVCKEDYTVEEEVRQLPCNHFFHSSCIVPWLELHDTCPVCRKSLNGEDSTRQSQSTEASASNRFSNDSQLHDRWTF

SEQ ID NO: 43084 - protein, 844 aa, Homo sapiens
MIASLGGHAAICSQLLQRGARVNVTDKNDKSALILACEKGSAEVAELLLSHGADAGAVDSTGHDALHYALHTQDKALWRHLQQALSRRRRGGQRLVQHPDLASQASPSEPQAGSPPKSSWRAEPEEEQEEKEDEDPCSEEWRWKYEEERRKVVRLEQELVQKTEECKTQAAAYLDLENQIREQAQELGVLLSWEPRASGKQGSSLRPGGDGMEQGCPKDLLAESTQELKKQQQAAATVNPVLAPKKAEDSAPGKIQYEVHGRSQPEEQGPPQSPASETIRKATGQQLTTNGAQTFGPDHADQLPAGQKESSQVLGVEPGGTVAEPVGPAAMNQLLLQLREELAAVWREKDAARGALSRPVMEGALGTPRAEAAAAAWEKMEARLERVLARLEWAKAGLQVKPEVPSQESREGALKAAPGSIKQDEEKEKRVPGAQGEPLGALGGEKALGGLAKGQLEKEMSVLRLSNSNLLEELGELGRERQRLQRELQSLSQRLQREFVPKPQAQVQLQQLRQSVGLLTNELAMEKEATEKLRKLLASQSSGLRGLWDCLPADLVGERSAQSKAAESLEELRACISTLVDRHREAQQVLARLQEENQQLRGSLSPCREPGTSLKAPASPQVAALEQDLGKLEEELRAVQATMSGKSQEIGKLKQLLYQATEEVAELRAREAASLRQHEKTRGSLVAQAQAWGQELKALLEKYNTACREVGRLREAVAEERRRSGDLAAQAAEQERQASEMRGRSEQFEKTAELLKEKMEHLIGACRDKEAKIKELLKKLEQLSEEVLAIRGENARLALQLQDSQKNHEEIISTYRNHLLNAARGYMEHEVYNILLQILSMEEE

SEQ ID NO: 43085 - protein, 334 aa, Homo sapiens [sequence omitted]

SEQ ID NO: 43086 - protein, 72 aa, Homo sapiens
MRQKNRLNPGGGGCGEPRSRHCTPAWRLSDTPSPSPRPKKNLFSGERQGRSFQPDWGRREEFKMACLGALAP

SEQ ID NO: 43087 - protein, 2344 aa, Homo sapiens
MVPRTSHTAAFLSDTKDRGPPVQSQIWRSGEKVPFVQTYSLRAFEKPPQVQTQALRDFEKHLNDLKKENFSLKLRIYFLEERMQQKYEASREDIYKRNIELKVEVESLKRELQDKKQHLDKTWADVENLNSQNEAELRRQFEERQQETEHVYELLENKIQLLQEESRLAKNEAARMAALVEAEKECNLELSEKLKGVTKNWEDVPGDQVKPDQYTEALAQRDKRIEELNQSLAAQERLVEQLSREKQQLLHLLEEPTSMEVQPMTEELLKQQKLNSHETTITQQSVSDSHLAELQEKIQQTEATNKILQEKLNEMSYELKCAQESSQKQDGTIQNLKETLKSRERETEELYQVIEGQNDTMAKLREMLHQSQLGQLHSSEGTSPAQQQVALLDLQSALFCSQLEIQKLQRVVRQKERQLADAKQCVQFVEAAAHESEQQKEASWKHNQELRKALQQLQEELQNKSQQLRAWEAEKYNEIRTQEQNIQHLNHSLSHKEQLLQEFRELLQYRDNSDKTLEANEMLLEKLRQRIHDKAVALERAIDEKFSALEEKEKELRQLRLAVRERDHDLERLRDVLSSNEATMQSMESLLRAKGLEVEQLSTTCQNLQWLKEEMETKFSRWQKEQESIIQQLQTSLHDRNKEVEDLSATLLCKLGPGQSEIAEELCQRLQRKERMLQDLLSDRNKQVLEHEMEIQGLLQSVSTREQESQAAAEKLVQALMERNSELQALRQYLGGRDSLMSQAPISNQQAEVTPTGRLGKQTDQGSMQIPSRDDSTSLTAKEDVSIPRSTLGDLDTVAGLEKELSNAKEELELMAKKERESQMELSALQSMMAVQEEELQVQAADMESLTRNIQIKEDLIKDLQMQLVDPEDIPAMERLTQEVLLLREKVASVESQGQEISGNRRQQLLLMLEGLVDERSRLNEALQAERQLYSSLVKFHAHPESSERDRTLQVELEGAQVLRSRLEEVLGRSLERLNRLETLAAIGGAAAGDDTEDTSTEFTDSIEEEAAHHSHQQLVKVALEKSLATVETQNPSFSPPSPMGGDSNRCLQEEMLHLRAEFHQHLEEKRKAEEELKELKAQIEEAGFSSVSHIRNTMLSLCLENAELKEQMGEAMSDGWEIEEDKEKGEVMVETVVTKEGLSESSLQAEFRKLQGKLKNAHNIINLLKEQLVLSSKEGNSKLTPELLVHLTSTIERINTELVGSPGKHQHQEEGNVTVRPFPRPQSLDLGATFTVDAHQLDNQSQPRDPGPQSAFSLPGSTQHLRSQLSQCKQRYQDLQEKLLLSEATVFAQANELEKYRVMLSESLVKQDSKQIQVDLQDLGYETCGRSENEAEREETTSPECEEHNSLKEMVLMEGLCSEQGRRGSTLASSSERKPLENQLGKQEEFRVYGKSENILVLRKDIKDLKAQLQNANKVIQNLKSRVRSLSVTSDYSSSLERPRKLRAVGTLEGSSPHSVPDEDEGWLSDGTGAFYSPGLQAKKDLESLIQRVSQLEAQLPKNGLEEKLAEELRSASWPGKYDSLIQDQARELSYLRQKIREGRGICYLITRHAKDTVKSFEDLLRSNDIDYYLGQSFREQLAQGSQLTERLTSKLSTKDHKSEKDQAGLEPLALRLSRELQEKEKVIEVLQAKLDARSLTPSSSHALSDSHRSPSSTSFLSDELEACSDMDIVSEYTHYEEKKASPSHSGFHFHSIPKLASLPQAPLPSAPSSFLPFSPTGPLLLGCCETPVVSLAEAQQELQMLQKQLGESASTVPPASTATLLSNDLEADSSYYLNSAQPHSPPRGTIELGRILEPGYLGSSGKWDVMRPQKGSVSGDLSSGSSVYQLNSKPTGADLLEEHLGEIRNLRQRLEESICINDRLREQLEHRLTSTARGRGSTSNFYSQGLESIPQLCNENRVLREDNRRLQAQLSHVSREHSQETESLREALLSSRSHLQELEKELEHQKVERQQLLEDLREKQQEVLHFREERLSLQENDSRLQHKLVLLQQQCEEKQQLFESLQSELQIYEALYGNSKKGLKAYSLDACHQIPLSSDLSHLVAEVRALRGQLEQSIQGNNCLRLQLQQQLESGAGKASLSPSSINQNFPASTDPGNKQLLLQDSAVSPPVRDVGMNSPALVFPSSASSTPGSETPIINRANGLGLDTSPVMKTPPKLEGDATDGSFANKHGRHVIGHIDDYSALRQQIAEGKLLVKKIVSLVRSACSFPGLEAQGTEVLGSKGIHELRSSTSALHHALEESASLLTMFWRAALPSTHIPVLPGKVGESTERELLELRTKVSKQERLLQSTTEHLKNANQQKESMEQFIVSQLTRTHDVLKKARTNLEVKSLRALPCTPAL

SEQ ID NO: 43088 - protein, 1076 aa, Homo sapiens
MLDRIYRFDTVIARIEALSIERLQKLLLEKDRLKFCIASMYRKNNDDSGAEIKAGNGTVDMSVLPDARYSALLQEDFAYSGFECWVENEDQIQEPHSCHGSEGPGNRPRRCRGCAALRVADSDYEAICKVPRKVARSISCGPSSRWSTSICTEEPALSEVGPPDLASTKVPPDGESMEEETPGSSVESLDASVQASPPQQKDEETERSAKELGKCDCCSDDQAPQHGCNHKLELALSMIKGLDYKPIQSPRGSRLPIPVKSSLPGAKPGPSMTDGVSSGFLNRSLKPLYKTPVSYPLELSDLQELWDDLCEDYLPLRVQPMTEELLKQQKLNSHETTITQQSVSDSHLAELQEKIQQTEATNKILQEKLNEMSYELKCAQESSQKQDGTIQNLKETLKSRERETEELYQVIEGQNDTMAKLREMLHQSQLGQLHSSEGTSPAQQQVALLDLQSALFCSQLEIQKLQRVVRQKERQLADAKQCVQFVEAAAHESEQQKEASWKHNQELRKALQQLQEELQNKSQQLRAWEAEKYNEIRTQEQNIQHLNHSLSHKEQLLQEFRELLQYRDNSDKTLEANEMLLEKLRQRIHDKAVALERAIDEKFSALEEKEKELRQLRLAVRERDHDLERLRDVLSSNEATMQSMESLLRAKGLEVEQLSTTCQNLQWLKEEMETKFSRWQKEQESIIQQLQTSLHDRNKEVEDLSATLLCKLGPGQSEIAEELCQRLQRKERMLQDLLSDRNKQVLEHEMEIQGLLQSVSTREQESQAAAEKLVQALMERNSELQALRQYLGGRDSLMSQAPISNQQAEVTPTGRLGKQTDQGSMQIPSRDDSTSLTAKEDVSIPRSTLGDLDTVAGLEKELSNAKEELELMAKKERESQMELSALQSMMAVQEEELQVQAADMESLTRNIQIKEDLIKDLQMQLVDPEDIPAMERLTQEVLLLREKVASVESQGQEISGNRRQQLLLMLEGLVDERSRLNEALQAERQLYSSLVKFHAHPESSERDRTLQVELEGAQVLRSRLEEVLGRSLERLNRLETLAAIGGAAAGDDTEDTSTEFTDSIEEEAAHHSHQQL

SEQ ID NO: 43089 - protein, 514 aa, Homo sapiens
METAEDWETERKKQAARGWRVSTVNERFDVATSLPRYFWVPNRILDSEVRRAFGHFHQGRGPRLSWHHPGGSDLLRCGGFYTASDPNKEDIRAVELMLQAGHSDVVLVDTMDELPSLADVQLAHLRLRALCLPDSSVAEDKWLSALEGTRWLDYVRACLRKASDISVLVTSRVRSVILQERGDRDLNGLLSSLVQLLSAPEARTLFGFQSLVQREWVAAGHPFLTRLGGTGASEEAPVFLLFLDCVWQLLQQFPADFEFSEFFLLALHDSVRVPDTLTFLRNTPWERGKQSGQLNSYTQVYTPGYSQPPAGNSFNLQLSVWDWDLRYSNAQILQFQNPGYDPEHCPDSWLPRPQPSFMVPGPPSSVWLFSRGALTPLNQLCPWRDSPSLLAVSSRWLPRPAISSESLADQEWGLPSHWGACPLPPGLLLPGYLGPQIRLWRRCYLRGRPEVQMGLSAPTISGLQDELSHLQELLRKWTPRISPEDHSKKRDPHTILNPTEIAGILKGRAEGDLG

SEQ ID NO: 43090 - protein, 413 aa, Homo sapiens
MKVLLMDKETTGIVSMVYTQSEILQKEVYLFERIDSQNREIMKHLKAICFLRPTKENVDYIIQELRRPKYTIYFIYFSNVISKSDVKSLAEADEQEVVAEVQQVITKEYELFEFRRTEVPPLLLILDRCDDAITPLLNQWTYQAMVHELLGINNNRIDLSRVPGISKDLREVVLSAENDEFYANNMYLNFAEIGSNIKNLMEDFQKKKPKEQQKLESIADMKAFVENYPQFKKMSGTVSKHVTVVGELSRLVSERNLLEVSEVEQELACQNDHSSALQNIKRLLQNPKVTEFDAARLVMLYALHYERHSSNSLPGLMMDLRNKGVSEKYRKLVSAVVEYGGKRVRGSDLFSPKDAVAITKQFLKGLKGVENVYTQHQPFLHETLDHLIKGRLKENLYPYLGPSTLRDRIASCL

SEQ ID NO: 43091 - protein, 266 aa, Homo sapiens [sequence omitted]

SEQ ID NO: 43092 - protein, 75 aa, Homo sapiens
MVQEGNVESAYRTLNRILTMDGLIEDIKHRRYYEKPCCRRQRESYERCRRIYNMEMARKINFLMRKNRADPWQGC

SEQ ID NO: 43093 - protein, 666 aa, Homo sapiens [sequence omitted]

SEQ ID NO: 43094 - protein, 584 aa, Homo sapiens [sequence omitted]

SEQ ID NO: 43095 - protein, 484 aa, Homo sapiens
MDHPDSSQHGPPFEGQSQVQPPPSQEATPLQQEKLLPAQLPAEKEVGPPLPQEAVPLQKELPSLQHPNEQKEGTPAPFGDQSHPEPESWNAAQHCQQDRSQGGWGHRLDGFPPGRPSPDNLNQICLPNRQHVVYGPWNLPQSSYSHLTRQGETLNFLEIGYSRCCHCRSHTNRLECAKLVWEEAMSRFCEAEFSVKTRPHWCCTRQGEARFSCFQEEAPQPHYQLRACPSHQPDISSGLELPFPPGVPTLDNIKNICHLRRFRSVPRNLPATDPLQRELLALIQLEREFQRCCRQGNNHTCTWKAWEDTLDKYCDREYAVKTHHHLCCRHPPSPTRDECFARRAPYPNYDRDILTIDIGRVTPNLMGHLCGNQRVLTKHKHIPGLIHNMTARCCDLPFPEQACCAEEEKLTFINDLCGPRRNIWRDPALCCYLSPGDEQVNCFNINYLRNVALVSGDTENAKGQGEQGSTGGTNISSTSEPKEE

SEQ ID NO: 43096 - protein, 255 aa, Homo sapiens [sequence omitted]

SEQ ID NO: 43097 - protein, 685 aa, Homo sapiens [sequence omitted]

SEQ ID NO: 43098 - protein, 680 aa, Homo sapiens
MTAYITELSDMVPTCSALARKPDKLTILRMAVSHMKSLRGTGNTSTDGSYKPSFLTDQELKHLILEAADGFLFIVSCETGRVVYVSDSVTPVLNQPQSEWFGSTLYDQVHPDDVDKLREQLSTSENALTGRILDLKTGTVKKEGQQSSMRMCMGSRRSFICRMRCGSSSVDPVSVNRLSFVRNRCRNGLGSVKDGEPHFVVVHCTGYIKAWPPADDDPEAGQGSKFCLVAIGRLQVTSSPNCTDMSNVCQPTEFISRHNIEGIFTFVDHRCVATVGYQPQELLGKNIVEFCHPEDQQLLRDSFQQVVKLKGQVLSVMFRFRSKNQEWLWMRTSSFTFQNPYSDEIEYIICTNTNVKNSSQEPRPTLSNTIQRPQLGPTANLPLEMGSGQLAPRQQQQQTELDMVPGRDGLASYNHSQVVQPVTTTGPEHSKPLEKSDGLFAQDRDPRFSEIYHNINADQSKGISSSTVPATQQLFSQGNTFPPTPRPAENFRNSGLAPPVTIVQPSASAGQMLAQISRHSNPTQGATPTWTPTTRSGFSAQQVATQATAKTRTSQFGVGSFQTPSSFSSMSLPGAPTASPGAAAYPSLTNRGSNFAPETGQTAGQFQTRTAEGVGVWPQWQGQQPHHRSSSSEQHVQQPPAQQPGQPEVFQEMLSMLGDQSNSYNNEEFPDLTMFPPFSE

SEQ ID NO: 43099 - protein, 45 aa, Homo sapiens
MEDYLQGCRAALQESRPLHVVLGNEACDLDSTVSALALAFYLAKD

SEQ ID NO: 43100 - protein, 45 aa, Homo sapiens
MEDYLQGCRAALQESRPLHVVLGNEACDLDSTVSALALAFYLAKK

SEQ ID NO: 43101 - protein, 923 aa, Homo sapiens
MPLLLLLLLLSLPHTQAAFPQDPLPLLISDLQGTSPLSWFRGLEDDAVAAELGLDFQRFLTLNRTLLVAARDHVFSFDLQAEEEGEGLVPNKYLTWRSQDVENCAVRGKLTDECYNYIRVLVPWDSQTLLACGTNSFSPVCRSYGITSLQQEGEELSGQARCPFDATQSNVAIFAEGSLYSATAADFQASDAVVYRSLGPQPPLRSAKYDSKWLREPHFVQALEHGDHVYFFFREVSVEDARLGRVQFSRVARVCKRDMGGSPRALDRHWTSFLKLRLNCSVPGDSTFYFDVLQALTGPVNLHGRSALFGVFTTQTNSIPGSAVCAFYLDEIERGFEGKFKEQRSLDGAWTPVSEDRVPSPRPGSCAGVGGAALFSSSRDLPDDVLTFIKAHPLLDPAVPPVTHQPLLTLTSRALLTQVAVDGMAGPHSNITVMFLGSNDGTVLKVLTPGGRSGGPEPILLEEIDAYSPARCSGKRTAQTARRIIGLELDTEGHRLFVAFSGCIVYLPLSRCARHGACQRSCLASQDPYCGWHSSRGCVDIRGSGGTDVDQAGNQESMEHGDCQDGATGSQSGPGDSAYGVRRDLPPASASRSVPIPLLLASVAAAFALGASVSGLLVSCACRRAHRRRGKDIETPGLPRPLSLRSLARLHGGGPEPPPPSKDGDAVQTPQLYTTFLPPPEGVPPPELACLPTPESTPELPVKHLRAAGDPWEWNQNRNNAKEGPGRSRGGHAAGGPAPRVLVRPPPPGCPGQAVEVTTLEELLRYLHGPQPPRKGAEPPAPLTSRALPPEPAPALLGGPSPRPHECASPLRLDVPPEGRCASAPARPALSAPAPRLGVGGGRRLPFSGHRAPPALLTRVPSGGPSRYSGGPGKHLLYLGRPEGYRGRALKRVDVEKPQLSLKPPLVGPSSRQAVPNGGRFNF

SEQ ID NO: 43102 - protein, 659 aa, Homo sapiens
MAISYLYNSKEPGVQAYIGNRLFCFRNEDVDFYLPQLLNMYIHMDEDVGDAIKPYIVHRCRQSINFSLQCALLLGAYSSDMHISTQRHSRGTKLRKLILSDELKPAHRKRELPSLSPAPDTGLSPSKRTHQRSKSDATASISLSSNLKRTASNPKVENEDEPVRLAPEREFIKSLMAIGKRLATLPTKEQKTQRLISELSLLNHKLPARVWLPTAGFDHHVVRVPHTQAVVLNSKDKAPYLIYVEVLECENFDTTSVPARIPENRIRSTRSVENLPECGITHEQRAGSFSTVPNYDNDDEAWSVDDIGELQVELPEVHTNSCDNISQFSVDSITSQESKEPVFIAAGDIRRRLSEQLAHTPTAFKRDPEDPSAVALKEPWQEKVRRIREGSPYGHLPNWRLLSVIVKCGDDLRQELLAFQVLKQLQSIWEQERVPLWIKPYKILVISADSGMIEPVVNAVSIHQVKKQSQLSLLDYFLQEHGSYTTEAFLSAQRNFVQSCAGYCLVCYLLQVKDRHNGNILLDAEGHIIHIDFGFILSSSPRNLGFETSAFKLTTEFVDVMGGLDGDMFNYYKMLMLQGLIAARKHMDKVVQIVEIMQQGSQLPCFHGSSTIRNLKERFHMSMTEEQLQLLVEQMVDGSMRSITTKLYDGFQYLTNGIM

SEQ ID NO: 43103 - protein, 674 aa, Homo sapiens
MAISYLYNSKEPGVQAYIGNRLFCFRNEDVDFYLPQLLNMYIHMDEDVGDAIKPYIVHRCRQSINFSLQCALLLGAYSSDMHISTQRHSRGTKLRKLILSDELKPAHRKRELPSLSPAPDTGLSPSKRTHQRSKSDATASISLSSNLKRTASNPKVENEDEELSSSTESIDNSFSSPVRLAPEREFIKSLMAIGKRLATLPTKEQKTQRLISELSLLNHKLPARVWLPTAGFDHHVVRVPHTQAVVLNSKDKAPYLIYVEVLECENFDTTSVPARIPENRIRSTRSVENLPECGITHEQRAGSFSTVPNYDNDDEAWSVDDIGELQVELPEVHTNSCDNISQFSVDSITSQESKEPVFIAAGDIRRRLSEQLAHTPTAFKRDPEDPSAVALKEPWQEKVRRIREGSPYGHLPNWRLLSVIVKCGDDLRQELLAFQVLKQLQSIWEQERVPLWIKPYKILVISADSGMIEPVVNAVSIHQVKKQSQLSLLDYFLQEHGSYTTEAFLSAQRNFVQSCAGYCLVCYLLQVKDRHNGNILLDAEGHIIHIDFGFILSSSPRNLGFETSAFKLTTEFVDVMGGLDGDMFNYYKMLMLQGLIAARKHMDKVVQIVEIMQQGSQLPCFHGSSTIRNLKERFHMSMTEEQLQLLVEQMVDGSMRSITTKLYDGFQYLTNGIM

SEQ ID NO: 43104 - protein, 369 aa, Homo sapiens
MWWTWALSPGPQSCTRHVIEPKDIHAKCELAFLHTSHCLASGEVMISSLGDVKGNGKGGFVLLDGETFEVKGTWERPGGAAPLGYDFWYQPRHNVMISTEWAAPNVLRDGFNPADVEAGLYGSHLYVWDWQRHEIVQTLSLKDGLIPLEIRFLHNPDAAQGFVGCALSSTIQRFYKNEGGTWSVEKVIQVPPKKVKGWLLPEMPGLITDILLSLDDRFLYFSNWLHGDLRQYDISDPQRPRLTGQLFLGGSIVKGGPVQVLEDEELKSQPEPLVVKGKRVAGGPQMIQLSLDGKRLYITTSLYSAWDKQFYPDLIREGSVMLQVDVDTVKGGLKLNPNFLVDFGKEPLGPALAHELRYPGGDCSSDIWI

SEQ ID NO: 43105 - protein, 1244 aa, Homo sapiens
MNQVGIVLNVQQGQTVRPITLVPAPGTQFVKPTVGVPQVFSQMTPVRPGSTMPVRPTTNTFTTVIPATLTIRSTVPQSQSQQTKSTPSTSTTPTATQPTSLGQLAVQSPGQSNQTTNPKLAPSFPSPPAVSIASFVTVKRPGVTGENSNEVAKLVNTLNTIPSLGQSPGPVVVSNNSSAHGSQRTSGPESSMKVTSSIPVFDLQDGGRKICPRCNAQFRVTEALRGHMCYCCPEMVEYQKKGKSLDSEPSVPSAAKPPSPEKTAPVASTPSSTPIPALSPPTKVPEPNENVGDAVQTKLIMLVDDFYYGRDGGKVAQLTNFPKVATSFRCPHCTKRLKNNIRFMNHMKHHVELDQQNGEVDGHTICQHCYRQFSTPFQLQCHLENVHSPYESTTKCKICEWAFESEPLFLQHMKDTHKPGEMPYVCQVCQYRSSLYSEVDVHFRMIHEDTRHLLCPYCLKVFKNGNAFQQHYMRHQKRNVYHCNKCRLQFLFAKDKIEHKLQHHKTFRKPKQLEGLKPGTKVTIRASRGQPRTVPVSSNDTPPSALQEAAPLTSSMDPLPVFLYPPVQRSIQKRAVRKMSVMGRQTCLECSFEIPDFPNHFPTYVHCSLCRYSTCCSRAYANHMINNHVPRKSPKYLALFKNSVSGIKLACTSCTFVTSVGDAMAKHLVFNPSHRSSSILPRGLTWIAHSRHGQTRDRVHDRNVKNMYPPPSFPTNKAATVKSAGATPAEPEELLTPLAPALPSPASTATPPPTPTHPQALALPPLATEGAECLNVDDQDEGSPVTQEPELASGGGGSGGVGKKEQLSVKKLRVVLFALCCNTEQAAEHFRNPQRRIRRWLRRFQASQGENLEGKYLSFEAEEKLAEWVLTQREQQLPVNEETLFQKATKIGRSLEGGFKISYEWAVRFMLRHHLTPHARRAVAHTLPKDVAENAGLFIDFVQRQIHNQDLPLSMIVAIDEISLFLDTEVLSSDDRKENALQTVGTGEPWCDVVLAILADGTVLPTLVFYRGQMDQPANMPDSILLEAKESGYSDDEIMELWSTRVWQKHTACQRSKGMLVMDCHRTHLSEEVLAMLSASSTLPAVVPAGCSSKIQPLDVCIKRTVKNFLHKKWKEQAREMADTACDSDVLLQLVLVWLGEVLGVIGDCPELVQRSFLVASVLPGPDGNINSPTRNADMQEELIASLEEQLKLSGEHSESSTPRPRSSPEETIEPESLHQLFEGESETESFYGFEEADLDLMEI

SEQ ID NO: 43106 - protein, 1235 aa, Homo sapiens
MNQVGIVLNVQQGQTVRPITLVPAPGTQFVKPTVGVPQVFSQMTPVRPGSTMPVRPTTNTFTTVIPATLTIRSTVPQSQSQQTKSTPSTSTTPTATQPTSLGQLAVQSPGQSNQTTNPKLVSIASFVTVKRPGVTGENSNEVAKLVNTLNTIPSLGQSPGPVVVSNNSSAHGSQRTSGPESSMKVTSSIPVFDLQDGGRKICPRCNAQFRVTEALRGHMCYCCPEMVEYQKKGKSLDSEPSVPSAAKPPSPEKTAPVASTPSSTPIPALSPPTKVPEPNENVGDAVQTKLIMLVDDFYYGRDGGKVAQLTNFPKVATSFRCPHCTKRLKNNIRFMNHMKHHVELDQQNGEVDGHTICQHCYRQFSTPFQLQCHLENVHSPYESTTKCKICEWAFESEPLFLQHMKDTHKPGEMPYVCQVCQYRSSLYSEVDVHFRMIHEDTRHLLCPYCLKVFKNGNAFQQHYMRHQKRNVYHCNKCRLQFLFAKDKIEHKLQHHKTFRKPKQLEGLKPGTKVTIRASRGQPRTVPVSSNDTPPSALQEAAPLTSSMDPLPVFLYPPVQRSIQKRAVRKMSVMGRQTCLECSFEIPDFPNHFPTYVHCSLCRYSTCCSRAYANHMINNHVPRKSPKYLALFKNSVSGIKLACTSCTFVTSVGDAMAKHLVFNPSHRSSSILPRGLTWIAHSRHGQTRDRVHDRNVKNMYPPPSFPTNKAATVKSAGATPAEPEELLTPLAPALPSPASTATPPPTPTHPQALALPPLATEGAECLNVDDQDEGSPVTQEPELASGGGGSGGVGKKEQLSVKKLRVVLFALCCNTEQAAEHFRNPQRRIRRWLRRFQASQGENLEGKYLSFEAEEKLAEWVLTQREQQLPVNEETLFQKATKIGRSLEGGFKISYEWAVRFMLRHHLTPHARRAVAHTLPKDVAENAGLFIDFVQRQIHNQDLPLSMIVAIDEISLFLDTEVLSSDDRKENALQTVGTGEPWCDVVLAILADGTVLPTLVFYRGQMDQPANMPDSILLEAKESGYSDDEIMELWSTRVWQKHTACQRSKGMLVMDCHRTHLSEEVLAMLSASSTLPAVVPAGCSSKIQPLDVCIKRTVKNFLHKKWKEQAREMADTACDSDVLLQLVLVWLGEVLGVIGDCPELVQRSFLVASVLPGPDGNINSPTRNADMQEELIASLEEQLKLSGEHSESSTPRPRSSPEETIEPESLHQLFEGESETESFYGFEEADLDLMEI

SEQ ID NO: 43107 - protein, 92 aa, Homo sapiens [sequence omitted]

SEQ ID NO: 43108 - protein, 56 aa, Homo sapiens
MACPLEKALDVMVSTFHKYSGKEGDKFKLNKSELKELLTRELPSFLGPLLPPEKDR

SEQ ID NO: 43109 - protein, 300 aa, Homo sapiens
MAPGLLHAYPPQVYGYDDLQMLQTRFPLDYYSIPFPTPTTPLTGRDGSLASNPYSGDLTKFGRGDASSPAPATTLAQPQQNQTQTHHTTQQTFLNPALPPGYSYTSLPYYTGVPGLPSTFQYGPAVFPVAPTSSKQHGVNVSVNASATPFQQPSGYGSHGYNTGVSVTSSNTGVPDISGSVYSKTQQSFEKQGFHSGTPAASFNLPSALGSGGPINPATAAAYPPAPFMHILTPHQQPHSQILHHHLQQDGQLPYLQMILCCQRQQEEQTGSGQRSQTSSIPQKPQTNKSAYNSYSWGAN

SEQ ID NO: 43110 - protein, 34 aa, Homo sapiens
MTSRASELSPGRSVTAGIIIVGDEILKLETTNGF

SEQ ID NO: 43111 - protein, 126 aa, Homo sapiens
MKGLFQNPAVQFHSKELYVAADEASIAPILAEAQAHFGRRLGLGSYPDWGSNYYQVKLTLDSEEEGPLEECLAYLTARLPQGSLVPYMPNAVEQASEAVYKLAESGRDLMEEGHYAQSHWWHPRSQ

SEQ ID NO: 43112 - protein, 809 aa, Homo sapiens
MRLALLWALGLLGAGSPLPSWPLPNIALLSIPSVLSWGVLGPAGGTEEQQAESEKAPREPLEPQVLQDDLPISLKKVLQTSLPEPLRIKLELDGDSHILELLQNRELVPGRPTLVWYQPDGTRVVSEGHTLENCCYQGRVRGYAGSWVSICTCSGLRGLVVLTPERSYTLEQGPGDLQGPPIISRIQDLHLPGHTCALSWRESVHTQKPPEHPLGQRHIRRRRDVVTETKTVELVIVADHSEAQKYRDFQHLLNRTLEVALLLDTFFRPLNVRVALVGLEAWTQRDLVEISPNPAVTLENFLHWRRAHLLPRLPHDSAQLVTGTSFSGPTVGMAIQNSICSPDFSGGVNMDHSTSILGVASSIAHELGHSLGLDHDLPGNSCPCPGPAPAKTCIMEASTDFLPGLNFSNCSRRALEKALLDGMGSCLFERLPSLPPMAAFCGNMFVEPGEQCDCGFLDDCVDPCCDSLTCQLRPGAQCASDGPCCQNCQLRPSGWQCRPTRGDCDLPEFCPGDSSQCPPDVSLGDGEPCAGGQAVCMHGRCASYAQQCQSLWGPGAQPAAPLCLQTANTRGNAFGSCGRNPSGSYVSCTPRDAICGQLQCQTGRTQPLLGSIRDLLWETIDVNGTELNCSWVHLDLGSDVAQPLLTLPGTACGPGLVCIDHRCQRVDLLGAQECRSKCHGHGVCDSNRHCYCEEGWAPPDCTTQLKATSSLTTGLLLSLLVLLVLVMLGASYWYRARLHQRLCQLKGPTCQYRAAQSGPSERPGPPQRALLARGTKQASALSFPAPPSRPLPPDPVSKRLQVNLGQGPP

SEQ ID NO: 43113 - protein, 52 aa, Homo sapiens
MYLSPLADLAKVIQTKSTQCLSYPLTIATLLTSASWCLYGFRLRDPYIMQFL

SEQ ID NO: 43114 - protein, 777 aa, Homo sapiens
MQGFVESMKIILGGSMARVGALSECPFQGDESIHSAVTNALHSILGEQTKALVTQLTLFNQILVELRDDIRDQVKEMSLIRNTIMECQVCGFHEQRSHCSPNPCFRGVDCMEVYEYPGYRCGPCPPGLQGNGTHCSDINECAHADPCFPGSSCINTMPGFHCEACPRGYKGTQVSGVGIDYARASKQVCNDIDECNDGNNGGCDPNSICTNTVGSFKCGPCRLGFLGNQSQGCLPARTCHSPAHSPCHIHAHCLFERNGAVSCQCNVGWAGNGNVCGTDTDIDGYPDQALPCMDNNKHCKQDNCLLTPNSGQEDADNDGVGDQCDDDADGDGIKNVEDNCRLFPNKDQQNSDTDSFGDACDNCPNVPNNDQKDTDGNGEGDACDNDVDGDGIPNGLDNCPKVPNPLQTDRDEDGVGDACDSCPEMSNPTQTDADSDLVGDVCDTNEDSDGDGHQDTKDNCPQLPNSSQLDSDNDGLGDECDGDDDNDGIPDYVPPGPDNCRLVPNPNQKDSDGNGVGDVCEDDFDNDAVVDPLDVCPESAEVTLTDFRAYQTVVLDPEGDAQIDPNWVVLNQGMEIVQTMNSDPGLAVGYTAFNGVDFEGTFHVNTVTDDDYAGFLFSYQDSGRFYVVMWKQTEQTYWQATPFRAVAQPGLQLKAVTSVSGPGEHLRNALWHTGHTPDQVRLLWTDPRNVGWRDKTSYRWQLLHRPQVGYIRVKLYEGPQLVADSGVIIDTSMRGGRLGVFCFSQENIIWSNLQYRCNDTVPEDFEPFRRQLLQGRV

SEQ ID NO: 43115 - protein, 299 aa, Homo sapiens
MVRKPALELLHYLKNTSFAYPAIRYLLYGEKGTGKTLSLCHVIHFCAKQDWLILHIPDAHLWVKNCRDLLQSSYNKQRFDQPLEASTWLKNFKTTNERFLNQIKVQEKYVWNKRESTEKGSPLGEVVEQGITRVRNATDAVGIVLKELKRQSSLGMFHLLVAVDGINALWGRTTLKREDKSPIAPEELALVHNLRKMMKNDWHGGAIVSALSQTGSLFKPRKAYLPQELLGKEGFDALDPFIPILVSNYNPKEFESCIQYYLENNWLQHEKAPTEEGKKELLFLSNANPSLLERHCAYL

SEQ ID NO: 43116 - protein, 546 aa, Homo sapiens
MLMAKGKLKPTQNASEKLQAPGKGLTSNKSKDDLVVAEVEINDVPLTCRNLLTRGQTQDEISRLSGAAVSTRGRFMTTEEKAKVGPGDRPLYLHVQGQTRELVDRAVNRIKEIITNGVVKAATGTSPTFNGATVTVYHQPAPIAQLSPAVSQKPPFQSGMHYVQDKLFVGLEHAVPTFNVKEKVEGPGCSYLQHIQIETGAKVFLRGKGSGCIEPASGREAFEPMYIYISHPKPEGLAAAKKLCENLLQTVHAEYSRFVNQINTAVPLPGYTQPSAISSVPPQPPYYPSNGYQSGYPVVPPPQQPVQPPYGVPSIVPPAVSLAPGVLPALPTGVPPVPTQYPITQVQPPASTGQSPMGGPFIPAAPVKTALPAGPQPQPQPQPPLPSQPQAQKRRFTEELPDERESGLLGYQHGPIHMTNLGTGFSSQNEIEGAGSKPASSSGKERERDRQLMPPPAFPVTGIKTESDERNGSGTLTGSHDYPAKKMKTTEKGFGLVAYAADSSDEEEEHGGHKNASSFPQGWSLGYQYPSSQPRAKQQMPFWMAP

SEQ ID NO: 43117 - protein, 971 aa, Homo sapiens [sequence omitted]

SEQ ID NO: 43118 - protein, 177 aa, Homo sapiens
MMQRKGEKMGRFQVRGNPEGQGVVAFGQTKDIIRQILQADGLRGFYRGYVASLLTYIPNSAVWWPFYHFYAEQLSYLCPKECPHIVFQAVSGPLAAATASILTNPMDVIRTRVQVEGKNSIILTFRQLMAEEGPWGLMKGLSARIISATPSTIVIVVGYESLKKLSLRPELVDSRHW

SEQ ID NO: 43119 - protein, 499 aa, Homo sapiens [sequence omitted]

SEQ ID NO: 43120 - protein, 506 aa, Homo sapiens
MGHRPVLVLSQNTKRESGRKVQSGNINAAKIQVQHPAAKSMIEISRTQDEEVGDGTTSVIILAGEMLSVAEHFLEQQMHPTVVISAYRKALDDMISTLKKISIPVDISDSDMMLNIINSSITTKAISRWSSLACNIALDAVKMVQFEENGRKEIDIKKYARVEKIPGGIIEDSCVLRGVMINKDVTHPRMRRYIKNPRIVLLDSSLEYKKGESQTDIEITREEDFTRILQMEEEYIQQLCEDIIQLKPDVVITEKGISDLAQHYLMRANITAIRRVRKTDNNRIARACGARIVSRPEELREDDVGTGAGLLEIKKIGDEYFTFITDCKDPKACTILLRGASKEILSEVERNLQDAMQVCRNVLLDPQLVPGGGASEMAVAHALTEKSKAMTGVEQWPYRAVAQALEVIPRTLIQNCGASTIRLLTSLRAKHTQENCETWGVNGETGTLVDMKELGIWEPLAVKLQTYKTAVETAVLLLRIDDIVSGHKKKGDDQSRQGGAPDAGQE

SEQ ID NO: 43121 - protein, 1617 aa, Homo sapiens
MGEESFQMWELNRRLEAYLARVKALEEQNELLSAELGGLRAQSADTSWRAHADDELAALRALVDQRWREKHAAEVARDNLAEELEGVAGRCQQLRLARERTTEEVARNRRAVEAEKCARAWLSSQVAELERELEALRVAHEEERVGLNAQAACAPRCPAPPRGPPAPAPEVEELARRLGEAWRGAVRGYQERVAHMETSLGQARERLGRAVQGAREGRLELQQLQAERGGLLERRAALEQRLEGRWQERLRATEKFQLAVEALEQEKQGLQSQIAQVLEGRQQLAHLKMSLSLEVATYRTLLEAENSRLQTPGGGSKTSLSFQDPKLELQFPRTPEGRRLGSLLPVLSPTSLPSPLPATLETPVPAFLKNQEFLQARTPTLASTPIPPTPQAPSPAVDAEIRAQDAPLSLLQTQGGRKQAPEPLRAEARVAIPASVLPGPEEPGGQRQEASTGQSPEDHASLAPPLSPDHSSLEAKDGESGGSRVFSICRGEGEGQIWGLVEKETAIEGKVVSSLQQEIWEEEDLNRKEIQDSQVPLEKETLKSLGEEIQESLKTLENQSHETLERENQECPRSLEEDLETLKSLEKENKELLKDVEVVRPLEKEAVGQLKPTGKEDTQTLQSLQKENQELMKSLEGNLETFLFPGTENQELVSSLQENLESLTALEKENQEPLRSPEVGDEEALRPLTKENQEPLRSLEDENKEAFRSLEKENQEPLKTLEEEDQSIVRPLETENHKSLRSLEEQDQETLRTLEKETQQRRRSLGEQDQMTLRPPEKVDLEPLKSLDQEIARPLENENQEFLKSLKEESVEAVKSLETEILESLKSAGQENLETLKSPETQAPLWTPEEINQGAMNPLEKEIQEPLESVEVNQETFRLLEEENQESLRSLGAWNLENLRSPEEVDKESQRNLEEEENLGKGEYQESLRSLEEEGQELPQSADVQRWEDTVEKDQELAQESPPGMAGVENEDEAELNLREQDGFTGKEEVVEQGELNATEEVWIPGEGHPESPEPKEQRGLVEGASVKGGAEGLQDPEGQSQQVGAPGLQAPQGLPEAIEPLVEDDVAPGGDQASPEVMLGSEPAMGESAAGAEPGPGQGVGGLGDPGHLTREEVMEPPLEEESLEAKRVQGLEGPRKDLEEAGGLGTEFSELPGKSRDPWEPPREGREESEAEAPRGAEEAFPAETLGHTGSDAPSPWPLGSEEAEEDVPPVLVSPSPTYTPILEDAPGPQPQAEGSQEASWGVQGRAEALGKVESEQEELGSGEIPEGPQEEGEESREESEEDELGETLPDSTPLGFYLRSPTSPRWDPTGEQRPPPQGETGKEGWDPAVLASEGLEAPPSEKEEGEEGEEECGRDSDLSEEFEDLGTEAPFLPGVPGEVAEPLGQVPQLLLDPAAWDRDGESDGFADEEESGEEGEEDQEEGREPGAGRWGPGSSVGSLQALSSSQRGEFLESDSVSVSVPWDDSLRGAVAGAPKTALETESQDSAEPSGSEEESDPVSLEREDKVPGPLEIPSGMEDAGPGADIIGVNGQGPNLEGKSQHVNGGVMNGLEQSEEVGQGMPLVSEGDRGSPFQEEEGSALKTSWAGAPVHLGQGQFLKFTQREGDRESWSSGED

SEQ ID NO: 43122 - protein, 111 aa, Homo sapiens [sequence omitted]

SEQ ID NO: 43123 - protein, 409 aa, Homo sapiens
MLLGMPGEGEVVRYRSVWPLTLLALKSTACALAFTRMPGFQTPSEFLENPSQSSRLTAPFRKHVRPKKQHEIRRLGELVKKLSDFTGCTQVVDVGSGQGHLSRFMALGLGLMVKSIEGDQRLVERAQRLDQELLQALEKEEKRNPQVVQTSPRHSPHHVVRWVDPTALCEELLLPLENPCQGRARLLLTGLHACGDLSVALLRHFSCCPEVVALASVGCCYMKLSDPGGYPLSQWVAGLPGYELPYRLREGACHALEEYAERLQKAGPGLRTHCYRAALETVIRRARPELRRPGVQGIPRVHELKIEEYVQRGLQRVGLDPQLPLNLAALQAHVAQENRVVAFFSLALLLAPLVETLILLDRLLYLQEQGFHAELLPIFSPELSPRNLVLVATKMPLGQALSVLETEDS

SEQ ID NO: 43124 - protein, 221 aa, Homo sapiens [sequence omitted]

SEQ ID NO: 43125 - protein, 435 aa, Homo sapiens
MLAPAFPPPLLLPPPTGDPRLQPPPPLPFGLGGFPPPPGVSPAEAAGVGEGLGLGLPSPRGPGLNLPPPIGGAGPPLGLPKPKKRKEPVKIAAPELHKGDSDSEEDEPTKKKTILQGSSEGTGLSALLPQPKNLTVKETNRLLLPHAFSRKPSDGSPDTKPSRLASKTKTSSLAPVVGTTTTTPSPSAIKAAAKSAALQVTKQITQEEDDSDEEVAPENFFSLPEKAEPPGVEPYPYPIPTVPEELPPGTEPEPAFQDDAANAPLEFKMAAGSSGAPWMPKPGDDYSYNQFSTYGDANAAGAYYQDYYSGGYYPAQDPALVPPQEIAPDASFIDDEAFKRLQGKRNRGREEINFVEIKGDDQLSGAQQWMTKSLTEEKTMKSFSKKKGEQPTGQQRRKHQITYLIHQAKERELELKNTWSENKLSRRQTQAKYGF

SEQ ID NO: 43126 - protein, 209 aa, Homo sapiens
MKELAEEEPHLVEQFQKLSEAAGRVGSDMTSQQEFTSCLKETLSGLAKNATDLQNSSMSEEELTKAMEGLGMDEGDGEGNILPIMQSIMQNLLSKDVLYPSLKEITEKYPEWLQSHRESLPPEQFEKYQEQHSVMCKICEQFEAETPTDSETTQKARFEMVLDLMQQLQDLGHPPKELAGEMPPGLNFDLDALNLSGPPGASGEQCLIM

SEQ ID NO: 43127 - protein, 615 aa, Homo sapiens [sequence omitted]

SEQ ID NO: 43128 - protein, 59 aa, Homo sapiens
MYRGGKICLTDHFKPLWARNVPKFGLAHLMALGLGPWLAVEIPDLIQKGVIQHKEKCNQ

SEQ ID NO: 43129 - protein, 645 aa, Homo sapiens
MCNVKAPLGSPSPRPRRAKRFASLSRFVETLVVADDKMAAFHGAGLKRYLLTVMAAAAKAFKHPSIRNPVSLVVTRLVILGSGEEGPQVGPSAAQTLRSFCAWQRGLNTPEDSDPDHFDTAILFTRQDLCGVSTCDTLGMADVGTVCDPARSCAIVEDDGLQSAFTAAHELGHVFNMLHDNSKPCISLNGPLSTSRHVMAPVMAHVDPEEPWSPCSARFITDFLDNGYGHCLLDKPEAPLHLPVTFPGKDYDADRQCQLTFGPDSRHCPQLPPPCAALWCSGHLNGHAMCQTKHSPWADGTPCGPAQACMGGRCLHMDQLQDFNIPQAGGWGPWGPWGDCSRTCGGGVQFSSRDCTRPVPRNGGKYCEGRRTRFRSCNTEDCPTGSALTFREEQCAAYNHRTDLFKSFPGPMDWVPRYTGVAPQDQCKLTCQAQALGYYYVLEPRVVDGTPCSPDSSSVCVQGRCIHAGCDRIIGSKKKFDKCMVCGGDGSGCSKQSGSFRKFRYGYNNVVTIPAGATHILVRQQGNPGHRSIYLALKLPDGSYALNGEYTLMPSPTDVVLPGAVSLRYSGATAASETLSGHGPLAQPLTLQVLVAGNPQDTRLRYSFFVPRPTPSTPRPTPQDWLHRRAQILEILRRRPWAGRK

SEQ ID NO: 43130 - protein, 264 aa, Homo sapiens [sequence omitted]

SEQ ID NO: 43131 - protein, 111 aa, Homo sapiens [sequence omitted]

SEQ ID NO: 43132 - protein, 726 aa, Homo sapiens
MNSTQTNGLDFQKQPVPVGGAISTAQAQAFLGHLHQVQLAGTSLQAAAQSLNVQSKSNEESGDSQQPSQPSQQPSVQAAIPQTQLMLAGGQITGLTLTPAQQQLLLQQAQAQAQLLAAAVQQHSASQQHSAAGATISASAATPMTQIPLSQPIQIAQDLQQLQQLQQQNLNLQQFVLVHPTTNLQPAQFIISQTPQGQQGLLQAQNLLTQLPQQSQANLLQSQPSITLTSQPATPTRTIAATPIQTLPQSQSTPKRIDTPSLEEPSDLEELEQFAKTFKQRRIKLGFTQGDVGLAMGKLYGNDFSQTTISRFEALNLSFKNMCKLKPLLEKWLNDAENLSSDSSLSSPSALNSPGIEGLSRRRKKRTSIETNIRVALEKSFLENQKPTSEEITMIADQLNMEKEVIRVWFCNRRQKEKRINPPSSGGTSSSPIKAIFPSPTSLVATTPSLVTSSAATTLTVSPVLPLTSAAVTNLSVTGTSDTTSNNTATVISTAPPASSAVTSPSLSPSPSASASTSEASSASETSTTQTTSTPLSSPLGTSQVMVTASGLQTAAAAALQGAAQLPANASLAAMAAAAGLNPSLMAPSQFAAGGALLSLNPGTLSGALSPALMSNSTLATIQALASGGSLPITSLDATGNLVFANAGGAPNIVTAPLFLNPQNLSLLTSNPVSLVSAAAASAGNSAPVASLHATSTSAESIQNSLFTVASASGAASTTTTASKAQ

SEQ ID NO: 43133 - protein, 145 aa, Homo sapiens
MQFIHNGTYICDVKNPPDIVVQPGHIRLYVVEKENLPVFPVWVVVGIVTAVVLGLTLLISMILAVLYRRKNSKRDYTGCSTSESLSPVKQAPRKSPSDTEGLVKSLPSGSHQGPVIYAQLDHSGGHHSDKINKSESVVYADIRKN

SEQ ID NO: 43134 - protein, 307 aa, Homo sapiens [sequence omitted]

SEQ ID NO: 43135 - protein, 848 aa, Homo sapiens
MNHLTLEQTFFSQVLPKTVKLFDDMMYELTSQARGLSSQNLEIQTTLRNILQTMVQLLGALTGCVQHICATQESIILENIQSLPSSVLHIIKSTFVHCKNSESVYSGCLHLVSDLLQALFKEAYSLQKQLMELLDMVCMDPLVDDNDDILNMVIVIHSLLDICSVISSMDHAFHANTWKFIIKQSLKHQSIIKSQLKHKDIITSLCEDILFSFHSCLQLAEQMTQSDAQDNADYRLFQKTLKLCRFFANSLLHYAKEFLPFLSDSCCTLHQLYLQIHSKFPPSLYATRISKAHQEEIAGAFLVTLDPLISQLLTFQPFMQVVLDSKLDLPCELQFPQCLLLVVVMDKLPSQPKEVQTLWCTDSQVSETTTRISLLKAVFYSFEQCSGELSLPVHLQGLKSKGKAEVAVTLYQHVCVHLCTFITSFHPSLFAELDAALLNAVLSANMITSLLAMDAWCFLARYGTAELCAHHVTIVAHLIKSCPGECYQLINLSILLKRLFFFMAPPHQLEFIQKFSPKEAENLPLWQHISFQALPPELREQTVHEVTTVGTAECRKWLSRSRTLGELESLNTVLSALLAVCNSAGEALDTGKQTAIIEVVSQLWAFLNIKQVADQPYVQQTFSLLLPLLGFFIQTLDPKLILQAVTLQTSLLKLELPDYVRLAMLDFVSSLGKLFIPEAIQDRILPNLSCMFALLLADRSWLLEQHTLEAFTQFAEGTNHEEIVPQCLSSEETKNKVVSFLEKTGFVDETEAAKVERVKQEKGIFWEPFANVTVEEAKRSSLQPYAKRARQEFPWEEEYRSALHTIAGALEATESLLQKGPAPAWLSMEMEALQERMDKLKRYIHTLG

SEQ ID NO: 43136 - protein, 187 aa, Homo sapiens [sequence omitted]

SEQ ID NO: 43137 - protein, 470 aa, Homo sapiens
MSCFSDFPMPEDFPNFLHNSKLLEYFRIFAKKFDLLKYIQFQTTVLSVRKCPDFSSSGQWKVVTQSNGKEQSAVFDAVMVCSGHHILPHIPLKSFPGMERFKGQYFHSRQYKHPDGFEGKRILVIGMGNSGSDIAVELSKNAAQVFISTRHGTWVMSRISEDGYPWDSVFHTRFRSMLRNVLPRTAVKWMIEQQMNRWFNHENYGLEPQNKYIMKEPVLNDDVPSRLLCGAIKVKSTVKELTETSAIFEDGTVEENIDVIIFATGYSFSFPFLEDSLVKVENNMVSLYKYIFPAHLDKSTLACIGLIQPLGSIFPTAELQARWVTRVFKGLCSLPSERTMMMDIIKRNEKRIDLFGESQSQTLQTNYVDYLDELALEIGAKPDFCSLLFKDPKLAVRLYFGPCNSYQYRLVGPGQWEGARNAIFTQKQRILKPLKTRALKDSSNFSVSFLLKILGLLAVVVAFFCQLQWS

SEQ ID NO: 43138 - protein, 2574 aa, Homo sapiens
MMPPYMFQQYPRMTYPPLHGPMRFPPSLSETNKGLRGRGPPPSWASEPERPSILSASELKELDKFDNLDAEADEGWAGAQMEVDYTEQLNFSDDDEQGSNSPKENNSEDQGSKASENNENKKETDEVSNTKSSSQIPAQPSVAKVPYGKGPSFNQERGTSSHLPPPPKLLAQQHPPPDRQAVPGRPGPFPSKQQVADEDEIWKQRRRQQSEISAAVERARKRREEEERRMEEQRKAACAEKLKRLDEKLGILEKQPSPEEIREREREKEREREKELEKEQEQEREKEREKDRERQQEKEKELEKEQEKQREMEKERKQEKEKELERQKEKEKELQKMKEQEKECELEKEREKLEEKIEPREPNLEPMVEKQESENSCNKEEEPVFTRQDSNRSEKEATPVVHETEPESGSQPRPAVLSGYFKQFQKSLPPRFQRQQEQMKQQQWQQQQQQGVLPQTVPSQPSSSTVPPPPHRPLYQPMQPHPQHLASMGFDPRWLMMQSYMDPRMMSGRPAMDIPPIHPGMIPPKPLMRRDQMEGSPNSSESFEHIARSARDHAISLSEPRMLWGSDPYPHAEPQQATTPKATEEPEDVRSEAALDQEQITAAYSVEHNQLEAHPKADFIRESSEAQVQKFLSRSVEDVRPHHTDANNQSACFEAPDQKTLSAPQEERISAVESQPSRKRSVSHGSNHTQKPDEQRSEPSAGIPKVTSRCIDSKEPIERPEEKPKKEGFIRSSEGPKPEKVYKSKSETRWGPRPSSNRREEVNDRPVRRSGPIKKPVLRDMKEEREQRKEKEGEKAEKVTEKVVVKPEKTEKKDLPPPPPPPQPPAPIQPQSVPPPIQPEAEKFPSTETATLAQKPSQDTEKPLEPVSTVQVEPAVKTVNQQTMAAPVVKEEKQPEKVISKDLVIERPRPDSRPAVKKESTLPPRTYWKEARERDWFPDQGYRGRGRGEYYSRGRSYRGSYGGRGRGGRGHTRDYPQYRDNKPRAEHIPSGPLRQREESETRSESSDFEVVPKRRRQRGSETDTDSEIHESASDKDSLSKGKLPKREERPENKKPVKPHSSFKPDNHVRIDNRLLEKPYVRDDDKAKPGFLPKGEPTRRGRGGTFRRGGRDPGGRPSRPSTLRRPAYRDNQWNPRQSEVPKPEDGEPPRRHEQFIPIAADKRPPKFERKFDPARERPRRQRPTRPPRQDKPPRFRRLREREAASKSNEVVAVPTNGTVNNVAQEPVNTLGDISGNKTPDLSNQNSSDQANEEWETASESSDFNERRERDEKKNADLNAQTVVKVGENVLPPKREIAKRSFSSQRPVDRQNRRGNNGPPKSGRNFSGPRNERRSGPPSKSGKRGPFDDQPAGTTGVDLINGSSAHHQEGVPNGTGQKNSKDSTGKKREDPKPGPKKPKEKVDALSQFDLNNYASVVIIDDHPEVTVIEDPQSNLNDDGFTEVVSKKQQKRLQDEERRKKEEQVIQVWNKKNANEKGRSQTSKLPPRFAKKQATGIQQAQSSASVPPLASAPLPPSTSASVPASTSAPLPATLTPVPASTSAPVPASTLAPVLASTSAPVPASPLAPVSASASVSASVPASTSAAAITSSSAPASAPAPTPILASVSTPASVTILASASIPILASALASTSAPTPAPAASSPAAPVITAPTIPASAPTASVPLAPASASAPAPAPTPVSAPNPAPPAPAQTQAQTHKPVQNPLQTTSQSSKQPPPSIRLPSAQTPNGTDYVASGKSIQTPQSHGTLTAELWDNKVAPPAVLNDISKKLGPISPPQPPSVSAWNKPLTSFGSAPSSEGAKNGQESGLEIGTDTIQFGAPASNGNENEVVPVLSEKSADKIPEPKEQRQKQPRAGPIKAQKLPDLSPVENKEHKPGPIGKERSLKNRKVKDAQQVEPEGQEKPSPATVRSTDPVTTKETKAVSEMSTEIGTMISVSSAEYGTNAKESVTDYTTPSSSLPNTVATNNTKMEDTLVNNVPLPNTLPLPKRETIQQSSSLTSVPPTTFSLTFKMESARKAWENSPNVREKGSPVTSTAPPIATGVSSSASGPSTANYNSFSSASMPQIPVASVTPTASLSGAGTYTTSSLSTKSTTTSDPPNICKVKPQQLQTSSLPSASHFSQLSCMPSLIAQQQQNPQVYVSQSAAAQIPAFYMDTSHLFNTQHARLAPPSLAQQQGFQPGLSQPTSVQQIPIPIYAPLQGQHQAQLSLGAGPAVSQAQELFSSSLQPYRSQPAFMQSSLSQPSVVLSGTAIHNFPTVQHQELAKAQSGLAFQQTSNTQPIPILYEHQLGQASGLGGSQLIDTHLLQARANLTQASNLYSGQVQQPGQTNFYNTAQSPSALQQVTVPLPASQLSLPNFGSTGQPLIALPQTLQPPLQHTTPQAQAQSLSRPAQVSQPFRGLIPAGTQHSMIATTGKMSEMELKAFGSGIDIKPGTPPIAGRSTTPTSSPFRATSTSPNSQSSKMNSIVYQKQFQSAPATVRMTQPFPTQFAPQAKQRAEVLQSTQRFFSEQQQSKQIGGGKAQKVDSDSSKPPETLTDPPGVCQEKVEEKPPPAPSIATKPVRTGPIKPQAIKTEETKS

SEQ ID NO: 43139 - protein, 75 aa, Homo sapiens
MQENITKVIERGERLDELQDKSESLSDNATAFSNRSKQLRRQMWWRGCKIKAIMALVAAILLLVIIILIVMKYRT

SEQ ID NO: 43140 - protein, 7 aa, Homo sapiens
MMMSQVL

SEQ ID NO: 43141 - protein, 142 aa, Homo sapiens [sequence omitted]

SEQ ID NO: 43142 - protein, 591 aa, Homo sapiens
MDVTSRCTLGDPNKLPEGVPQPARMPYISDKHPRQTLEVINLLRKHRELCDVVLVVGAKKIYAHRVILSACSPYFRAMFTGELAESRQTEVVIRDIDERAMELLIDFAYTSQITVEEGNVQTLLPAACLLQLAEIQEACCEFLKRQLDPSNCLGIRAFADTHSCRELLRIADKFTQHNFQEVMESEEFMLLPANQLIDIISSDELNVRSEEQVFNAVMAWVKYSIQERRPQLPQVLQHVRLPLLSPKFLVGTVGSDPLIKSDEECRDLVDEAKNYLLLPQERPLMQGPRTRPRKPIRCGEVLFAVGGWCSGDAISSVERYDPQTNEWRMVASMSKRRCGVGVSVLDDLLYAVGGHDGSSYLNSVERYDPKTNQWSSDVAPTSTCRTSVGVAVLGGFLYAVGGQDGVSCLNIVERYDPKENKWTRVASMSTRRLGVAVAVLGGFLYAVGGSDGTSPLNTVERYNPQENRWHTIAPMGTRRKHLGCAVYQDMIYAVGGRDDTTELSSAERYNPRTNQWSPVVAMTSRRSGVGLAVVNGQLMAVGGFDGTTYLKTIEVFDPDANTWRLYGGMNYRRLGGGVGVIKMTHCESHIW

SEQ ID NO: 43143 - protein, 533 aa, Homo sapiens
MWRVAFVSLRPRSHLVWMDSVPKSAASVKKILCEAPVESVVQVSGTVISRPAGQENPKMPTGEIEIKVKTAELLNACKKLPFEIKNFVKKTEALRLQYRYLDLRSFQMQYNLRLRSQMVMKMREYLCNLHGFVDIETPTLFKRTPGGAKEFLVPSREPGKFYSLPQSPQQFKQLLMVGGLDRYFQVARCYRDEGSRPDRQPEFTQIDIEMSFVDQTGIQSLIEGLLQYSWPNDKDPVVVPFPTMTFAEVLATYGTDKPDTRFGMKIIDISDVFRNTEIGFLQDALSKPHGTVKAICIPEGAKYLKRKDIESIRNFAADHFNQEILPVFLNANRNWNSPVANFIMESQRLELIRLMETQEEDVVLLTAGEHNKACSLLGKLRLECADLLETRGVVLRDPTLFSFLWVVDFPLFLPKEENPRELESAHHPFTAPHPSDIHLLYTEPKKEDVKMLSHLLQALDYGAPPHGGIALGLDRLICLVTGSPSIRDVIAFPKSFRGHDLMSNTPDSVPPEELKPYHIRVSKPTDSKAERAH

SEQ ID NO: 43144 - protein, 44 aa, Homo sapiens
MWRVAFVSLRPRSHLVWMDSVPKAKHILGPKRFRWACSSYHSPG

SEQ ID NO: 43145 - protein, 512 aa, Homo sapiens
MPTGEIEIKVKTAELLNACKKLPFEIKNFVKKTEALRLQYRYLDLRSFQMQYNLRLRSQMVMKMREYLCNLHGFVDIETPTLFKRTPGGAKEFLVPSREPGKFYSLPQSPQQFKQLLMVGGLDRYFQVARCYRDEGSRPDRQPEFTQIDIEMSFVDQTGIQSLIEGLLQYSWPNDKDPVVVPFPTMTFAEVLATYGTDKPDTRFGMKIIDISDVFRNTEIGFLQDALSKPHGTVKAICIPEGAKYLKRKDIESIRNFAADHFNQEILPVFLNANRNWNSPVANFIMESQRLELIRLMETQEEDVVLLTAGEHNKACSLLGKLRLECADLLETRGVVLRDPTLFSFLWVVDFPLFLPKEENPRELESAHHPFTAPHPSDIHLLYTEPKKARSQHYDLVLNGNEIGGGSIRIHNAELQRYILATLLKEDVKMLSHLLQALDYGAPPHGGIALGLDRLICLVTGSPSIRDVIAFPKSFRGHDLMSNTPDSVPPEELKPYHIRVSKPTDSKAERAH

SEQ ID NO: 43146 - protein, 491 aa, Homo sapiens
MLELLVQKKKQLEAESHAAQLQILMEFLKVARRNKREQLEQIQKELSVLEEDIKRVEEMSGLYSPVSEDSTVPQFEAPSPSHSSIIDSTEYSQPPGFSGSSQTKKQPWYNSTLASRRKRLTAHFEDLEQCYFSTRMSRISDDSRTASQLDEFQECLSKFTRYNSVRPLATLSYASDLYNGSSIVSSIEFDRDCDYFAIAGVTKKIKVYEYDTVIQDAVDIHYPENEMTCNSKISCISWSSYHKNLLASSDYEGTVILWDGFTGQRSKVYQEHEKRCWSVDFNLMDPKLLASGSDDAKVKLWSTNLDNSVASIEAKANVCCVKFSPSSRYHLAFGCADHCVHYYDLRNTKQPIMVFKGHRKAVSYAKFVSGEEIVSASTDSQLKLWNVGKPYCLRSFKGHINEKNFVGLASNGDYIACGSENNSLYLYYKGLSKTLLTFKFDTVKSVLDKDRKEDDTNEFVSAVCWRALPDGESNVLIAANSQGTIKVLELV

SEQ ID NO: 43147 - protein, 17 aa, Homo sapiens
MWPQLLLQVYSSEFGGQ

SEQ ID NO: 43148 - protein, 1416 aa, Homo sapiens
MALYVDGTQVASSLDQSGPLNSPFMASCRSLLLGGDSSEDGHYFRGHLGTLVFWSTALPQSHFQHSSQHSSGEEEATDLVLTASFEPVNTEWVPFRDEKYPRLEVLQGFEPEPEILSPLQPPLCGQTVCDNVELISQYNGYWPLRGEKVIRYQVVNICDDEGLNPIVSEEQIRLQHEALNEAFSRYNISWQLSVHQVHNSTLRHRVVLVNCEPSKIGNDHCDPECEHPLTGYDGGDCRLQGRCYSWNRRDGLCHVECNNMLNDFDDGDCCDPQVADVRKTCFDPDSPKRAYMSVKELKEALQLNSTHFLNIYFASSVREDLAGAATWPWDKDAVTHLGGIVLSPAYYGMPGHTDTMIHEVGHVLGLYHVFKGVSERESCNDPCKETVPSMETGDLCADTAPTPKSELCREPEPTSDTCGFTRFPGAPFTNYMSYTDDNCTDNFTPNQVARMHCYLDLVYQQWTESRKPTPIPIPPMVIGQTNKSLTIHWLPPISGVVYDRASGSLCGACTEDGTFRQYVHTASSRRVCDSSGYWTPEEAVGPPDVDQPCEPSLQAWSPEVHLYHMNMTVPCPTEGCSLELLFQHPVQADTLTLWVTSFFMESSQVLFDTEILLENKESVHLGPLDTFCDIPLTIKLHVDGKVSGVKVYTFDERIEIDAALLTSQPHSPLCSGCRPVRYQVLRDPPFASGLPVVVTHSHRKFTDVEVTPGQMYQYQVLAEAGGELGEASPPLNHIHGAPYCGDGKVSERLGEECDDGDLVSGDGCSKVCELEEGFNCVGEPSLCYMYEGDGICEPFERKTSIVDCGIYTPKGYLDQWATRAYSSHEDKKKCPVSLVTGEPHSLICTSYHPDLPNHRPLTGWFPCVASENETQDDRSEQPEGSLKKEDEVWLKVCFNRPGEARAIFIFLTTDGLVPGEHQQPTVTLYLTDVRGSNHSLGTYGLSCQHNPLIINVTHHQNVLFHHTTSVLLNFSSPRVGISAVALRTSSRIGLSAPSNCISEDEGQNHQGQSCIHRPCGKQDSCPSLLLDHADVVNCTSIGPGLMKCAITCQRGFALQASSGQYIRPMQKEILLTCSSGHWDQNVSCLPVDCGVPDPSLVNYANFSCSEGTKFLKRCSISCVPPAKLQGLSPWLTCLEDGLWSLPEVYCKLECDAPPIILNANLLLPHCLQDNHDVGTICKYECKPGYYVAESAEGKVRNKLLKIQCLEGGIWEQGSCIPVVCEPPPPVFEGMYECTNGFSLDSQCVLNCNQEREKLPILCTKEGLWTQEFKLCENLQGECPPPPSELNSVEYKCEQGYGIGAVCSPLCVIPPSDPVMLPENITADTLEHWMEPVKVQSIVCTGRRQWHPDPVLVHCIQSCEPFQADGWCDTINNRAYCHYDGGDCCSSTLSSKKVIPFAADCDLDECTCRDPKAEENQ

SEQ ID NO: 43149 - protein, 1111 aa, Homo sapiens [sequence omitted]

SEQ ID NO: 43150 - protein, 580 aa, Homo sapiens [sequence omitted]

SEQ ID NO: 43151 - protein, 20 aa, Homo sapiens
MKRKATNKINPTHRRLFFLF

SEQ ID NO: 43152 - protein, 455 aa, Homo sapiens
MVLGTVLLPPNSYGRDQDTSLCCLCTEASESALPDLTEALHRPYGCDVEPQALNEAIRWSSKENLLGATESDPNLFVALYDFVASGDNTLSITKGEKLRVLGYNQNGEWSEVRSKNGQGWVPSNYITPVNSLEKHSWYHGPVSRSAAEYLLSSLINGSFLVRESESSPGQLSISLRYEGRVYHYRINTTADGKVYVTAESRFSTLAELVHHHSTVADGLVTTLHYPAPKCNKPTVYGVSPIHDKWEMERTDITMKHKLGGGQYGEVYVGVWKKYSLTVAVKTLKEDTMEVEEFLKEAAVMKEIKHPNLVQLLGVCTLEPPFYIVTEYMPYGNLLDYLRECNREEVTAVVLLYMATQISSAMEYLEKKNFIHRDLAARNCLVGENHVVKVADFGLSRLMTGDTYTAHAGAKFPIKWTAPESLAYNTFSIKSDVWGKVERDFFLCHFIFFFINALIL

SEQ ID NO: 43153 - protein, 264 aa, Homo sapiens
MRQINKKGFWSYGPVILVVLVVAVVASSVNSYYSSPAQQVPKNPALEAFLAQFSQLEDKFPGQSSFLWQRGRKFLQKHLNASNPTEPATIIFTAAREGRETLKCLSHHVADAYTSSQKVSPIQIDGAGRTWQDSDTVKLLVDLELSYGFENGQKAAVVHHFESFPAGSTLIFYKYCDHENAAFKDVALVLTVLLEEETLEASVGPRETEEKVRDLLWAKFTNSDTPTSFNHMDSDKLSGLWSRISHLVLPVQPVSSIEEQGCLF

SEQ ID NO: 43154 - protein, 439 aa, Homo sapiens
MTRRGLRDSHSSEEDEASSQTDLSQTISKKTVRSIQEAPAVSEDLVIRLRRPPLRYPRYEATSVQQKVNFSEEGETEEDDQDSSHSSVTTVKARSRDSDESGDKTTRSSSQYIESFWQSSQSQNFTAHDKQPSVLSSGYQKTPQEWAPQTARIRTRMQNDSILKSELGNQSPSTSSRQVTGQPQNASFVKRNRWWLLPLIAALASGSFWFFSTPEVETTAVQEFQNQMNQLKNKYQGQDEKLWKRSQTFLEKHLNSSHPRSQPAILLLTAARDAEEALRCLSEQIADAYSSFRSVRAIRIDGTDKATQDSDTVKLEVDQELSNGFKNGQNAAVVHRFESFPAGSTLIFYKYCDHENAAFKDVALVLTVLLEEETLGTSLGLKEVEEKVRDFLKVKFTNSNTPNSYNHMDPDKLNGLWSRISHLVLPVQPENALKRGICL

SEQ ID NO: 43155 - protein, 438 aa, Homo sapiens
MTRRGLRDSHSSEEDEASSQTDLSQTISKKTVRSIQEAPVSEDLVIRLRRPPLRYPRYEATSVQQKVNFSEEGETEEDDQDSSHSSVTTVKARSRDSDESGDKTTRSSSQYIESFWQSSQSQNFTAHDKQPSVLSSGYQKTPQEWAPQTARIRTRMQNDSILKSELGNQSPSTSSRQVTGQPQNASFVKRNRWWLLPLIAALASGSFWFFSTPEVETTAVQEFQNQMNQLKNKYQGQDEKLWKRSQTFLEKHLNSSHPRSQPAILLLTAARDAEEALRCLSEQIADAYSSFRSVRAIRIDGTDKATQDSDTVKLEVDQELSNGFKNGQNAAVVHRFESFPAGSTLIFYKYCDHENAAFKDVALVLTVLLEEETLGTSLGLKEVEEKVRDFLKVKFTNSNTPNSYNHMDPDKLNGLWSRISHLVLPVQPENALKRGICL

SEQ ID NO: 43156 - protein, 172 aa, Homo sapiens [sequence omitted]

SEQ ID NO: 43157 - protein, 417 aa, Homo sapiens
MKRLRVPPLGAAQPAPAWTTFRVGLFCGIFIVLNITLVLAAVFKLETDRSIWPLIRIYRGGFLLIEFLFLLGINTYGWRQAGVNHVLIFELNPRSNLSHQHLFEIAGFLGILWCLSLLACFFAPISVIPTYVYPLALYGFMVFFLINPTKTFYYKSRFWLLKLLFRVFTAPFHKVGFADFWLADQLNSLSVILMDLEYMICFYSLELKWDESKGLLPNNSEERGHSDTMVFFYLWIVFYIISSCYTLIWDLKMDWGLFDKNAGENTFLREEIVYPQKAYYYCAIIEDVILRFAWTIQISITSTTLLPHSGDIIATVFAPLEVFRRFVWNFFRLENEHLNNCGEFRAVRDISVAPLNADDQTLLEQMMDQDDGVRNRQKNRSWKYNQSISLRRPRLASQSKARDTKVLIEDTDDEANT

SEQ ID NO: 43158 - protein, 482 aa, Homo sapiens
MKRLRVPPLGAAQPAPAWTTFRVGLFCGIFIVLNITLVLAAVFKLETDRSIWPLIRIYRGGFLLIEFLFLLGINTYGWRQAGVNHVLIFELNPRSNLSHQHLFEIAGFLGILWCLSLLACFFAPISVIPTYVYPLALYGFMVFFLINPTKTFYYKSRFWLLKLLFRVFTAPFHKVGFADFWLADQLNSLSVILMDLEYMICFYSLELKWDESKGLLPNNSEESGICHKYTYGVRAIVQCIPAWLRFIQCLRRYRDTKRAFPHLVNAGKYSTTFFMVTFAALYSTHKERGHSDTMVFFYLWIVFYIISSCYTLIWDLKMDWGLFDKNAGENTFLREEIVYPQKAYYYCAIIEDVILRFAWTIQISITSTTLLPHSGDIIATVFAPLEVFRRFVWNFFRLENEHLNNCGEFRAVRDISVAPLNADDQTLLEQMMDQDDGVRNRQKNRSWKYNQSISLRRPRLASQSKARDTKVLIEDTDDEANT

SEQ ID NO: 43159 - protein, 356 aa, Homo sapiens [sequence omitted]

SEQ ID NO: 43160 - protein, 212 aa, Homo sapiens
MTENGEINFSVIGQYVDYLVKEQGVKNIFVNGTTGEGLSLSVSERRQVAEEWVTKGKDKLDQVIIHVGALSLKESQELAQHAAEIGADGIAVIAPFFLKPWTKDILINFLKEVAAAAPALPFYYYHIPALTGVKIRAEELLDGILDKIPTFQGLKFSDTDLLDFGQCVDQNRQQQFAFLFGVDEQLLSALVMGATGAVGSFVSRDLSTLLSN

SEQ ID NO: 43161 - protein, 122 aa, Homo sapiens
MRYEEIELRILLLCGSDLLESFCIPGLWNEADMEVIVGDFGIVVVPRDAADTDRIMNHSSILRKYKNNIMVVKDDINHPMSVVSSTKSRLALQHGDGHVVDYLSQPVIDYILKSQLYINASG

SEQ ID NO: 43162 - protein, 287 aa, Homo sapiens
MCPICLDMLKNTMTTKECLHRFCADCIITALRSGNKECPTCRKKLVSKRSLRPDPNFDALISKIYPSRDEYEAHQERVLARINKHNNQQALSHSIEEGLKIQAMNRLQRGKKQQIENGSGAEDNGDSSHCSNASTHSNQEAGPSNKRTKTSDDSGLELDNNNAAMAIDPVMDGASEIELVFRPHPTLMEKDDSAQTRYIKTSGNATVDHLSKYLAVRLALEELRSKGESNQMNLDTASEKQYTIYIATASGQFTVLNGSFSLELVSEKYWKVNKPMELYYAPTKEHK

SEQ ID NO: 43163 - protein, 718 aa, Homo sapiens
MKELKKGRNSKFRDNSEKCVLEKWKRNQFSQDYNSNKIIKEPLGSRRQKISFKIPIKSRDTLQKLVEENVFNIDSNNSKTKQEEREYLESSQVSLNVTRQKTEHLLSDFTYKRTVHEWKRKHHYDHQESNDSHSRENLTQSFEAPCCSVSSESIQDADQEMQIVEELHAARVGKSVDLPGELMSMEIDLEDDVHSSSANNTSDRKLLIVIDTNILMNHLKFVRILKTTEVPGFDKLVLIIPWVVMQELDRMKEGKLLKRAQHKAIPAVHFINDSLKNQDRKLWGQSIQLASQKHYGLSDENNDDRVLKCCLQHQELFPCSFVILCTDDRNLRNKGLISGVKSLSKEELSAELLHLSLNTDVCHQPCIPKQQLKAETTPLKESYKEESTNSGLSILLESIVSDLEKSLGTGLSSILETEMKIAFGNLWMEILYLKPPWTLLHLLQCFKKHWLAVFGLVMEKNLLLTIESLYKNLRKANKAVDFTTVKFLLQDSRSLLHAFSTRSNYDGILPQTFAQVNNLLQTFAEVKTKLKPNSSENTVTKKQEGTSLKNSHNQEITVFSSSHLPQPSRHQEIWSILESVWITIYQNSTDVFQRLGSNSALTTSNIASFEEAFICLQKLMAAVRDILEGIQRILAPNSNYQDVETLYNFLIKYEVNKNVKFTAQEIYDCVSQTEYREKLTIGCRQLVEMEYTMQQCNASVYMEAKNRGWCEDMLNYRI

SEQ ID NO: 43164 - protein, 635 aa, Homo sapiens [sequence omitted]

SEQ ID NO: 43165 - protein, 295 aa, Homo sapiens
MQGPPVPQFQPQKALRPDMGYNTLANFRIEKKIGRGQFSEVYRAACLLDGVPVALKKVQIFDLMDAKARADCIKEIDLLKQLNHPNVIKYYASFIEDNELNIVLELADAGDLSRMIKHFKKQKRLIPERTVWKYFVQLCSALEHMHSRRVMHRDIKPANVFITATGVVKLGDLGLGRFFSSKTTAAHSLVGTPYYMSPERIHENGYNFKSDIWSLGCLLYEMAALQSPFYGDKMNLYSLCKKIEQCDYPPLPSDHYSEELRQLVNMCINPDPEKRPDVTYVYDVAKRMHACTASS

SEQ ID NO: 43166 - protein, 1506 aa, Homo sapiens
MTLNVGGETENNGVSKESRTNVRIVNNAKNSFVASSVPLDEDPQVIEMMADKKYKETFSAPSRANENVALKYSSNRPPIASLSQTEVVRSGHLTTKPTQSKLDIKVLGTGNLYHRSIGKEIAKTSNKFGSLEKRTPTKCTTEHKLTTKCSLPQLKSPAPSILKNRMSNLQVKQRPKSSFLANKQERSAENTILPEEETVVQNTSAGKDPLKVENSQVTVAVRVRPFTKREKIEKASQVVFMSGKEITVEHPDTKQVYNFIYDVSFWSFDECHPHYASQTTVYEKLAAPLLERAFEGFNTCLFAYGQTGSGKSYTMMGFSEEPGIIPRFCEDLFSQVARKQTQEVSYHIEMSFFEVYNEKIHDLLVCKDENGQRKQPLRVREHPVYGPYVEALSMNIVSSYADIQSWLELGNKQRATAATGMNDKSSRSHSVFTLVMTQTKTEFVEGEEHDHRITSRINLIDLAGSERCSTAHTNGDRLKEGVSINKSLLTLGKVISALSEQANQRSVFIPYRESVLTWLLKESLGGNSKTAMIATISPAASNIEETLSTLRYANQARLIVNIAKVNEDMNAKLIRELKAEIAKLKAAQRNSRNIDPERYRLCRQEITSLRMKLHQQERDMAEMQRVWKEKFEQAEKRKLQETKELQKAGIMFQMDNHLPNLVNLNEDPQLSEMLLYMIKEGTTTVGKYKPNSSHDIQLSGVLIADDHCTIKNFGGTVSIIPVGEAKTYVNGKHILEITVLRHGDRVILGGDHYFRFNHPVEVQKGKRPSGRDTPISEGPKDFEFAKNELLMAQRSQLEAEIKEAQLKAKEEMMQGIQIAKEMAQQELSSQKAAYESKIKALEAELREESQRKKMQEINNQKANHKIEELEKAKQHLEQEIYVNKKRLEMETLATKQALEDHSIRHARILEALETEKQKIAKEVQILQQNRNNRDKTFTVQTTWSSMKLSMMIQEANAISSKLKTYYVFGRHDISDKSSSDTSIRVRNLKLGISTFWSLEKFESKLAAMKELYESNGSNRGEDAFCDPEDEWEPDITDAPVSSLSRRRSRSLMKNRRISGCLHDIQVHPIKNLHSSHSSGLMDKSSTIYSNSAESFLPGICKELIGSSLDFFGQSYDEERTIADSLINSFLKIYNGLFAISKAHEEQDEESQDNLFSSDRAIQSLTIQTACAFEQLVVLMKHWLSDLLPCTNIARLEDELRQEVKKLGGYLQLFLQGCCLDISSMIKEAQKNAIQIVQQAVKYVGQLAVLKGSKLHFLENGNNKAASVQEEFMDAVCDGVGLGMKILLDSGLEKAKELQHELFRQCTKNEVTKEMKTNAMGLIRSLENIFAESKIKSFRRQVQEENFEYQDFKRMVNRAPEFLKLKHCLEKAIEIIISALKGCHSDINLLQTCVESIRNLASDFYSDFSVPSTSVGSYESRVTHIVHQELESLAKSLLFCFESEESPDLLKPWETYNQNTKEEHQQSKSSGIDGSKNKGVPKRVYELHGSSPAVSSEECTPSRIQWV

SEQ ID NO: 43167 - protein, 122 aa, Homo sapiens [sequence omitted]

SEQ ID NO: 43168 - protein, 1836 aa, Homo sapiens
MLPKRAKAPGGGGGMAKASAAELKVFKSGSVDSRVPGGPPASNLRKQKSLTNLSFLTDSEKKLQLYEPEWSDDMAKAPKGLGKVGSKGREAPLMSKTLSKSEHSLFQAKGSPAGGAKTPLAPLAPNLGKPSRIPRGPYAEVKPLSKAPEAAVSEDGKSDDELLSSKAKAQKSSGPVPSAKGQEERAFLKVDPELVVTVLGDLEQLLFSQMLDPESQRKRTVQNVLDLRQNLEETMSSLRGSQVTHSSLEMTCYDSDDANPRSVSSLSNRSSPLSWRYGQSSPRLQAGDAPSVGGSCRSEGTPAWYMHGERAHYSHTMPMRSPSKLSHISRLELVESLDSDEVDLKSGYMSDSDLMGKTMTEDDDITTGWDESSSISSGLSDASDNLSSEEFNASSSLNSLPSTPTASRRNSTIVLRTDSEKRSLAESGLSWFSESEEKAPKKLEYDSGSLKMEPGTSKWRRERPESCDDSSKGGELKKPISLGHPGSLKKGKTPPVAVTSPITHTAQSALKVAGKPEGKATDKGKLAVKNTGLQRSSSDAGRDRLSDAKKPPSGIARPSTSGSFGYKKPPPATGTATVMQTGGSATLSKIQKSSGIPVKPVNGRKTSLDVSNSAEPGFLAPGARSNIQYRSLPRPAKSSSMSVTGGRGGPRPVSSSIDPSLLSTKQGGLTPSRLKEPTKVASGRTTPAPVNQTDREKEKAKAKAVALDSDNISLKSIGSPESTPKNQASHPTATKLAELPPTPLRATAKSFVKPPSLANLDKVNSNSLDLPSSSDTTHASKVPDLHATSSASGGPLPSCFTPSPAPILNINSASFSQGLELMSGFSVPKETRMYPKLSGLHRSMESLQMPMSLPSAFPSSTPVPTPPAPPAAPTEEETEELTWSGSPRAGQLDSNQRDRNTLPKKGLRYQLQSQEETKERRHSHTIGGLPESDDQSELPSPPALPMSLSAKGQLTNIVSPTAATTPRITRSNSIPTHEAAFELYSGSQMGSTLSLAERPKGMIRSGSFRDPTDDVHGSVLSLASSASSTYSSAEERMQSEQIRKLRRELESSQEKVATLTSQLSANANLVAAFEQSLVNMTSRLRHLAETAEEKDTELLDLRETIDFLKKKNSEAQAVIQGALNASETTPKELRIKRQNSSDSISSLNSITSHSSIGSSKDADAKKKKKKSWVYELRSSFNKAFSIKKGPKSASSYSDIEEIATPDSSAPSSPKLQHGSTETASPSIKSSTSSSVGTDVTEGPAHPAPHTRLFHANEEEEPEKKEVSELRSELWEKEMKLTDIRLEALNSAHQLDQLRETMHNMQLEVDLLKAENDRLKVAPGPSSGSTPGQVPGSSALSSPRRSLGLALTHSFGPSLADTDLSPMDGISTCGPKEEVTLRVVVRMPPQHIIKGDLKQQEFFLGCSKVSGKVDWKMLDEAVFQVFKDYISKMDPASTLGLSTESIHGYSISHVKRVLDAEPPEMPPCRRGVNNISVSLKGLKEKCVDSLVFETLIPKPMMQHYISLLLKHRRLVLSGPSGTGKTYLTNRLAEYLVERSGREVTEGIVSTFNMHQQSCKDLQLYLSNLANQIDRETGIGDVPLVILLDDLSEAGSISELVNGALTCKYHKCPYIIGTTNQPVKMTPNHGLHLSFRMLTFSNNVEPANGFLVRYLRRKLVESDSDINANKEELLRVLDWVPKLWYHLHTFLEKHSTSDFLIGPCFFLSCPIGIEDFRTWFIDLWNNSIIPYLQEGAKDGIKVHGQKAAWEDPVEWVRDTLPWPSAQQDQSKLYHLPPPTVGPHSIASPPEDRTVKDSTPSSLDSDPLMAMLLKLQEAANYIESPDRETILDPNLQATL

SEQ ID NO: 43169 - protein, 91 aa, Homo sapiens
MIRSGSFRDPTDDVHGSVLSLASSASSTYSSQIRKLRRELESSQEKVATLTSQLSANVSAMKYGKIKAVILTIVRQVQPREENYLVRYPLD

SEQ ID NO: 43170 - protein, 66 aa, Homo sapiens
MTGIPVQPVYPYPQDPKAGPAPPQPGFIYPPSGPAPQYPLYPAGPPVYNPAAPPPYMPPQPSYPGA

SEQ ID NO: 43171 - protein, 149 aa, Homo sapiens [sequence omitted]

SEQ ID NO: 43172 - protein, 546 aa, Homo sapiens [sequence omitted]

SEQ ID NO: 43173 - protein, 296 aa, Homo sapiens
MEEFVYKVWEGRWRVIPYDVLPDWLKDNDYLLHGHRPPMPSFRACFKSIFRIHTETGNIWTHLLGFVLFLFLGILTMLRPNMYFMAPLQEKVVFGMFFLGAVLCLSFSWLFHTVYCHSEKVSRTFSKLDYSGIALLIMGSFVPWLYYSFYCSPQPRLIYLSIVCVLGISAIIVAQWDRFATPKHRQTRAGVFLGLGLSGVVPTMHFTIAEGFVKATTVGQMGWFFLMAVMYITGAGLYAARIPERFFPGKFDIWFQSHQIFHVLVVAAAFVHFYGVSNLQEFRYGLEGGCTDDTLL

SEQ ID NO: 43174 - protein, 620 aa, Homo sapiens [sequence omitted]

SEQ ID NO: 43175 - protein, 672 aa, Homo sapiens
MPAYDRISPPWALEDKRHAFRNGGGPAYQLREWKEPASYGRQDATVWIPSPSRQPVYYDELDAASSSLRRLSLQPRSHSVPRSPSQGSYSRARIYSPVRSPSARFERLPPRSEDIYADPAAYVMRRSISSPKVPPYPEVFRDSLHTYKLNEQDTDKLLGKLCEQNKVVREQDRLVQQLRAEKESLESALMGTHQELEMFGSQPAYPEKLRHKKDSLQNQLINIRVELSQATTALTNSTIEYEHLESEVSALHDDLWEQLNLDTQNEVLNRQIQKEIWRIQDVMEGLRKNNPSRGTDTAKHRGGLGPSATYSSNSPASPLSSASLTSPLSPFSLVSGSQGSPTKPGSNEPKANYEQSKKDPHQTLPLDTPRDISLVPTRQEVEAEKQAALNKVGVVPPRTKSPTDDEVTPSAVVRRNASGLTNGLSSQERPKSAVFPGEGKVKMSVEEQIDRMRRHQSGSMREKRRSLQLPASPAPDPSPRPAYKVVRRHRSIHEVDISNLEAALRAEEPGGHAYETPREEIARLRKMELEPQHYDVDINKELSTPDKVLIPERYIDLEPDTPLSPEELKEKQKKVERIKTLIAKSSMQNVVPIGEGDSVDVPQDSESQLQEQEKRIEISCALATEASRRGRMLSVQCATPSPPTSPASPAPPANPLSSESPRGADSSYTMRV

SEQ ID NO: 43176 - protein, 1603 aa, Homo sapiens
MEYDALSRLRHDKEENRAKQNADPSLISWDEPGVDFYSKPAGRRTDLKLLRGLSGSDPTLNYNSLSPQEGPPNHSTSQGPQPGSDPWPKGSLSGDYLYIFDGSDGGVSSSPGPGDIEGSCKKLSPPPLPPRASIWDTPPLPPRKGSPSSSKISQPSDINTFSLVEQLPGKLLEHRILEEEEVLGGGGQGRLLGSVDYDGINDAITRLNLKSTYDAEMLRDATRGWKEGRGPLDFSKDTSGKPVARSKTMPPQVPPRTYASRYGNRKNATPGKNRRISAAPVGSRPHTVANGHELFEVSEERDEEVAAFCHMLDILRSGSDIQDYFLTGYVWSAVTPSPEHLGDEVNLKVTVLCDRLQEALTFTCNCSSTVDLLIYQTLCYTHDDLRNVDVGDFVLKPCGLEEFLQNKHALGSHEYIQYCRKFDIDIRLQLMEQKVVRSDLARTVNDDQSPSTLNYLVHLQERPVKQTISRQALSLLFDTYHNEVDAFLLADGDFPLKADRVVQSVKAICNALAAVETPEITSALNQLPPCPSRMQPKIQKDPSVLAVRENREKVVEALTAAILDLVELYCNTFNADFQTAVPGSRKHDLVQEACHFARSLAFTVYATHRIPIIWATSYEDFYLSCSLSHGGKELCSPLQTRRAHFSKYLFHLIVWDQQICFPVQVNRLPRETLLCATLYALPIPPPGSSSEANKQRRVPEALGWVTTPLFNFRQVLTCGRKLLGLWPATQENPSARWSAPNFHQPDSVILQIDFPTSAFDIKFTSPPGDKFSPRYEFGSLREEDQRKLKDIMQKESLYWLTDADKKRLWEKRYYCHSEVSSLPLVLASAPSWEWACLPDIYVLLKQWTHMNHQDALGLLHATFPDQEVRRMAVQWIGSLSDAELLDYLPQLVQALKYECYLDSPLVRFLLKRAVSDLRVTHYFFWLLKDGLKDSQFSIRYQYLLAALLCCCGKGLREEFNRQCWLVNALAKLAQQVREAAPSARQGILRTGLEEVKQFFALNGSCRLPLSPSLLVKGIVPRDCSYFNSNAVPLKLSFQNVDPLGENIRVIFKCGDDLRQDMLTLQMIRIMSKIWVQEGLDMRMVIFRCFSTGRGRGMVEMIPNAETLRKIQVEHGVTGSFKDRPLADWLQKHNPGEDEYEKAVENFIYSCAGCCVATYVLGICDRHNDNIMLKTTGHMFHIDFGRFLGHAQMFGNIKRDRAPFVFTSDMAYVINGGDKPSSRFHDFVDLCCQAYNLIRKHTHLFLNLLGLMLSCGIPELSDLEDLKYVYDALRPQDTEANATTYFTRLIESSLGSVATKLNFFIHNLAQMKFTGSDDRLTLSFASRTHTLKSSGRISDVFLCRHEKIFHPNKGYIYVVKVMRENTHEATYIQRTFEEFQELHNKLRLLFPSSHLPSFPSRFVIGRSRGEAVAERRREELNGYIWHLIHAPPEVAECDLVYTFFHPLPRDEKAMGTSPAPKSSDGTWARPVGKVGGEVKLSISYKNNKLFIMVMHIRGLQLLQDGNDPDPYVKIYLLPDPQKTTKRKTKVARKTCNPTYNEMLVYDGIPKGDLQQRELQLSVLSEQGFWENVLLGEVNIRLRELDLAQEKTGWFALGSRSHGTL

SEQ ID NO: 43177 - protein, 438 aa, Homo sapiens [sequence omitted]

SEQ ID NO: 43178 - protein, 1212 aa, Homo sapiens
MDPSIQNELTQPPTITKQSAKDHIVDPRDNILIECEAKGNPAPSFHWTRNSRFFNIAKDPRVSMRRRSGTLVIDFRSGGRPEEYEGEYQCFARNKFGTALSNRIRLQVSKSPLWPKENLDPVVVQEGAPLTLQCNPPPGLPSPVIFWMSSSMEPITQDKRVSQGHNGDLYFSNVMLQDMQTDYSCNARFHFTHTIQQKNPFTLKVLTTRGVAERTPSFMYPQGTASSQMVLRGMDLLLECIASGVPTPDIAWYKKGGDLPSDKAKFENFNKALRITNVSEEDSGEYFCLASNKMGSIRHTISVRVKAAPYWLDEPKNLILAPGEDGRLVCRANGNPKPTVQWMVNGEPLQSAPPNPNREVAGDTIIFRDTQISSRAVYQCNTSNEHGYLLANAFVSVLDVPPRMLSPRNQLIRVILYNRTRLDCPFFGSPIPTLRWFKNGQGSNLDGGNYHVYENGSLEIKMIRKEDQGIYTCVATNILGKAENQVRLEVKDPTRIYRMPEDQVARRGTTVQLECRVKHDPSLKLTVSWLKDDEPLYIGNRMKKEDDSLTIFGVAERDQGSYTCVASTELDQDLAKAYLTVLADQATPTNRLAALPKGRPDRPRDLELTDLAERSVRLTWIPGDANNSPITDYVVQFEEDQFQPGVWHDHSKYPGSVNSAVLRLSPYVNYQFRVIAINEVGSSHPSLPSERYRTSGAPPESNPGDVKGEGTRKNNMEITWTPMNATSAFGPNLRYIVKWRRRETREAWNNVTVWGSRYVVGQTPVYVPYEIRVQAENDFGKGPEPESVIGYSGEDLPSAPRRFRVRQPNLETINLEWDHPEHPNGIMIGYTLKYVAFNGTKVGKQIVENFSPNQTKFTVQRTDPVSRYRFTLSARTQVGSGEAVTEESPAPPNEATPTAAPPTLPPTTVGATGAVSSTDATAIAATTEATTVPIIPTVAPTTIATTTTVATTTTTTAAATTTTESPPTTTSGTKIHESAPDEQSIWNVTVLPNSKWANITWKHNFGPGTDFVVEYIDSNHTKKTVPVKAQAQPIQLTDLYPGMTYTLRVYSRDNEGISSTVITFMTSTAYTNNQADIATQGWFIGLMCAIALLVLILLIVCFIKRSRGGKYPVREKKDVPLGPEDPKEEDGSFDYSDEDNKPLQGSQTSLDGTIKQQESDDSLVDYGEGGEGQFNEDGSFIGQYTVKKDKEETEGNESSEATSPVNAIYSLA

SEQ ID NO: 43179 - protein, 591 aa, Homo sapiens
MDPSIQNELTQPPTITKQSAKDHIVDPRDNILIECEAKGNPAPSFHWTRNSRFFNIAKDPRVSMRRRSGTLVIDFRSGGRPEEYEGEYQCFARNKFGTALSNRIRLQVSKSPLWPKENLDPVVVQEGAPLTLQCNPPPGLPSPVIFWMSSSMEPITQDKRVSQGHNGDLYFSNVMLQDMQTDYSCNARFHFTHTIQQKNPFTLKVLTTRGVAERTPSFMYPQGTASSQMVLRGMDLLLECIASGVPTPDIAWYKKGGDLPSDKAKFENFNKALRITNVSEEDSGEYFCLASNKMGSIRHTISVRVKAAPYWLDEPKNLILAPGEDGRLVCRANGNPKPTVQWMVNGEPLQSAPPNPNREVAGDTIIFRDTQISSRAVYQCNTSNEHGYLLANAFVSVLDVPPRMLSPRNQLIRVILYNRTRLDCPFFGSPIPTLRWFKNGQGSNLDGGNYHVYENGSLEIKMIRKEDQGIYTCVATNILGKAENQVRLEVKDPTRIYRMPEDQVARRGTTVQLECRVKHDPSLKLTVSWLKDDEPLYIGNRMKKEDDSLTIFGVAERDQGSYTCVASTELDQDLAKAYLTVLGNCPCSPWH

SEQ ID NO: 43180 - protein, 1000 aa, Homo sapiens
MSSSMEPITQDKRVSQGHNGDLYFSNVMLQDMQTDYSCNARFHFTHTIQQKNPFTLKVLTNHPYNDSSLRNHPDMYSARGVAERTPSFMYPQGTASSQMVLRGMDLLLECIASGVPTPDIAWYKKGGDLPSDKAKFENFNKALRITNVSEEDSGEYFCLASNKMGSIRHTISVRVKAAPYWLDEPKNLILAPGEDGRLVCRANGNPKPTVQWMVNGEPLQSAPPNPNREVAGDTIIFRDTQISSRAVYQCNTSNEHGYLLANAFVSVLDVPPRMLSPRNQLIRVILYNRTRLDCPFFGSPIPTLRWFKNGQGSNLDGGNYHVYENGSLEIKMIRKEDQGIYTCVATNILGKAENQVRLEVKDPTRIYRMPEDQVARRGTTVQLECRVKHDPSLKLTVSWLKDDEPLYIGNRMKKEDDSLTIFGVAERDQGSYTCVASTELDQDLAKAYLTVLGRPDRPRDLELTDLAERSVRLTWIPGDANNSPITDYVVQFEEDQFQPGVWHDHSKYPGSVNSAVLRLSPYVNYQFRVIAINEVGSSHPSLPSERYRTSGAPPESNPGDVKGEGTRKNNMEITWTPMNATSAFGPNLRYIVKWRRRETREAWNNVTVWGSRYVVGQTPVYVPYEIRVQAENDFGKGPEPESVIGYSGEDYPRAAPTEVKVRVMNSTAISLQWNRVYSDTVQGQLREYRAYYWRESSLLKNLWVSQKRQQASFPGDRLRGVVSRLFPYSNYKLEMVVVNGRGDGPRSETKEFTTPEGVPSAPRRFRVRQPNLETINLEWDHPEHPNGIMIGYTLKYVAFNGTKVGKQIVENFSPNQTKFTVQRTDPVSRYRFTLSARTQVGSGEAVTEESPAPPNEAYTNNQADIATQGWFIGLMCAIALLVLILLIVCFIKRSRGGKYPVREKKDVPLGPEDPKEEDGSFDYSDEDNKPLQGSQTSLDGTIKQQESDDSLVDYGEGGEGQFNEDGSFIGQYTVKKDKEETEGNESSEATSPVNAIYSLA

SEQ ID NO: 43181 - protein, 988 aa, Homo sapiens
MSSSMEPITQDKRVSQGHNGDLYFSNVMLQDMQTDYSCNARFHFTHTIQQKNPFTLKVLTTRGVAERTPSFMYPQGTASSQMVLRGMDLLLECIASGVPTPDIAWYKKGGDLPSDKAKFENFNKALRITNVSEEDSGEYFCLASNKMGSIRHTISVRVKAAPYWLDEPKNLILAPGEDGRLVCRANGNPKPTVQWMVNGEPLQSAPPNPNREVAGDTIIFRDTQISSRAVYQCNTSNEHGYLLANAFVSVLDVPPRMLSPRNQLIRVILYNRTRLDCPFFGSPIPTLRWFKNGQGSNLDGGNYHVYENGSLEIKMIRKEDQGIYTCVATNILGKAENQVRLEVKDPTRIYRMPEDQVARRGTTVQLECRVKHDPSLKLTVSWLKDDEPLYIGNRMKKEDDSLTIFGVAERDQGSYTCVASTELDQDLAKAYLTVLGRPDRPRDLELTDLAERSVRLTWIPGDANNSPITDYVVQFEEDQFQPGVWHDHSKYPGSVNSAVLRLSPYVNYQFRVIAINEVGSSHPSLPSERYRTSGAPPESNPGDVKGEGTRKNNMEITWTPMNATSAFGPNLRYIVKWRRRETREAWNNVTVWGSRYVVGQTPVYVPYEIRVQAENDFGKGPEPESVIGYSGEDYPRAAPTEVKVRVMNSTAISLQWNRVYSDTVQGQLREYRAYYWRESSLLKNLWVSQKRQQASFPGDRLRGVVSRLFPYSNYKLEMVVVNGRGDGPRSETKEFTTPEGVPSAPRRFRVRQPNLETINLEWDHPEHPNGIMIGYTLKYVAFNGTKVGKQIVENFSPNQTKFTVQRTDPVSRYRFTLSARTQVGSGEAVTEESPAPPNEATPTAAYTNNQADIATQGWFIGLMCAIALLVLILLIVCFIKRSRGGKYPVREKKDVPLGPEDPKEEDGSFDYSDEDNKPLQGSQTSLDGTIKQQESDDSLVDYGEGGEGQFNEDGSFIGQYTVKKDKEETEGNESSEATSPVNAIYSLA

SEQ ID NO: 43182 - protein, 1020 aa, Homo sapiens
MSSSMEPITQDKRVSQGHNGDLYFSNVMLQDMQTDYSCNARFHFTHTIQQKNPFTLKVLTNHPYNDSSLRNHPDMYSARGVAERTPSFMYPQGTASSQMVLRGMDLLLECIASGVPTPDIAWYKKGGDLPSDKAKFENFNKALRITNVSEEDSGEYFCLASNKMGSIRHTISVRVKAAPYWLDEPKNLILAPGEDGRLVCRANGNPKPTVQWMVNGEPLQSAPPNPNREVAGDTIIFRDTQISSRAVYQCNTSNEHGYLLANAFVSVLDVPPRMLSPRNQLIRVILYNRTRLDCPFFGSPIPTLRWFKNGQGSNLDGGNYHVYENGSLEIKMIRKEDQGIYTCVATNILGKAENQVRLEVKDPTRIYRMPEDQVARRGTTVQLECRVKHDPSLKLTVSWLKDDEPLYIGNRMKKEDDSLTIFGVAERDQGSYTCVASTELDQDLAKAYLTVLADQATPTNRLAALPKGRPDRPRDLELTDLAERSVRLTWIPGDANNSPITDYVVQFEEDQFQPGVWHDHSKYPGSVNSAVLRLSPYVNYQFRVIAINEVGSSHPSLPSERYRTSGAPPESNPGDVKGEGTRKNNMEITWTPMNATSAFGPNLRYIVKWRRRETREAWNNVTVWGSRYVVGQTPVYVPYEIRVQAENDFGKGPEPESVIGYSGEDYPRAAPTEVKVRVMNSTAISLQWNRVYSDTVQGQLREYRAYYWRESSLLKNLWVSQKRQQASFPGDRLRGVVSRLFPYSNYKLEMVVVNGRGDGPRSETKEFTTPEGVPSAPRRFRVRQPNLETINLEWDHPEHPNGIMIGYTLKYVAFNGTKVGKQIVENFSPNQTKFTVQRTDPVSRYRFTLSARTQVGSGEAVTEESPAPPNEATPTAAYTNNQADIATQGWFIGLMCAIALLVLILLIVCFIKRSRGGKYPVREKKDVPLGPEDPKEEDGSFDYSDEDNKPLQGSQTSLDGTIKQQESDDSLVDYGEGGEGQFNEDGSFIGQYTVKKDKEETEGNESSEATSPVNAIYSLA

SEQ ID NO: 43183 - protein, 500 aa, Homo sapiens
MEYASRGDLYDYISERQQLSEREARHFFRQIVSAVHYCHQNRVVHRDLKLENILLDANGNIKIADFGLSNLYHQGKFLQTFCGSPLYASPEIVNGKPYTGPEVDSWSLGVLLYILVHGTMPFDGHDHKILVKQISNGAYREPPKPSDACGLIRWLLMVNPTRRATLEDVASHWWVNWGYATRVGEQEAPHEGGHPGSDSARASMADWLRRSSRPLLENGAKVCSFFKQHAPGGGSTTPGLERQHSLKKSRKENDMAQSLHSDTADDTAHRPGKSNLKLPKGILKKKVSASAEGVQEDPPELSPIPASPGQAAPLLPKKGILKKPRQRESGYYSSPEPSESGELLDAGDVFVSGDPKEQKPPQASGLLLHRKGILKLNGKFSQTALELAAPTTFGSLDELAPPRPLARASRPSGAVSEDSILSSESFDQLDLPERLPEPPLRGCVSVDNLTGLEEPPSEGPGSCLRRWRQDPLGDSCFSLTDCQEVTATYRQALRVCSKLT

SEQ ID NO: 43184 - protein, 138 aa, Homo sapiens [sequence omitted]

SEQ ID NO: 43185 - protein, 77 aa, Homo sapiens
MEQSYPMVLLGNKIDLADRKVPQEVAQGWCREKDIPYFEVSAKNDINVVQAFEMLASRALSRPSLSRERKSREVSLS

SEQ ID NO: 43186 - protein, 167 aa, Homo sapiens
MRRLIAQIVASDPDFYSEAILGKTNQEYCDWIKRDDTWGGAIEISILSKFYQCEICVVDTQTVRIDRFGEDAGYTKRVLLIYDGIHYDPLQRNFPDPDTPPLTIFSSNDDIVLVQALELADEARRRRQFTDVNRFTLRCMVCQKGLTGQAEAREHAKETGHTNFGEV

SEQ ID NO: 43187 - protein, 175 aa, Homo sapiens
MIGEHSIYCTVNNDEGEWSGPPPECRGKSLTSKVPPTVQKPTTVNVPTTEVSPTSQKTTTKTTTPNAQATRSTPVSRTTKHFHETTPNKGSGTTSGTTRLLSESYSVTQAGVWWCDLRSLQPLPPEFKQFSCLSLRSSWDYRIITGHLLPGDFSVPSTIVDGIYFPTPLSPFFVG

SEQ ID NO: 43188 - protein, 289 aa, Homo sapiens [sequence omitted]

SEQ ID NO: 43189 - protein, 488 aa, Homo sapiens [sequence omitted]

SEQ ID NO: 43190 - protein, 3042 aa, Homo sapiens
MEICESLEKTKQKISHELQVKESQVNFQEGQLNSGKKQIEKLEQELKRCKSELERSQQAAQSADVSLNPCNTPQKIFTTPLTPSQYYSGSKYEDLKEKYNKEVEERKRLEAEVKALQAKKASQTLPQATMNHRDIARHQASSSVFSWQQEKTPSHLSSNSQRTPIRRDFSASYFSGEQEVTPSRSTLQIGKRDANSSFFDNSSSPHLLDQLKAQNQELRNKINELELRLQGHEKEMKGQVNKFQELQLQLEKAKVELIEKEKVLNKCRDELVRTTAQYDQASTKYTALEQKLKKLTEDLSCQRQNAESARCSLEQKIKEKEKEFQEELSRQQRSFQTLDQECIQMKARLTQELQQAKNMHNVLQAELDKLTSVKQQLENNLEEFKQKLCRAEQAFQASQIKENELRRSMEEMKKENNLLKSHSEQKAREVCHLEAELKNIKQCLNQSQNFAEEMKAKNTSQETMLRDLQEKINQQENSLTLEKLKLAVADLEKQRDCSQDLLKKREHHIEQLNDKLSKTEKESKALLSALELKKKEYEELKEEKTLFSCWKSENEKLLTQMESEKENLQSKINHLETCLKTQQIKSHEYNERVRTLEMDRENLSVEIRNLHNVLDSKSVEVETQKLAYMELQQKAEFSDQKHQKEIENMCLKTSQLTGQVEDLEHKLQLLSNEIMDKDRCYQDLHAEYESLRDLLKSKDASLVTNEDHQRSLLAFDQQPAMHHSFANIIGEQGSMPSERSECRLEADQSPKNSAILQNRVDSLEFSLESQKQMNSDLQKQCEELVQIKGEIEENLMKAEQMHQSFVAETSQRISKLQEDTSAHQNVVAETLSALENKEKELQLLNDKVETEQAEIQELKKSNHLLEDSLKELQLLSETLSLEKKEMSSIISLNKREIEELTQENGTLKEINASLNQEKMNLIQKSESFANYIDEREKSISELSDQYKQEKLILLQRCEETGNAYEDLSQKYKAAQEKNSKLECLLNECTSLCENRKNELEQLKEAFAKEHQEFLTKLAFAEERNQNLMLELETVQQALRSEMTDNQNNSKSEAGGLKQEIMTLKEEQNKMQKEVNDLLQENEQLMKVMKTKHECQNLESEPIRNSVKERESERNQCNFKPQMDLEVKEISLDSYNAQLVQLEAMLRNKELKLQESEKEKECLQHELQTIRGDLETSNLQDMQSQEISGLKDCEIDAEEKYISGPHELSTSQNDNAHLQCSLQTTMNKLNELEKICEILQAEKYELVTELNDSRSECITATRKMAEEVGKLLNEVKILNDDSGLLHGELVEDIPGGEFGEQPNEQHPVSLAPLDESNSYEHLTLSDKEVQMHFAELQEKFLSLQSEHKILHDQHCQMSSKMSELQTYVDSLKAENLVLSTNLRNFQGDLVKEMQLGLEEGLVPSLSSSCVPDSSSLSSLGDSSFYRALLEQTGDMSLLSNLEGAVSANQCSVDEVFCSSLQEENLTRKETPSAPAKGVEELESLCEVYRQSLEKLEEKMESQGIMKNKEIQELEQLLSSERQELDCLRKQYLSENEQWQQKLTSVTLEMESKLAAEKKQTEQLSLELEVARLQLQGLDLSSRSLLGIDTEDAIQGRNESCDISKEHTSETTERTPKHDVHQICDKDAQQDLNLDIEKITETGAVKPTGECSGEQSPDTNYEPPGEDKTQGSSECISELSFSGPNALVPMDFLGNQEDIHNLQLRVKETSNENLRLLHVIEDRDRKVESLLNEMKELDSKLHLQEVQLMTKIEACIELEKIVGELKKENSDLSEKLEYFSCDHQELLQRVETSEGLNSDLEMHADKSSREDIGDNVAKVNDSWKERFLDVENELSRIRSEKASIEHEALYLEADLEVVQTEKLCLEKDNENKQKVIVCLEEELSVVTSERNQLRGELDTMSKKTTALDQLSEKMKEKTQELESHQSECLHCIQVAEAEVKEKTELLQTLSSDVSELLKDKTHLQEKLQSLEKDSQALSLTKCELENQIAQLNKEKELLVKESESLQARLSESDYEKLNVSKALEAALVEKGEFALRLSSTQEEVHQLRRGIEKLRVRIEADEKKQLHIAEKLKERERENDSLKDKVENLERELQMSEENQELVILDAENSKAEVETLKTQIEEMARSLKVFELDLVTLRSEKENLTKQIQEKQGQLSELDKLLSSFKSLLEEKEQAEIQIKEESKTAVEMLQNQLKELNEAVAALCGDQEIMKATEQSLDPPIEEEHQLRNSIEKLRARLEADEKKQLCVLQQLKESEHHADLLKGRVENLERELEIARTNQEHAALEAENSKGEVETLKAKIEGMTQSLRGLELDVVTIRSEKENLTNELQKEQERISELEIINSSFENILQEKEQEKVQMKEKSSTAMEMLQTQLKELNERVAALHNDQEACKAKEQNLSSQVECLELEKAQLLQGLDEAKNNYIVLQSSVNGLIQEVEDGKQKLEKKDEEISRLKNQIQDQEQLVSKLSQVEGEHQLWKEQNLELRNLTVELEQKIQVLQSKNASLQDTLEVLQSSYKNLENELELTKMDKMSFVEKVNKMTAKETELQREMHEMAQKTAELQEELSGEKNRLAGELQLLLEEIKSSKDQLKELTLENSELKKSLDCMHKDQVEKEGKVREEIAEYQLRLHEAEKKHQALLLDTNKQYEVEIQTYREKLTSKEECLSSQKLEIDLLKSSKEELNNSLKATTQILEELKKTKMDNLKYVNQLKKENERAQGKMKLLIKSCKQLEEEKEILQKELSQLQAAQEKQKTGTVMDTKVDELTTEIKELKETLEEKTKEADEYLDKYCSLLISHEKLEKAKEMLETQVAHLCSQQSKQDSRGSPLLGPVVPGPSPIPSVTEKRLSSGQNKASGKRQRSSGIWENGRGPTPATPESFSKKSKKAVMSGIHPAEDTEGTEFEPEGLPEVVKKGFADIPTGKTSPYILRRTTMATRTSPRLAAQKLALSPLSLGKENLAESSKPTAGGSRSQKVKVAQRSPVDSGTILREPTTKSVPVNNLPERSPTDSPREGLRVKRGRLVPSPKAGLESNGSENCKVQ

SEQ ID NO: 43191 - protein, 567 aa, Homo sapiens [sequence omitted]

SEQ ID NO: 43192 - protein, 1863 aa, Homo sapiens
MLMYRGEALEDFTGPDCRFVNFKKGDPVYVYYKLARGWPEVWAGSVGRTFGYFPKDLIQVVHEYTKEELQVPTDETDFVCFDGGRDDFHNYNVEELLGFLELYNSAATDSEKAVEKTLQDMEKNPELSKEREPEPEPVEANSEESDSVFSENTEDLQEQFTTQKHHSHANSQANHAQGEQASFESFEEMLQDKLKVPESENNKTSNSSQVSNEQDKIDAYKLLKKEMTLDLKTKFGSTADALVSDDETTRLVTSLEDDFDEELDTEYYAVGKEDEENQEDFDELPLLTFTDGEDMKTPAKSGVEKYPTDKEQNSNEEDKVQLTVPPGIKNDDKNILTTWGDTIFSIVTGGEETRDTMDLESSSSEEEKEDDDDALVPDSKQGKPQSATDYSDPDNVDDGLFIVDIPKTNNDKEVNAEHHIKGKGRGVQESKRGLVQDKTELEDENQEGMTVHSSVHSNNLNSMPAAEKGKDTLKSAYDDTENDLKGAAIHISKGMLHEEKPGEQILEGGSESESAQKAAGNQMNDRKIQQESLGSAPLMGDDHPNASRDSVEGDALVNGAKLHTLSVEHQREELKEELVLKTQNQPRFSSPDEIDLPRELEDEVPILGRNLPWQQERDVAATASKQMSEKIRLSEGEAKEDSLDEEFFHHKAMQGTEVGQTDQTDSTGGPAFLSKVEEDDYPSEELLEDENAINAKRSKEKNPGNQGRQFDVNLQVPDRAVLGTIHPDPEIEESKQETSMILDSEKTSETAAKGVNTGGREPNTMVEKERPLADKKAQRPFERSDFSDSIKIQTPELGEVFQNKDSDYLKNDNPEEHLKTSGLAGEPEGELSKEDHENTEKYMGTESQGSAAAEPEDDSFHWTPHTSVEPGHSDKREDLLIISSFFKEQQSLQRFQKYFNVHELEALLQEMSSKLKSAQQESLPYNMEKVLDKVFRASESQILSIAEKMLDTRVAENRDLGMNENNIFEEAAVLDDIQDLIYFVRYKHSTAEETATLVMAPPLEEGLGGAMEEMQPLHEDNFSREKTAELNVQVPEEPTHLDQRVIGDTHASEVSQKPNTEKDLDPGPVTTEDTPMDAIDANKQPETAAEEPASVTPLENAILLIYSFMFYLTKSLVATLPDDVQPGPDFYGLPWKPVFITAFLGIASFAIFLWRTVLVVKDRVYQVTEQQISEKLKTIMKENTELVQKLSNYEQKIKESKKHVQETRKQNMILSDEAIKYKDKIKTLEKNQEILDDTAKNLRVMLESEREQNVKNQDLISENKKSIEKLKDVISMNASEFSEVQIALNEAKLSEEKVKSECHRVQEENARLKKKKEQLQQEIEDWSKLHAELSEQIKSFEKSQKDLEVALTHKDDNINALTNCITQLNLLECESESEGQNKGGNDSDELANGEVGGDRNEKMKNQIKQMMDVSRTQTAISVVEEDLKLLQLKLRASVSTKCNLEDQVKKLEDDRNSLQAAKAGLEDECKTLRQKVEILNELYQQKEMALQKKLSQEEYERQEREHRLSAADEKAVSAAEEVKTYKRRIEEMEDELQKTERSFKNQIATHEKKAHENWLKARAAERAIAEEKREAANLRHKLLELTQKMAMLQEEPVIVKPMPGKPNTQNPPRRGPLSQNGSFGPSPVSGGECSPPLTVEPPVRPLSATLNRRDMPRSEFGSVDGPLPHPRWSAEASGKPSPSDPGSGTATMMNSSSRGSSPTRVLDEGKVNMAPKGPPPFPGVPLMSTPMGGPVPPPIRYGPPPQLCGPFGPRPLPPPFGPGMRPPLGLREFAPGVPPGRRDLPLHPRGFLPGHAPFRPLGSLGPREYFIPGTRLPPPTHGPQEYPPPPAVRDLLPSGSRDEPPPASQSTSQDCSQALKQSP

SEQ ID NO: 43193 - protein, 1522 aa, Homo sapiens
MSNGNNDFVVLSNSSIATSAANPSPLTPCDGDHAAQQLTPKEATRTKVSPNGCLQLNGTVKSSFLPLDNQRMPQMLPQCCHPCPYHHPLTSHSSHQECHPEAGPAAPSALASCCMQPHSEYSASLCPNHSPVYQTTCCLQPSPSFCLHHPWPDHFQHQPVQQHIANIRPSRPFKLPKSYAALIADWPVVVLGMCTMFIVVCALVGVLVPELPDFSDPLLGFEPRGTAIGQRLVTWNNMVKNTGYKATLANYPFKYADEQAKSHRDDRWSDDHYEREKREVDWNFHKDSFFCDVPSDRYSRVVFTSSGGETLWNLPAIKSMCNVDNSRIRSHPQFGDLCQRTTAASCCPSWTLGNYIAILNNRSSCQKIVERDVSHTLKLLRTCAKHYQNGTLGPDCWDMAARRKDQLKCTNVPRKCTKYNAVYQILHYLVDKDFMTPKTADYATPALKYSMLFSPTEKGESMMNIYLDNFENWNSSDGVTTITGIEFGIKHSLFQDYLLMDTVYPAIAIVIVLLVMCVYTKSMFITLMTMFAIISSLIVSYFLYRVVFHFEFFPFMNLTALIILVGIGADDAFVLCDVWNYTKFDKPHAETSETVSITLQHAALSMFVTSFTTAAAFYANYVSNITAIRCFGVYAGTAILVNYVLMVTWLPAVVVLHERYLLNIFTCFKKPQQQIYDNKSCWTVACQKCHKVLFAISEASRIFFEKVLPCIVIKFRYLWLFWFLALTVGGAYIVCINPKMKLPSLELSEFQVFRSSHPFERYDAEYKKLFMFERVHHGEELHMPITVIWGVSPEDNGNPLNPKSKGKLTLDSSFNIASPASQAWILHFCQKLRNQTFFYQTDEQDFTSCFIETFKQWMENQDCDEPALYPCCSHWSFPYKQEIFELCIKRAIMELERSTGYHLDSKTPGPRFDINDTIRAVVLEFQSTYLFTLAYEKMHQFYKEVDSWISSELSSAPEGLSNGWFVSNLEFYDLQDSLSDGTLIAMGLSVAVAFSVMLLTTWNIIISLYAIISIAGTIFVTVGSLVLLGWELNVLESVTISVAVGLSVDFAVHYGVAYRLAPDPDREGKVIFSLSRVGSAMAMAALTTFVAGAMMMPSTVLAYTQLGTFMMLIMCISWAFATFFFQCMCRCLGPQGTCGQIPLPKKLQCSAFSHALSTSPSDKGQSKTHTINAYHLDPRGPKSELEHEFYELEPLASHSCTAPEKTTYEETHICSEFFNSQAKNLGMPVHAAYNSELSKSTESDAGSALLQPPLEQHTVCHFFSLNQRCSCPDAYKHLNYGPHSCQQMGDCLCHQCSPTTSSFVQIQNGVAPLKATHQAVEGFVHPITHIHHCPCLQGRVKPAGMQNSLPRNFFLHPVQHIQAQEKIGKTNVHSLQRSIEEHLPKMAEPSSFVCRSTGSLLKTCCDPENKQRELCKNRDVSNLESSGGTENKAGGKVELSLSQTDASVNSEHFNQNEPKVLFNHLMGEAGCRSCPNNSQSCGRIVRVKCNSVDCQMPNMEANVPAVLTHSELSGESLLIKTL

SEQ ID NO: 43194 - protein, 360 aa, Homo sapiens [sequence omitted]

SEQ ID NO: 43195 - protein, 397 aa, Homo sapiens
MFGLPVFLFLLLLMCKQKDPSLLNFPPPLPALYELWETRVFGVYLLWFLIQVLFYLLPIGKVVEGTPLIDGRRLKYRLNGFYAFILTSAVIGTSLFQGVEFHYVYSHFLQFALAATVFCVVLSVYLYMRSLKAPRNDLSPASSGNAVYDFFIGRELNPRIGTFDLKYFCELRPGLIGWVVINLVMLLAEMKIQDRAVPSLAMILVNSFQLLYVVDALWNEEALLTTMDIIHDGFGFMLAFGDLVWVPFIYSFQAFYLVSHPNEVSWPMASLIIVLKLCGYVIFRGANSQKNAFRKNPSDPKLAHLKTIHTSTGKNLLVSGWWGFVRHPNYLGDLIMALAWSLPCGFNHILPYFYIIYFTMLLVHREARDEYHCKKKYGVAWEKYCQRVPYRIFPYIY

SEQ ID NO: 43196 - protein, 21 aa, Homo sapiens
MIIAHCILDLLGSSGPLASAS

SEQ ID NO: 43197 - protein, 806 aa, Homo sapiens
MDSPFLELWQSKAVSIREQLGLGDRPNDSYCYNSAKNSTVLQGVTFGGIPTVLLIDVSCFLFLILVFSIIRRRFWDYGRIALVSEADSESRFQRLSSTSSSGQQDFENELGCCPWLTAIFRLHDDQILEWCGEDAIHYLSFQRHIIFLLVVVSFLSLCVILPVNLSGDLLDKDPYSFGRTTIANLQTDNDLLWLHTIFAVIYLFLTVGFMRHHTQSIKYKEENLVRRTLFITGLPRDARKETVESHFRDAYPTCEVVDVQLCYNVAKLIYLCKEKKKTEKSLTYYTNLQVKTGQRTLINPKPCGQFCCCEVLGCEWEDAISYYTRMKDRLLERITEEERHVQDQPLGMAFVTFQEKSMATYILKDFNACKCQSLQCKGEPQPSSHSRELYTSKWTVTFAADPEDICWKNLSIQGLRWWLQWLGINFTLFLGLFFLTTPSIILSTMDKFNVTKPIHALNNPIISQFFPTLLLWSFSALLPSIVYYSTLLESHWTKSGENQIMMTKVYIFLIFMVLILPSLGLTSLDFFFRWLFDKTSSEASIRLECVFLPDQGAFFVNYVIASAFIGNGMELLRLPGLILYTFRMIMAKTAADRRNVKQNQAFQYEFGAMYAWMLCVFTVIVAYSITCPIIAPFGLIYILLKHMVDRHNLYFVYLPAKLEKGIHFAAVNQALAAPILCLFWLYFFSFLRLGMKAPATLFTFLVLLLTILVCLAHTCFGCFKHLSPLNYKTEEPASDKGSEAEAHMPPPFTPYVPRILNGLASERTALSPQQQQQQTYGAIHNISGTIPGQCLAQSATGSVAAAPQEA

SEQ ID NO: 43198 - protein, 368 aa, Homo sapiens [sequence omitted]

SEQ ID NO: 43199 - protein, 449 aa, Homo sapiens
MSTPDKKASQKIGFRLRNLLKLPKAHKWCIYEWFYSNIDKPLFEGDNDFCVCLKESFPNLKTRKLTRVEWGKIRRLMGKPRRCSSAFFEEERSALKQKRQKIRLLQQRKVADVSQFKDLPDEIPLPLVIGTKVTARLRGVHDGLFTGQIDAVDTLNATYRVTFDRTGLGTHTIPDYEVLSNEPHETMPIAAFGQKQRPSRFFMTPPRLHYTPPLQSPIIDNDPLLGQSPWRSKISGSDTETLGGFPVEFLIQVTRLSKILMIKKEHIKKLREMNTEAEKLKSYSMPISIEFQRRYATIVLELEQLNKDLNKVLHKVQQYCYELAPDQGLQPADQPTDMRRRCEEEAQEIVRHANSSTGQPCVENENLTDLISRLTAILLQIKCLAEGGDLNSFEFKSLTDSLNDIKSTIDASNISCFQNNVEIHVAHIQSGLSQMGNLHAFAANNTNRD

SEQ ID NO: 43200 - protein, 980 aa, Homo sapiens
MAIMVQSPMFDGKVPHWYHFSCFWKVGHSIRHPDVEVDGFSELRWDDQQKVKKTAEAGGVTGKGQDGIGSKAEKTLGDFAAEYAKSNRSTCKGCMEKIEKGQVRLSKKMVDPEKPQLGMIDRWYHPGCFVKNREELGFRPEYSASQLKGFSLLATEDKEALKKQLPGVKSEGKRKGDEVDGVDEVAKKKSKKEKDKDSKLEKALKAQNDLIWNIKDELKKVCSTNDLKELLIFNKQQVPSGESAILDRVADGMVFGALLPCEECSGQLVFKSDAYYCTGDVTAWTKCMVKTQTPNRKEWVTPKEFREISYLKKLKVKKQDRIFPPETSASVAATPPPSTASAPAAVNSSASADKPLSNMKILTLGKLSRNKDEVKAMIEKLGGKLTGTANKASLCISTKKEVEKMNKKMEEVKEANIRVVSEDFLQDVSASTKSLQELFLAHILSPWGAEVKAEPVEVVAPRGKSGAALSKKSKGQVKEEGINKSEKRMKLTLKGGAAVDPDSGLEHSAHVLEKGGKVFSATLGLVDIVKGTNSYYKLQLLEDDKENRYWIFRSWGRVGTVIGSNKLEQMPSKEDAIEHFMKLYEEKTGNAWHSKNFTKYPKKFYPLEIDYGQDEEAVKKLTVNPGTKSKLPKPVQDLIKMIFDVESMKKAMVEYEIDLQKMPLGKLSKRQIQAAYSILSEVQQAVSQGSSDSQILDLSNRFYTLIPHDFGMKKPPLLNNADSVQAKVEMLDNLLDIEVAYSLLRGGSDDSSKDPIDVNYEKLKTDIKVVDRDSEEAEIIRKYVKNTHATTHNAYDLEVIDIFKIEREGECQRYKPFKQLHNRRLLWHGSRTTNFAGILSQGLRIAPPEAPVTGYMFGKGIYFADMVSKSANYCHTSQGDPIGLILLGEVALGNMYELKHASHISKLPKGKHSVKGLGKTTPDPSANISLDGVDVPLGTGISSGVNDTSLLYNEYIVYDIAQVNLKYLLKLKFNFKTSLW

SEQ ID NO: 43201 - protein, 359 aa, Homo sapiens
MLFVPVTLCMIVVVATIKSVRFYTEKNGQLIYTPFTEDTPSVGQRLLNSVLNTLIMISVIVVMTIFLVVLYKYRCYKFIHGWLIMSSLMLLFLFTYIYLGEVLKTYNVAMDYPTLLLTVWNFGAVGMVCIHWKGPLVLQQAYLIMISALMALVFIKYLPEWSAWVILGAISVYDLVAVLCPKGPLRMLVETAQERNEPIFPALIYSSAMVWTVGMAKLDPSSQGALQLPYDPEMEEDSYDSFGEPSYPEVFEPPLTGYPGEELEEEEERGVKLGLGDFIFYSVLVGKAAATGSGDWNTTLACFVAILIGLCLTLLLLAVFKKALPALPISITFGLIFYFSTDNLVRPFMDTLASHQLYI

SEQ ID NO: 43202 - protein, 97 aa, Homo sapiens
MRKDLNDARDLHGQAESAAAVWKGHVMDRRKKALTDYKKLRAFFVEEEEHFLQEAEKEEGLPEDELADPTERFRSLLQAVSELEKKHRNLGLSMLLQ

SEQ ID NO: 43203 - protein, 106 aa, Homo sapiens [sequence omitted]

SEQ ID NO: 43204 - protein, 1090 aa, Homo sapiens [sequence omitted]

SEQ ID NO: 43205 - protein, 579 aa, Homo sapiens [sequence omitted]

SEQ ID NO: 43206 - protein, 716 aa, Homo sapiens
MKEDFDVDHFVSDCRKRVQLEELRDDLELYYKLLKTAMVELINKDYADFVNLSTNLVGMDKALNQLSVPLGQLREEVLSLRSSVSEGIRAVDERMSKQEDIRKKKMCVLRLIQVIRSVEKIEKILNSQSSKETSALEASSPLLTGQILERIATEFNQLQFHAVQSKGMPLLDKVRPRIAGITAMLQQSLEGLLLEGLQTSDVDIIRHCLRTYATIDKTRDAEALVGQVLVKPYIDEVIIEQFVESHPNGLQVMYNKLLEFVPHHCRLLREVTGGAISSEKGNTVPGYDFLVNSVWPQIVQGLEEKLPSLFNPGNPDAFHEKYTISMDFVRRLERQCGSQASVKRLRAHPAYHSFNKKWNLPVYFQIRFREIAGSLEAALTDVLEDAPAESPYCLLASHRTWSSLRRCWSDEMFLPLLVHRLWRLTLQILARYSVFVNELSLRPISNESPKEIKKPLVTGSKEPSITQGNTEDQGSGPSETKPVVSISRTQLVYVVADLDKLQEQLPELLEIIKPKLEMIGFKNFSSISAALEDSQSSFSACVPSLSSKIIQDLSDSCFGFLKSALEVPRLYRRTNKEVPTTASSYVDSALKPLFQLQSGHKDKLKQAIIQQWLEGTLSESTHKYYETVSDVLNSVKKMEESLKRLKQARKTTPANPVGPSGGMSDDDKIRLQLALDVEYLGEQIQKLGLQASDIKSFSALAELVAAAKDQATAEQP

SEQ ID NO: 43207 - protein, 476 aa, Homo sapiens
MAPAGVSLRATILCLLAWAGLAAGDRVYIHPFHLVIHNESTCEQLAKANAGKPKDPTFIPAPIQAKTSPVDEKALQDQLVLVAAKLDTEDKLRAAMVGMLANFLGFRIYGMHSELWGVVHGATVLSPTAVFGTLASLYLGALDHTADRLQAILGVPWKDKNCTSRLDAHKVLSALQAVQGLLVAQGRADSQAQLLLSTVVGVFTAPGLHLKQPFVQGLALYTPVVLPRSLDFTELDVAAEKIDRFMQAVTGWKTGCSLMGASVDSTLAFNTYVHFQGKMKGFSLLAEPQEFWVDNSTSVSVPMLSGMGTFQHWSDIQDNFSVTQVPFTESACLLLIQPHYASDLDKVEGLTFQQNSLNWMKKLSPRTIHLTMPQLVLQGSYDLQDLLAQAELPAILHTELNLQKLSNDRIRVGEVLNSIFFELEADEREPTESTQQLNKPEVLEVTLNRPFLFAVYDQSATALHFLGRVANPLSTA

SEQ ID NO: 43208 - protein, 692 aa, Homo sapiens
MLQEEPDLVSAIYGRGIAYGKKGLHDIKNAELALFELSRVITLEPDRPEVFEQRAEILSPLGRINEAVNDLTKAIQLQPSARLYRHRGTLYFISEDYATAHEDFQQSLELNKNQPIAMLYKGLTFFHRGLLKEAIESFKEALKQKVDFIDAYKSLGQAYRELGNFEAATESFQKALLLNQNHVQTLQLRGMMLYHHGSLQEALKNFKRCLQLEPYNEVCQYMKGLSHVAMGQFYEGIKAQTKVMLNDPLPGQKASPEYLKVKYLREYSRYLHAHLDTPLTEYNIDVDLPGSFKDHWAKNLPFLIEDYEEQPGLQPHIKDVLHQNFESYKPEVQELICVADRLGSLMQYETPGFLPNKRIHRAMGLAALEVMQAVQRTWTNSKVRMNGKTRLMQWRDMFDIAVKWRRIADPDQPVLWLDQMPARSLSRGFNNHINLIRGQVINMRYLEYFEKILHFIKDRILVYHGANNPKGLLEVREALEKVHKVEDLLPIMKQFNTKTKDGFTVNTKVPSLKDQGKEYDGFTITITGDKVGNILFSVETQTTEERTQLYHAEIDALYKDLTAKGKVLILSSEFGEADAVCNLILSLVYYFYNLMPLSRGSSVIAYSVIVGALMASGKEVAGKIPKGKLVDFEAMTAPGSEAFSKVAKSWMNLKSISPSYKTLPSVSETFPTLRSMIEVLNTDSSPRCLKKL

SEQ ID NO: 43209 - protein, 638 aa, Homo sapiens
MLQILSPLGRINEAVNDLTKAIQLQPSARLYRHRGTLYFISEDYATAHEDFQQSLELNKNQPIAMLYKGLTFFHRGLLKEAIESFKEALKQKVDFIDAYKSLGQAYRELGNFEAATESFQKALLLNQNHVQTLQLRGMMLYHHGSLQEALKNFKRCLQLEPYNEVCQYMKGLSHVAMGQFYEGIKAQTKVMLNDPLPGQKASPEYLKVKYLREYSRYLHAHLDTPLTEYNIDVDLPGSFKDHWAKNLPFLIEDYEEQPGLQPHIKDVLHQNFESYKPEVQELICVADRLGSLMQYETPGFLPNKRIHRAMGLAALEVMQAVQRTWTNSKVRMNGKTRLMQWRDMFDIAVKWRRIADPDQPVLWLDQMPARSLSRGFNNHINLIRGQVINMRYLEYFEKILHFIKDRILVYHGANNPKGLLEVREALEKVHKVEDLLPIMKFNTKTKDGFTVNTKVPSLKDQGKEYDGFTITITGDKVGNILFSVETQTTEERTQLYHAEIDALYKDLTAKGKVLILSSEFGEADAVCNLILSLVYYFYNLMPLSRGSSVIAYSVIVGALMASGKEVAGKIPKGKLVDFEAMTAPGSEAFSKVAKSWMNLKSISPSYKTLPSVSETFPTLRSMIEVLNTDSSPRCLKKL

SEQ ID NO: 43210 - protein, 104 aa, Homo sapiens
MTAKKKPNFILLLKALLLSSYGKLLLIPAVIWEHDYTSVCLKLIKVFVLTSNFQAIRVTLNINRKLSFLAVLSGLLLESIMVYFFQSMEWDVGSDYAIFKSQDF

SEQ ID NO: 43211 - protein, 231 aa, Homo sapiens [sequence omitted]

SEQ ID NO: 43212 - protein, 230 aa, Homo sapiens
MASAALAAEPSPLPGSLIRGQRKSASSFFKELREERHCAPSGTPTGPEILAAAVPPSSLKNNREQVEVVEFHSNKKRKLTPDHNKNTKANPSVLERDVDTQEFNLEKARLEVHRFGITGYGKGKERILEQERAIMLGAKPPKKSYVNYKVLQEQIKEKKAAKEEEKRLAQETDIFKKKKRKGQEDRKSKKKSAPSILSNGRIGQVGKFKNGTLILSPVDIKKINSSRVAK

SEQ ID NO: 43213 - protein, 721 aa, Homo sapiens
MSDSGASRLRRQLESGGFEARLYVKQLSQQSDGDRDLQEHRQRIQALAEETAQNLKRNVYQNYRQFIETAREISYLESEMYQLSHLLTEQKSSLESIPLTLLPAAAAAGAAAASGGEEGVGGAGGRDHLRGQAGFFSTPGGASRDGSGPGEEGKQRTLTTLLEKVEGCRHLLETPGQYLVYNGDLVEYDADHMAQLQRVHGFLMNDCLLVATWLPQRRGMYRYNALYSLDGLAVVNVKDNPPMKDMFKLLMFPESRIFQAENAKIKREWLEVLEDTKRALSEKRRREQEEAAAPRGPPQVTSKATNPFEDDEEEEPAVPEVEEEKVDLSMEWIQELPEDLDVCIAQRDFEGAVDLLDKLNHYLEDKPSPPPVKELRAKVEERVRQLTEVLVFELSPDRSLRGGPKATRRAVSQLIRLGQCTKACELFLRNRAAAVHTAIRQLRIEGATLLYIHKLCHVFFTSLLETAREFEIDFAGTDSGCYSAFVVWARSAMGMFVDAFSKQVFDSKESLSTAAECVKVAKEHCQQLGDIGLDLTFIIHALLVKDIQGALHSYKEIIIEATKHRNSEEMWRRMNLMTPEALGKLKEEMKSCGVSNFEQYTGDDCWVNLSYTVVAFTKQTMGFLEEALKLYFPELHMVLLESLVEIILVAVQHVDYSLRCEQDPEKKAFIRQNASFLYETVLPVVEKRFEEGVGKPAKQLQDLRNASRLIRVNPESTTSVV

SEQ ID NO: 43214 - protein, 73 aa, Homo sapiens
MELFSQLFIQAVRQTLSTPGTIILGTIPVPKGKPLALVEEIRNRKDVKVFNVTKENRNHLLPDIVTCVQSSRK

SEQ ID NO: 43215 - protein, 1286 aa, Homo sapiens [sequence omitted]

SEQ ID NO: 43216 - protein, 993 aa, Homo sapiens
MEDRGTPINKRPVLGYRNLNLFKLFRLVHKLGGFDNIESGAVWKQVYQDLGIPVLNSAAGYNVKCAYKKYLYGFEEYCRSANIEFQMALPEKVVNKQCKECENVKEIKVKEENETEIKEIKMEEERNIIPREEKPIEDEIERKENIKPSLGSKKNLLESIPTHSDQEKEVNIKKPEDNENLDDKDDDTTRVDESLNIKVEAEEEKAKSGDETNKEEDEDDEEAEEEEEEEEEEEDEDDDDNNEEEEFECYPPGMKVQVRYGRGKNQKMYEASIKDSDVEGGEVLYLVHYCGWNVRYDEWIKADKIVRPADKNVPKIKHRKKIKNKLDKEKDKDEKYSPKNCKLRRLSKPPFQTNPSPEMVSKLDLTDAKNSDTAHIKSIEITSILNGLQASESSAEDSEQEDERGAQDMDNNGKEESKIDHLTNNRNDLISKEEQNSSSLLEENKVHADLVISKPVSKSPERLRKDIEVLSEDTDYEEDEVTKKRKDVKKDTTDKSSKPQIKRGKRRYCNTEECLKTGSPGKKEEKAKNKESLCMENSSNSSSDEDEEETKAKMTPTKKYNGLEEKRKSLRTTGFYSGFSEVAEKRIKLLNNSDERLQNSRAKDRKDVWSSIQGQWPKKTLKELFSDSDTEAAASPPHPAPEEGVAEESLQTVAEEESCSPSVELEKPPPVNVDSKPIEEKTVEVNDRKAEFPSSGSNSVLNTPPTTPESPSSVTVTEGSRQQSSVTVSEPLAPNQEEVRSIKSETDSTIEVDSVAGELQDLQSEGNSSPAGFDASVSSSSSNQPEPEHPEKACTGQKRVKDAQGGGSSSKKQKRSHKATVVNNKKKGKGTNSSDSEELSAGESITKSQPVKSVSTGMKSHSTKSPARTQSPGKCGKNGDKDPDLKEPSNRLPKVYKWSFQMSDLENMTSAERITILQEKLQEIRKHYLSLKSEVASIDRRRKRLKKKERESAATSSSSSSPSSSSITAAVMLTLAEPSMSSASQNGMSVECR

SEQ ID NO: 43217 - protein, 907 aa, Homo sapiens
MEDRGTPINKRPVLGYRNLNLFKLFRLVHKLGGFDNIESGAVWKQVYQDLGIPVLNSAAGYNVKCAYKKYLYGFEEYCRSANIEFQMALPEKVVNKQCKECENVKEIKVKEENETEIKEIKMEEERNIIPREEKPIEDEIERKENIKPSLGSKKNLLESIPTHSDQEKEVNIKKPEDNENLDDKDDDTTRVDESLNIKVEAEEEKAKSGYDEWIKADKIVRPADKNVPKIKHRKKIKNKLDKEKDKDEKYSPKNCKLRRLSKPPFQTNPSPEMVSKLDLTDAKNSDTAHIKSIEITSILNGLQASESSAEDSEQEDERGAQDMDNNGKEESKIDHLTNNRNDLISKEEQNSSSLLEENKVHADLVISKPVSKSPERLRKDIEVLSEDTDYEEDEVTKKRKDVKKDTTDKSSKPQIKRGKRRYCNTEECLKTGSPGKKEEKAKNKESLCMENSSNSSSDEDEEETKAKMTPTKKYNGLEEKRKSLRTTGFYSGFSEVAEKRIKLLNNSDERLQNSRAKDRKDVWSSIQGQWPKKTLKELFSDSDTEAAASPPHPAPEEGVAEESLQTVAEEESCSPSVELEKPPPVNVDSKPIEEKTVEVNDRKAEFPSSGSNSVLNTPPTTPESPSSVTVTEGSRQQSSVTVSEPLAPNQEEVRSIKSETDSTIEVDSVAGELQDLQSEGNSSPAGFDASVSSSSSNQPEPEHPEKACTGQKRVKDAQGGGSSSKKQKRSHKATVVNNKKKGKGTNSSDSEELSAGESITKSQPVKSVSTGMKSHSTKSPARTQSPGKCGKNGDKDPDLKEPSNRLPKVYKWSFQMSDLENMTSAERITILQEKLQEIRKHYLSLKSEVASIDRRRKRLKKKERESAATSSSSSSPSSSSITAAVMLTLAEPSMSSASQNGMSVECR

SEQ ID NO: 43218 - protein, 384 aa, Homo sapiens
METPPWDPARNDSLPPTLTPAVPPYVKLGLTVVYTVFYALLFVFIYVQLWLVLRYRHKRLSYQSVFLFLCLFWASLRTVLFSFYFKDFVAANSLSPFVFWLLYCFPVCLQFFTLTLMNLYFTQVIFKAKSKYSPELLKYRLPLYLASLFISLVFLLVNLTCAVLVKTGNWERKVIVSVRVAINDTLFVLCAVSLSICLYKISKMSLANIYLESKGSSVCQVTAIGVTVILLYTSRACYNLFILSFSQNKSVHSFDYDWYNVSDQADLKNQLGDAGYVLFGVVLFVWELLPTTLVVYFFRVRNPTKDLTNPGMVPSHGFSPRSYFFDNPRRYDSDDDLAWNIAPQGLQGGFAPDYYDWGQQTNSFLAQAGTLQDSTLDPDKPSLG

SEQ ID NO: 43219 - protein, 299 aa, Homo sapiens
MLSLNNLQNIIYNPVIPFVGTIPDQLDPGTLIVIRGHVPSDADRFQVDLQNGSSMKPRADVAFHFNPRFKRAGCIVCNTLINEKWGREEITYDTPFKREKSFEIVIMVLKDKFQVPKSGTPQLPSNRGGDISKIAPRTVYTKSKDSTVNHTLTCTKIPPMNYVSKRLPFAARLNTPMGPGRTVVVKGEVNANAKSFNVDLLAGKSKDIALHLNPRLNIKAFVRNSFLQESWGEEERNITSFPFSPGMYFEMIIYCDVREFKVAVNGVHSLEYKHRFKELSSIDTLEINGDIHLLEVRSW

SEQ ID NO: 43220 - protein, 1552 aa, Homo sapiens
MLQSRSVDKQHAVINYDASTDEHLVKDLGSLNGTFVNDVRIPEQTYITLKLEDKLRFGYDTNLFTVVQGEMRVPEEALKHEKFTIQLQLSQKSSESELSKSASAKSIDSKVADAATEVQHKTTEALKSEEKAMDISAMPRGTPLYGQPSWWGDDEVDEKRAFKTNGKPEEKNHEAGTSGCGIDAKQVEEQSAAANEEVLFPFCREPSYFEIPTKEFQQPSQITESTIHEIPTKDTPSSHITGAGHASFTIEFDDSTPGKVTIRDHVTKFTSDQRHKSKKSSPGTQDLLGIQTGMMAPENKVADWLAQNNPPQMLWERTEEDSKSIKSDVPVYLKRLKGNKHDDGTQSDSENAGAHRRCSKRATLEEHLRRHHSEHKKLQKVQATEKHQDQAVTSSAHHRGGHGVPHGKLLKQKSEEPSVSIPFLQTALLRSSGSLGHRPSQEMDKMLKNQATSATSEKDNDDDQSDKGTYTIELENPNSEEVEARKMIDKVFGVDDNQDYNRPVINEKHKDLIKDWALSSAAAVMEERKPLTTSGFHHSEEGTSSSGSKRWVSQWASLAANHTRHDQEERIMEFSAPLPLENETEISESGMTVRSTGSATSLASQGERRRRTLPQLPNEEKSLESHRAKVVTQRSEIGEKQDTELQEKETPTQVYQKDKQDADRPLSKMNRAVNGETLKTGGDNKTLLHLGSSAPGKEKSETDKETSLVKQTLAKLQQQEQREEAQWTPTKLSSKNVSGQTDKCREETFKQESQPPEKNSGHSTSKGDRVAQSESKRRKAEEILKSQTPKGGDKKESSKSLVRQGSFTIEKPSPNIPIELIPHINKQTSSTPSSLALTSASRIRERSESLDPDSSMDTTLILKDTEAVMAFLEAKLREDNKTDEGPDTPSYNRDNSISPESDVDTASTISLVTGETERKSTQKRKSFTSLYKDRCSTGSPSKDVTKSSSSGAREKMEKKTKSRSTDVGSRADGRKFVQSSGRIRQPSVDLTDDDQTSSVPHSAISDIMSSDQETYSCKPHGRTPLTSADEHVHSKLEGSKVTKSKTSPVVSGSSSKSTTLPRPRPTRTSLLRRARLGEASDSELADADKASVASEVSTTSSTSKPPTGRRNISRIDLLAQPRRTRLGSLSARSDSEATISRSSASSRTAEAIIRSGARLVPSDKFSPRIRANSISRLSDSKVKSMTSAHGSASVNSRWRRFPTDYASTSEDEFGSNRNSPKHTRLRTSPALKTTRLQSAGSAMPTSSSFKHRIKEQEDYIRDWTAHREEIARISQDLALIAREINDVAGEIDSVTSSGTAPSTTVSTAATTPGSAIDTREELVDRVFDESLNFRKIPPLVHSKTPEGNNGRSGDPRPQAAEPPDHLTITRRRTWSRDEVMGDNLLLSSVFQFSKKIRQSIDKTAGKIRILFKDKDRNWDDIESKLRAESEVPIVKTSSMEISSILQELKRVEKQLQAINAMIDPDGTLEALNNMGFPSAMLPSPPKQKSSPVNNHHSPGQTPTLGQPEARALHPAAVSAAAEFENAESEADFSIHFNRFNPDGEEEDVTVQE

SEQ ID NO: 43221 - protein, 1428 aa, Homo sapiens
MLQSRSVDKQHAVINYDASTDEHLVKDLGSLNGTFVNDVRIPEQTYITLKLEDKLRFGYDTNLFTVVQGEMRVPEEALKHEKFTIQLQLSQKSSESELSKSASAKSIDSKVADAATEVQHKTTEALKSEEKAMDISAMPRGTPLYGQPSWWGDDEVDEKRAFKTNGKPEEKNHEAGTSGCGIDAKQVEEQSAAANEEVLFPFCREPSYFEIPTKEFQQPSQITESTIHEIPTKDTPSSHITGAGHASFTIEFDDSTPGKVTIRDHVTKFTSDQRHKSKKSSPGTQDLLGIQTGMMAPENKVADWLAQNNPPQMLWERTEEDSKSIKSDVPVYLKRLKGNKHDDGTQSDSENAGAHRRCSKRATLEEHLRRHHSEHKKLQKVQATEKHQDQAVVFGVDDNQDYNRPVINEKHKDLIKDWALSSAAAVMEERKPLTTSGFHHSEEGTSSSGSKRWVSQWASLAANHTRHDQEERIMEFSAPLPLENETEISESGMTVRSTGSATSLASQGERRRRTLPQLPNEEKSLESHRAKVVTQRSEIGEKQDTELQEKETPTQVYQKDKQDADRPLSKMNRAVNGETLKTGGDNKTLLHLGSSAPGKEKSETDKETSLVKQTLAKLQQQEQREEAQWTPTKLSSKNVSGQTDKCREETFKQESQPPEKNSGHSTSKGDRVAQSESKRRKAEEILKSQTPKGGDKKESSKSLVRQGSFTIEKPSPNIPIELIPHINKQTSSTPSSLALTSASRIRERSESLDPDSSMDTTLILKDTEAVMAFLEAKLREDNKTDEGPDTPSYNRDNSISPESDVDTASTISLVTGETERKSTQKRKSFTSLYKDRCSTGSPSKDVTKSSSSGAREKMEKKTKSRSTDVGSRADGRKFVQSSGRIRQPSVDLTDDDQTSSVPHSAISDIMSSDQETYSCKPHGRTPLTSADEHVHSKLEGSKVTKSKTSPVVSGSSSKSTTLPRPRPTRTSLLRRARLGEASDSELADADKASVASEVSTTSSTSKPPTGRRNISRIDLLAQPRRTRLGSLSARSDSEATISRSSASSRTAEAIIRSGARLVPSDKFSPRIRANSISRLSDSKVKSMTSAHGSASALKTTRLQSAGSAMPTSSSFKHRIKEQEDYIRDWTAHREEIARISQDLALIAREINDVAGEIDSVTSSGTAPSTTVSTAATTPGSAIDTREEVGDLHGEMHKLVDRVFDESLNFRKIPPLVHSKTPEGNNGRSGDPRPQAAEPPDHLTITRRRTWSRDEVMGDNLLLSSVFQFSKKIRQSIDKTAGKIRILFKDKDRNWDDIESKLRAESEVPIVKTSSMEISSILQELKRVEKQLQAINAMIDPDGTLEALNNMGFPSAMLPSPPKQKSSPVNNHHSPGQTPTLGQPEARALHPAAVSAAAEFENAESEADFSIHFNRFNPDGEEEDVTVQE

SEQ ID NO: 43222 - protein, 529 aa, Homo sapiens
MHNSWITTGEDSGVGETSKRPFSHDNADFGKAASAGEQLELEKLKLTYEEKCEIEESQLKFLRNDLAEYQRTCEDLKEQLKHKEFLLAANTCNRVGGLCLKCAQHEAVLSQTHTNVHMQTIERLVKERDDLMSALVSVRSSLADTQQREASAYEQVKQVLQISEEANFEKTKALIQCDQLRKELERQAERLEKELASQQEKRAIEKDMMKKEITKEREYMGSKMLILSQNIAQLEAQVEKVTKEKISAINQLEEIQSQLASREMDVTKVCGEMRYQLNKTNMEKDEAEKEHREFRAKTNRDLEIKDQEIEKLRIELDESKQHLEQEQQKAALAREECLRLTELLGESEHQLHLTRQEKDSIQQSFSKEAKAQALQAQQREQELTQKIQQMEAQHDKTENEQYLLLTSQNTFLTKLKEECCTLAKKLEQISQKTRSEIAQLSQEKRYTYDKLGKLQRRNEELEEQCVQHGRVHETMKQRLRQLDKHSQATAQQLVQLLSKQNQLLLERQSLSEEVDRLRTQLPSMPQSDC

SEQ ID NO: 43223 - protein, 347 aa, Homo sapiens
MDASTTHHKRKTMNDFDYLKLLGKGTFGKVILVREKASGKYYAMKILKKEVIIAKDEVAHTLTESRVLKNTRHPFLTSLKYSFQTKDRLCFVMEYVNGGELFFHLSRERVFSEDRTRFYGAEIVSALDYLHSGKIVYRDLKLENLMLDKDGHIKITDFGLCKEGITDAATMKTFCGTPEYLAPEVLEDNDYGRAVDWWGLGVVMYEMMCGRLPFYNQDHEKLFELILMEDIKFPRTLSSDAKSLLSGLLIKDPNKRLGGGPDDAKEIMRHSFFSGVNWQDVYDKKLVPPFKPQVTSETDTRYFDEEFTAQTITITPPEKYDEDGMDCMDNERRPHFPQFSYSASGRE

SEQ ID NO: 43224 - protein, 91 aa, Homo sapiens [sequence omitted]

SEQ ID NO: 43225 - protein, 200 aa, Homo sapiens [sequence omitted]

SEQ ID NO: 43226 - protein, 501 aa, Homo sapiens
MHPKETTRQLSLAVKDGLIVETLTVGCKGSKAGIEQEGYWLPGDEISIKKKNTNKQEMGTYLRFIVSRMKERAIDLNKKGKDNKHPMYRRLVHSAVDVPTIQEKVNEGKYRSYEEFKADAQLLLHNTVIFYGDSEQADIARMLYKDTCHELDELQLCKNCFYLSNARPDNWFCYPCIPNHELVWAKMKGFGFWPAKVMQKEDNQVDVRFFGHHHQRAWIPSENIQDITVNIHRLHVKRSMGWKKACDELELHQRFLREGRFWKSKNEDRGEEEAESSISSTSNEQLKVTQEPRAKKGRRNQSVEPKKEEPEPETEAVSSSQEIPTMPQPIEKVSVSTQTKKLSASSPRMLHRSTQTTNDGVCQSMCHDKYTKIFNDFKDRMKSDHKRETERVVREALEKLRSEMEEEKRQAVNKAVANMQGEMDRKCKQVKEKCKEEFVEEIKKLATQHKQLISQTKKKQWCYNCEEEAMYHCCWNTSYCSIKCQQEHWHAEHKRTCRRKR

SEQ ID NO: 43227 - protein, 556 aa, Homo sapiens [sequence omitted]

SEQ ID NO: 43228 - protein, 502 aa, Homo sapiens
MHPKETTRQLSLAVKDGLIVETLTVGCKGSKAGIEQEGYWLPGDEISIKKKNTNKQEMGTYLRFIVSRMKERAIDLNKKGKDNKHPMYRRLVHSAVDVPTIQEKVNEGKYRSYEEFKADAQLLLHNTVIFYGADSEQADIARMLYKDTCHELDELQLCKNCFYLSNARPDNWFCYPCIPNHELVWAKMKGFGFWPAKVMQKEDNQVDVRFFGHHHQRAWIPSENIQDITVNIHRLHVKRSMGWKKACDELELHQRFLREGRFWKSKNEDRGEEEAESSISSTSNEQLKVTQEPRAKKGRRNQSVEPKKEEPEPETEAVSSSQEIPTMPQPIEKVSVSTQTKKLSASSPRMLHRSTQTTNDGVCQSMCHDKYTKIFNDFKDRMKSDHKRETERVVREALEKLRSEMEEEKRQAVNKAVANMQGEMDRKCKQVKEKCKEEFVEEIKKLATQHKQLISQTKKKQWCYNCEEEAMYHCCWNTSYCSIKCQQEHWHAEHKRTCRRKR

SEQ ID NO: 43229 - protein, 1459 aa, Homo sapiens
MAVPMPSKRRSLVVQTSMDAYTPPDTSSGSEDEGSVQGDSQGTPTSSQGSINMEHWISQAIHGSTTSTTSSSSTQSGGSGAAHRLADVMAQTHIENHSAPPDVTTYTSEHSIQVERPQGSTGSRTAPKYGNAELMETGDGVPVSSRVSAKIQQLVNTLKRPKRPPLREFFVDDFEELLEVQQPDPNQPKPEGAQMLAMRGEQLGVVTNWPPSLEAALQRWGTISPKAPCLTTMDTNGKPLYILTYGKLWTRSMKVAYSILHKLGTKQEPMVRPGDRVALVFPNNDPAAFMAAFYGCLLAEVVPVPIEVPLTRKDAGSQQIGFLLGSCGVTVALTSDACHKGLPKSPTGEIPQFKGWPKLLWFVTESKHLSKPPRDWFPHIKDANNDTAYIEYKTCKDGSVLGVTVTRTALLTHCQALTQACGYTEAETIVNVLDFKKDVGLWHGILTSVMNMMHVISIPYSLMKVNPLSWIQKVCQYKAKVACVKSRDMHWALVAHRDQRDINLSSLRMLIVADGANPWSISSCDAFLNVFQSKGLRQEVICPCASSPEALTVAIRRPTDDSNQPPGRGVLSMHGLTYGVIRVDSEEKLSVLTVQDVGLVMPGAIMCSVKPDGVPQLCRTDEIGELCVCAVATGTSYYGLSGMTKNTFEVFPMTSSGAPISEYPFIRTGLLGFVGPGGLVFVVGKMDGLMVVSGRRHNADDIVATALAVEPMKFVYRGRIAVFSVTVLHDERIVIVAEQRPDSTEEDSFQWMSRVLQAIDSIHQVGVYCLALVPANTLPKTPLGGIHLSETKQLFLEGSLHPCNVLMCPHTCVTNLPKPRQKQPEIGPASVMVGNLVSGKRIAQASGRDLGQIEDNDQARKFLFLSEVLQWRAQTTPDHILYTLLNCRGAIANSLTCVQLHKRAEKIAVMLMERGHLQDGDHVALVYPPGIDLIAAFYGCLYAGCVPITVRPPHPQNIATTLPTVKMIVEVSRSACLMTTQLICKLLRSREAAAAVDVRTWPLILDTDDLPKKRPAQICKPCNPDTLAYLDFSVSTTGMLAGVKMSHAATSAFCRSIKLQCELYPSREVAICLDPYCGLGFVLWCLCSVYSGHQSILIPPSELETNPALWLLAVSQYKVRDTFCSYSVMELCTKGLGSQTESLKARGLDLSRVRTCVVVAEERPRIALTQSFSKLFKDLGLHPRAVSTSFGCRVNLAICLQPHRLWTLAEQGTSGPDPTTVYVDMRALRHDRVRLVERGSPHSLPLMESGKILPGVRIIIANPETKGPLGDSHLGEIWVHSAHNASGYFTIYGDESLQSDHFNSRLSFGDTQTIWARTGYLGFLRRTELTDANGERHDALYVVGALDEAMELRGMRYHPIDIETSVIRAHKSVTECAVFTWTNLLVVVVELDGSEQEALDLVPLVTNVVLEEHYLIVGVVVVVDIGVIPINSRGEKQRMHLRDGFLADQLDPIYVAYNM

SEQ ID NO: 43230 - protein, 453 aa, Homo sapiens [sequence omitted]

SEQ ID NO: 43231 - protein, 4 aa, Homo sapiens
MRKF

SEQ ID NO: 43232 - protein, 433 aa, Homo sapiens [sequence omitted]

SEQ ID NO: 43233 - protein, 319 aa, Homo sapiens
MANGLMGLFEKRRFRKFLVYVANFDEKDPRTFEGIDPKKTTMRDVYKKFDLGQDVIDFTGHALALYRTDDYLDQPCYETINRIKLYSESLARYGKSPYLYPLYGLGELPQGFARLSAIYGGTYMLNKPIEEIIVQNGKVIGVKSEGEIARCKQLICDPSYVKDRVEKVGQVIRVICILSHPIKNTNDANSCQIIIPQNQVNRKSDIYVCMISFAHNVAAQGKYIAIVSTTVETKEPEKEIRPALELLEPIEQKFVSISDLLVPKDLGTESQIFISRTYDATTHFETTCDDIKNIYKRMTGSEFDFEEMKRKKNDIYGED

SEQ ID NO: 43234 - protein, 364 aa, Homo sapiens
MANGQLVKMLLYTEVTRYLDFKVTEGSFVYKGGKIYKVPSTEAEALASSLMGLFEKRRFRKFLVYVANFDEKDPRTFEGIDPKKTTMRDVYKKFDLGQDVIDFTGHALALYRTDDYLDQPCYETINRIKLYSESLARYGKSPYLYPLYGLGELPQGFARLSAIYGGTYMLNKPIEEIIVQNGKVIGVKSEGEIARCKQLICDPSYVKDRVEKVGQVIRVICILSHPIKNTNDANSCQIIIPQNQVNRKSDIYVCMISFAHNVAAQGKYIAIVSTTVETKEPEKEIRPALELLEPIEQKFVSISDLLVPKDLGTESQIFISRTYDATTHFETTCDDIKNIYKRMTGSEFDFEEMKRKKNDIYGED

SEQ ID NO: 43235 - protein, 115 aa, Homo sapiens
MPSKSPSTGTTEISSHESSHGTPSQTTAKNWELTASASHQPPGVYPQGHSDTTVAISTSTVLLCGLSAVSLLACYLKSRQTPPLASVEMEAMEALPVTWGTSSRDEDLENCSHHL

SEQ ID NO: 43236 - protein, 100 aa, Homo sapiens
MPSKSPSTGTTEISSHESSHGTPSQTTAKNWELTASASHQPPGVYPQGHSDTTVAISTSTVLLCGLSAVSLLACYLKSRASVCSCHPRSAGHTCSVGSVC

SEQ ID NO: 43237 - protein, 232 aa, Homo sapiens [sequence omitted]

SEQ ID NO: 43238 - protein, 892 aa, Homo sapiens
MTEFSVKSTIISRYAFTTVSCRMLNRASEDQDIEFQMQIPAAAFITNFTMLIGDKVYQGEITEREKKSGDRVKEKRNKTTEENGEKGTEIFRASAVIPSKDKAAFFLSYEELLQRRLGKYEHSISVRPQQLSGRLSVDVNILESAGIASLEVLPLHNSRQRGSGRGEDDSGPPPSTVINQNETFANIIFKPTVVQQARIAQNGILGDFIIRYDVNREQSIGDIQVLNGYFVHYFAPKDLPPLPKNVVFVLDSSASMVGTKLRQTKDALFTILHDLRPQDRFSIIGFSNRIKVWKDHLISVTPDSIRDGKVYIHHMSPTGGTDINGALQRAIRLLNKYVAHSGIGDRSVSLIVFLTDGKPTVGETHTLKILNNTREAARGQVCIFTIGIGNDVDFRLLEKLSLENCGLTRRVHEEEDAGSQLIGFYDEIRTPLLSDIRIDYPPSSVVQATKTLFPNYFNGSEIIIAGKLVDRKLDHLHVEVTASNSKKFIILKTDVPVRPQKAGKDVTGSPRPGGDGEGDTNHIERLWSYLTTKELLSSWLQSDDEPEKERLRQRAQALAVSYRFLTPFTSMKLRGPVPRMDGLEEAHGMSAAMGPEPVVQSVRGAGTQPGPLLKKPYQPRIKISKTSVDGDPHFVVDFPLSRLTVCFNIDGQPGDILRLVSDHRDSGVTVNGELIGAPAPPNGHKKQRTYLRTITILINKPERSYLEITPSRVILDGGDRLVLPCNQSVVVGSWGLEVSVSANANVTVTIQGSIAFVILIHLYKKPAPFQRHHLGFYIANSEGLSSNCHGLLGQFLNQDARLTEDPAGPSQNLTHPLLLQVGEGPEAVLTVKGHQVPVVWKQRKIYNGEEQIDCWFARNNAAKLIDGEYKDYLASHPFDTGMTLGRGMSREL

SEQ ID NO: 43239 - protein, 652 aa, Homo sapiens
MTEFSVKSTIISRYAFTTVSCRMLNRASEDQDIEFQMQIPAAAFITNFTMLIGDKVYQGEITEREKKSGDRVKEKRNKTTEENGEKGTEIFRASAVIPSKDKAAFFLSYEELLQRRLGKYEHSISVRPQQLSGRLSVDVNILESAGIASLEVLPLHNSRQRGSGRGEDDSGPPPSTVINQNETFANIIFKPTVVQQARIAQNGILGDFIIRYDVNREQSIGDIQVLNGYFVHYFAPKDLPPLPKNVVFVLDSSASMVGTKLRQTKDALFTILHDLRPQDRFSIIGFSNRIKVWKDHLISVTPDSIRDGKVYIHHMSPTGGTDINGALQRAIRLLNKYVAHSGIGDRSVSLIVFLTDGKPTVGETHTLKILNNTREAARGQVCIFTIGIGNDVDFRLLEKLSLENCGLTRRVHEEEDAGSQLIGFYDEIRTPLLSDIRIDYPPSSVVQATKTLFPNYFNGSEIIIAGKLVDRKLDHLHVEVTASNSKKFIILKTDVPVRPQKAGKDVTGSPRPGGDGEGDTNHIERLWSYLTTKELLSSWLQSDDEPEKERLRQRAQALAVSYRFLTPFTSMKLRGPVPRMDGLEEAHGMSAAMGPEPVVQSVRGAGTQPGPLLKKPYQPRIKISKTSVRGFRREEQIFSNVMKFPFASILEL

SEQ ID NO: 43240 - protein, 273 aa, Homo sapiens [sequence omitted]

SEQ ID NO: 43241 - protein, 274 aa, Homo sapiens [sequence omitted]

SEQ ID NO: 43242 - protein, 423 aa, Homo sapiens [sequence omitted]

SEQ ID NO: 43243 - protein, 1152 aa, Homo sapiens [sequence omitted]

SEQ ID NO: 43244 - protein, 750 aa, Homo sapiens
MLESQEFDHFLATKFSTVKRYGGEGAESMMGFFHELLKMSAYSGITDVIIGMPHRGRLNLLTGLLQFPPELMFRKMRGLSEFPENFSATGDVLSHLTSSVDLYFGAHHPLHVTMLPNPSHLEAVNPVAVGKTRGRQQSRQDGDYSPDNSAQPGDRVICLQVHGDASFCGQGIVPETFTLSNLPHFRIGGSVHLIVNNQLGYTTPAERGRSSLYCSDIGKLVGCAIIHVNGDSPEEVVRATRLAFEYQRQFRKDVIIDLLCYRQWGHNELDEPFYTNPIMYKIIRARKSIPDTYAEHLIAGGLMTQEEVSEIKSSYYAKLNDHLNNMAHYRPPALNLQAHWQGLAQPEAQITTWSTGVPLDLLRFVGMKSVEVPRELQMHSHLLKTHVQSRMEKMMDGIKLDWATAEALALGSLLAQGFNVRLSGQDVGRGTFSQRHAIVVCQETDDTYIPLNHMDPNQKGFLEVSNSPLSEEAVLGFEYGMSIESPKLLPLWEAQFGDFFNGAQIIFDTFISGGEAKWLLQSGIVILLPHGYDGAGPDHSSCRIERFLQMCDSAEEGVDGDTVNMFVVHPTTPAQYFHLLRRQMVRNFRKPLIVASPKMLLRLPAAVSTLQEMAPGTTFNPVIGDSSVDPKKVKTLVFCSGKHFYSLVKQRESLGAKKHDFAIIRVEELCPFPLDSLQQEMSKYKHVKDHIWSQEEPQNMGPWSFVSPRFEKQLACKLRLVGRPPLPVPAVGIGTVHLHQHEDILAKTFA

SEQ ID NO: 43245 - protein, 183 aa, Homo sapiens [sequence omitted]

SEQ ID NO: 43246 - protein, 150 aa, Homo sapiens
MDPTGKTRTWESVKRTTRKEQTADGVAVIPVLQRTLHYECIVLVKQFRPPMGGYCIEFPAGLIDDGETPEAAALRELEEETGYKGDIAECSPAVCMDPGLSNCTIHIVTVTINGDDAENARPKPKPGDGEFVEVISLPKNDLLQRLDETL

SEQ ID NO: 43247 - protein, 144 aa, Homo sapiens
MDPTGKTRTWESVKRTTRKEQTADGVAVIPVLQRTLHYECIVLVKQFRPPMGGYCIEFPAGLIDDGETPEAAALRELEEETGYKGDIAECSPAVCMDPGLSNCTIHIVTVTINGDDAENARPKPKPGDGGMFCNSWWPSVYDLV

SEQ ID NO: 43248 - protein, 534 aa, Homo sapiens [sequence omitted]

SEQ ID NO: 43249 - protein, 222 aa, Homo sapiens [sequence omitted]

SEQ ID NO: 43250 - protein, 266 aa, Homo sapiens
MTLSRQEVIRRLRERGEPIRLFGETDYDAFQRLRKIEILTPEVNKGLRNDLKAALDKIDQQYLNEIVGGQEPGEEDTQNDLKVHEENTTIEELEALGESLGKGDDHKDMDIITKFLKFLLGVWAKELNAREDYVKRSVQGKLNSATQKQTESYLRPLFRKLRKRNLPADIKESITDIIKFMLQREYVKANDAYLQMAIGNAPWPIGVTMVGIHARTGREKIFSKHVAHVLNDETQRKYIQGLKRLMTICQKHFPTDPSKCVEYNAL

SEQ ID NO: 43251 - protein, 1024 aa, Homo sapiens
MTEGRRCQVHLLDDRKLELLVQPKLLAKELLDLVASHFNLKEKEYFGIAFTDETGHLNWLQLDRRVLEHDFPKKSGPVVLYFCVRFYIESISYLKDNATIELFFLNAKSCIYKELIDVDSEVVFELASYILQEAKGDFSSNEVVRSDLKKLPALPTQALKEHPSLAYCEDRVIEHYKKLNGQTRGQAIVNYMSIVESLPTYGVHYYAVKDKQGIPWWLGLSYKGIFQYDYHDKVKPRKIFQWRQLENLYFREKKFSVEVHDPRRASVTRRTFGHSGIAVHTWYACPALIKSIWAMAISQHQFYLDRKQSKSKIHAARSLSEIAIDLTETGTLKTSKLANMGSKGKIISGSSGSLLSSGSQESDSSQSAKKDMLAALKSRQEALEETLRQRLEELKKLCLREAELTGKLPVEYPLDPGEEPPIVRRRIGTAFKLDEQKILPKGEEAELERLEREFAIQSQITEAARRLASDPNVSKKLKKQRKTSYLNALKKLQEIENAINENRIKSGKKPTQRASLIIDDGNIASEDSSLSDALVLEDEDSQVTSTISPLHSPHKGLPPRPPSHNRPPPPQSLEGLRQMHYHRNDYDKSPIKPKMWSESSLDEPYEKVKKRSSHSHSSSHKRFPSTGSCAEAGGGSNSLQNSPIRGLPHWNSQSSMPSTPDLRVRSPHYVHSTRSVDISPTRLHSLALHFRHRSSSLESQGKLLGSENDTGSPDFYTPRTRSSNGSDPMDDCSSCTSHSSSEHYYPAQMNANYSTLAEDSPSKARQRQRQRQRAAGALGSASSGSMPNLAARGGAGGAGGAGGGVYLHSQSQPSSQYRIKEYPLYIEGGATPVVVRSLESDQEGHYSVKAQFKTSNSYTAGGLFKESWRGGGGDEGDTGRLTPSRSQILRTPSLGREGAHDKGAGRAAVSDELRQWYQRSTASHKEHSRLSHTSSTSSDSGSQYSTSSQSTFVAHSRVTRMPQMCKATSAALPQSQRSSTPSSEIGATPPSSPHHILTWQTGEATENSPILDGSESPPHQSTDE

SEQ ID NO: 43252 - protein, 450 aa, Homo sapiens
MVVQAAVAPNRSQRLLLKIPYGSLRRRSVERMTEGRRCQVHLLDDRKLELLVQPKLLAKELLDLVASHFNLKEKEYFGIAFTDETGHLNWLQLDRRVLEHDFPKKSGPVVLYFCVRFYIESISYLKDNATIELFFLNAKSCIYKELIDVDSEVVFELASYILQEAKGDFSSNEVVRSDLKKLPALPTQALKEHPSLAYCEDRVIEHYKKLNGQTRGQAIVNYMSIVESLPTYGVHYYAVKDKQGIPWWLGLSYKGIFQYDYHDKVKPRKIFQWRQLENLYFREKKFSVEVHDPRRASVTRRTFGHSGIAVHTWYACPALIKSIWAMAISQHQFYLDRKQSKSKIHAARSLSEIAIDLTETGTLKTSKLANMGSKGKIISGSSGSLLSSGRQRPAGGTPPEHGWDPRGDPGRWGELQLGRLQGKLLQSWLCFPDQGWDPNANLRKLLPGIK

SEQ ID NO: 43253 - protein, 445 aa, Homo sapiens
MKVKQILGRSSSDPQAQKYIAESKCLVIEKNGKLRYEIDTGEETKFVNPEDVARLIFSKMKETAHSVLGSDANDVVITVPFDFGEKQKNALGEAARAAGFNVLRLIHEPSAALLAYGIGQDSPTGKSNILVFKLGGTSLSLSVMEVNSGIYRVLSTNTDDNIGGAHFTETLAQYLASEFQRSFKHDVRGNARAMMKLTNSAEVAKHSLSTLGSANCFLDSLYEGQDFDCNVSRARFELLCSPLFNKCIEAIRGLLDQNGFTADDINKVVLCGGSSRIPKLQQLIKDLFPAVELLNSIPPDEVIPIGAAIEAGILIGKENLLVEDSLMIECSARDILVKGVDESGASRFTVLFPSGTPLPARRQHTLQAPGSISSVCLELYESDGKNSAKEETKFAQVVLQDLDKKENGLRDILAVLTMKRDGSLHVTCTDQETGKCEAISIEIAS

SEQ ID NO: 43254 - protein, 243 aa, Homo sapiens
MHFILQTLEDRLKAIGLQKIEDKKKKNKTPFLKKESREKCSIAVDISENLKEKKTDAKQQVSGWTPAHVRKQLAIGVNEVTRALERRELLLVLVCKSVKPAMITSHLIQLSLSRSVPACQVPRLSERIAPVIGLKCVLALAFKKNTTDFVDEVRAIIPRVPSLSVPWLQDRIEDSGENLETEPLESQDRELLDTSFEDLSKPKRKLADGRQASVTLQPLKIKKLIPNPNKIRKPPKSKKATPK

SEQ ID NO: 43255 - protein, 310 aa, Homo sapiens
MFRFDYSPEFLLWALRPPGWLLQWHCGVRVSSNKKLVGFISAIPANIRIYDSVKKMVEINFLCVHKKLRSKRVAPVLIREITRRVNLEGIFQAVYTAGVVLPKPIATCRYWHRSLNPRKLVEVKFSHLSRNMTLQRTMKLYRLPDVTKTSGLRPMEPKDIKSVRELINTYLKQFHLAPVMDEEEVAHWFLPREHIIDTFVVESPNGKLTDFLSFYTLPSTVMHHPAHKSLKAAYSFYNIHTETPLLDLMSDALILAKSKGFDVFNALDLMENKTFLEKLKFGIGDGNLQYYLYNWRCPGTDSEKVGLVLQ

SEQ ID NO: 43256 - protein, 765 aa, Homo sapiens [sequence omitted]

SEQ ID NO: 43257 - protein, 320 aa, Homo sapiens
MILMSPPCQPFTRIGRQGDMTDSRTNSFLHILDILPRLQKLPKYILLENVKGFEVSSTRDLLIQTIENCGFQYQEFLLSPTSLGIPNSRLRYFLIAKLQSEPLPFQAPGQVLMEFPKIESVHPQKYAMDVENKIQEKNVEPNISFDGSIQCSGKDAILFKLETAEEIHRKNQQDSDLSVKMLKDFLEDDTDVNQYLLPPKSLLRYALLLDIVQPTCRRSVCFTKGYGSYIEGTGSVLQTAEDVQVENIYKSLTNLSQEEQITKLLILKLRYFTPKEIANLLGFPPEFGFPEKITVKQRYRLLGNSLNVHVVAKLIKILYE

SEQ ID NO: 43258 - protein, 490 aa, Homo sapiens
MRRVNHKDPHVAMQALTLLGACVSNCGKIFHLEVCSRDFASEVSNVLNKGHPKVCEKLKALMVEWTDEFKNDPQLSLISAMIKNLKEQGVTFPAIGSQAAEQAKASPALVAKDPGTVANKKEEEDLAKAIELSLKEQRQQSTTLSTLYPSTSSLLTNHQHEGRKVRAIYDFEAAEDNELTFKAGEIITVLDDSDPNWWKGETHQGIGLFPSNFVTADLTAEPEMIKTEKKTVQFSDDVQVETIEPEPEPAFIDEDKMDQLLQMLQSTDPSDDQPDLPELLHLEAMCHQMGPLIDEKLEDIDRKHSELSELNVKVMEALSLYTKLMNEDPMYSMYAKLQNQPYYMQSSGVSGSQVYAGPPPSGAYLVAGNAQMSHLQSYSLPPEQLSSLSQAVVPPSANPALPSQQTQAAYPNTMVSSVQGNTYPSQAPVYSPPPAATAAAATADVTLYQNAGPNMPQVPNYNLTSSTLPQPGGSQQPPQPQQPYSQKALL

SEQ ID NO: 43259 - protein, 638 aa, Homo sapiens
MELLENVAPAGALGAAAQSYGKGARRKNRFKGSDGSTSSDTTSNSFVRQGSADSYTSRPSDSDVSLEEDREAVRREAERQAQAQLEKAKTKPVAFAVRTNVSYSAAHEDDVPVPGMAISFEAKDFLHVKEKFNNDWWIGRLVKEGCEIGFIPSPVKLENMRLQHEQRAKQGKFYSSKSGGNSSSSLGDIVPSSRKSTPPSSAIDIDATGLDAEENDIPANHRSPKPSANSVTSPHSKEKRMPFFKKTEHTPPYDVVPSMRPVVLVGPSLKGYEVTDMMQKALFDFLKHRFEGRISITRVTADISLAKRSVLNNPSKHAIIERSNTRSSLAEVQSEIERIFELARTLQLVVLDADTINHPAQLSKTSLAPIIVYVKISSPKVLQRLIKSRGKSQAKHLNVQMVAADKLAQCPPELFDVILDENQLEDACEHLADYLEAYWKATHPPSSSLPNPLLSRTLATSSLPLSPTLASNSQGSQGDQRTDRSAPIRSASQAEEEPSVEPVKKSQHRSSSSAPHHNHRSGTSRGLSRQETFDSETQESRDSAYVEPKEDYSHDHVDHYASHRDHNHRDETHGSSDHRHRESRHRSRDVDREQDHNECNKQRSRHKSKDRYCEKDGEVISKKRNEAGEWNRDVYIRQ

SEQ ID NO: 43260 - protein, 873 aa, Homo sapiens
MKEPPEVKHAMEVNKHQSNISYRKDVQDTHTYSAELDRPDIKMATQISKIISNAEYKKGQGIMNKEPAVIGRPDFEHAVEASKLSSQIKYKEKFDNEMKDKKHHYNPLESASFRQNQLAATLASNVKYKKDIQNMHDPVSDLPNLLFLDHVLKASKMLSGREYKKLFEENKGMYHFDADAVEHLHHKGNAVLQSQVKYKEEYEKNKGKPMLEFVETPSYQASKEAQKMQSEKVYKEDFEKEIKGRSSLDLDKTPEFLHVKYITNLLREKEYKKDLENEIKGKGMELNSEVLDIQRAKRASEMASEKEYKKDLESIIKGKGMQAGTDTLEMQHAKKAAEIASEKDYKRDLETEIKGKGMQVSTDTLDVQRAKKASEMASQKQYKKDLENEIKGKGMQVSMDIPDILRAKRTSEIYSQRKYKDEAEKMLSNYSTIADTPEIQRIKTTQQNISAVFYKKEVGAGTAVKDSPEIERVKKNQQNISSVKYKEEIKHATAISDPPELKRVKENQKNISNLQYKEQNYKATPVSMTPEIERVRRNQEQLSAVKYKGELQRGTAISDPPELKRAKENQKNISNVYYRGQLGRATTLSVTPEMERVKKNQENISSVKYTQDHKQMKGRPSLILDTPAMRHVKEAQNHISMVKYHEDFEKTKGRGFTPVVDDPVTERVRKNTQVVSDAAYKGVHPHIVEMDRRPGIIVDLKVWRTDPGSIFDLDPLEDNIQSRSLHMLSEKASHYRRHWSRSHSSSTFGTGLGDDRSEISEIYPSFSCCSEVTRPSDEGAPVLPGAYQQSHSQGYGYMHQTSVSSMRSMQHSPNLRTYRAMYDYSAQDEDEVSFRDGDYIVNVQPIDDGWMYGTVQRTGRTGMLPANYIEFVN

SEQ ID NO: 43261 - protein, 234 aa, Homo sapiens
MALNMNNYKGYEKKPYCNAHYPKQSFTTVADTPENLRLKQQSELQSQVKYKRDFEESKGRGFSIVTDTPELQRLKRTQEQISNVKYHEDFEKTKGRGFTPVVDDPVTERVRKNTQVVSDAAYKGVHPHIVEMDRRPGIIVAPVLPGAYQQSHSQGYGYMHQTSVSSMRSMQHSPNLRTYRAMYDYSAQDEDEVSFRDGDYIVNVQPIDDGWMYGTVQRTGRTGMLPANYIEFVN

SEQ ID NO: 43262 - protein, 406 aa, Homo sapiens [sequence omitted]

SEQ ID NO: 43263 - protein, 154 aa, Homo sapiens
MHLRKFLRSKMDIPNTFQIDVMYEEEPLKDYYTLMDIAYIYTWRRNGPLPLKYRVRPTCKRMKISHQRDGLTNAGELESDSGSDKANSPAGGIPSTSSCLPSPSTPVQSPHPQFPHISSTMNGTSNSPSGNHQSSFANRPRKSSVNGSSATSSG

SEQ ID NO: 43264 - protein, 1863 aa, Homo sapiens
MQTSEMDRKREAFLEHLKQKYPHHASAIMGHQERLRDQTRSPKLSHSPQPPSLGDPVEHLSETSADSLEAMSEGDAPTPFSRGSRTRASLPVVRSTNQTKERSLGVLYLQYGDETKQLRMPNEITSADTIRALFVSAFPQQLTMKMLESPSVAIYIKDESRNVYYELNDVRNIQDRSLLKVYNKDPAHAFNHTPKTMNGDMRMQRELVYARGDGPGAPRPGSTAHPPHAIPNSPPSTPVPHSMPPSPSRIPYGGTRSMVVPGNATIPRDRISSLPVSRPISPSPSAILERRDVKPDEDMSGKNIAMYRNEGFYADPYLYHEGRMSIASSHGGHPLDVPDHIIAYHRTAIRSASAYCNPSMQAEMHMEQSLYRQKSRKYPDSHLPTLGSKTPPASPHRVSDLRMIDMHAHYNAHGPPHTMQPDRASPSRQAFKKEPGTLVYIEKPRSAAGLSSLVDLGPPLMEKQVFAYSTATIPKDRETRERMQAMEKQIASLTGLVQSALFKGPITSYSKDASSEKMMKTTANRNHTDSAGTPHVSGGKMLSALESTVPPSQPPPVGTSAIHMSLLEMRRSVAELRLQLQQMRQLQLQNQELLRAMMKKAELEISGKVMETMKRLEDPVQRQRVLVEQERQKYLHEEEKIVKKLCELEDFVEDLKKDSTAASRLVTLKDVEDGAFLLRQVGEAVATLKGEFPTLQNKMRAILRIEVEAVRFLKEEPHKLDSLLKRVRSMTDVLTMLRRHVTDGLLKGTDAAQAAQYMAMEKATAAEVLKSQEEAAHTSGQPFHSTGAPGDAKSEVVPLSGMMVRHAQSSPVVIQPSQHSVALLNPAQNLPHVASSPAVPQEATSTLQMSQAPQSPQIPMNGSAMQSLFIEEIHSVSAKNRAVSIEKAEKKWEEKRQNLDHYNGKEFEKLLEEAQANIMKSIPNLEMPPATGPLPRGDAPVDKVELSEDSPNSEQDLEKLGGKSPPPPPPPPRRSYLPGSGLTTTRSGDVVYTGRKENITAKASSEDAGPSPQTRATKYPAEEPASAWTPSPPPVTTSSSKDEEEEEEEGDKIMAELQAFQKCSFMDVNSNSHAEPSRADSHVKDTRSGATVPPKEKKNLEFFHEDVRKSDVEYENGPQMEFQKVTTGAVRPSDPPKWERGMENSISDASRTSEYKTEIIMKENSISNMSLLRDSRNYSQETVPKASFGFSGISPLEDEINKGSKISGLQYSIPDTENQTLNYGKTKEMEKQNTDKCHVSSHTRLTESSVHDFKTEDQEVITTDFGQVVLRPKEARHANVNPNEDGESSSSSPTEENAATDNIAFMITETTVQVLSSGEVHDIVSQKGEDIQTVNIDARKEMTPRQEGTDNEDPVVCLDKKPVIIIFDEPMDIRSAYKRLSTIFEECDEELERMMMEEKIEEEEEEENGDSVVQNNNTSQMSHKKVAPGNLRTGQQVETKSQPHSLATETRNPGGQEMNRTELNKFSHVDSPNSECKGEDATDDQFESPKKKFKFKFPKKQLAALTQAIRTGTKTGKKTLQVVVYEEEEEDGTLKQHKEAKRFEIARSQPEDTPENTVRRQEQPSIESTSPISRTDEIRKNTYRTLDSLEQTIKQLENTISEMSPKALVDTSCSSNRDSVASSSHIAQEASPRPLLVPDEGPTALEPPTSIPSASRKGSSGAPQTSRMPVPMSAKNRPGTLDKPGKQSKLQDPRQYRQANGSAKKSGGDFKPTSPSLPASKIPALSPSSGKSSSLPSSSGDSSNLPNPPATKPSIASNPLSPQTGPPAHSASLIPSVSNGSLKFQSLTHTGKGHHLSFSPQSQNGRAPPPLSFSSSPPSPASSVSLNQGAKGTRTIHTPSLTSYKAQNGSSSKATPSTAKETS

SEQ ID NO: 43265 - protein, 1269 aa, Homo sapiens
MQTSEMDRKREAFLEHLKQKYPHHASAIMGHQERLRDQTRSPKLSHSPQPPSLGDPVEHLSETSADSLEAMSEGDAPTPFSRGSRTRASLPVVRSTNQTKERSLGVLYLQYGDETKQLRMPNEITSADTIRALFVSAFPQQLTMKMLESPSVAIYIKDESRNVYYELNDVRNIQDRSLLKVYNKDPAHAFNHTPKTMNGDMRMQRELVYARGDGPGAPRPGSTAHPPHAIPNSPPSTPVPHSMPPSPSRIPYGGTRSMVVPGNATIPRDRISSLPVSRPISPSPSAILERRDVKPDEDMSGKNIAMYRNEGFYADPYLYHEGRMSIASSHGGHPLDVPDHIIAYHRTAIRSASAYCNPSMQAEMHMEQSLYRQKSRKYPDSHLPTLGSKTPPASPHRVSDLRMIDMHAHYNAHGPPHTMQPDRASPSRQAFKKEPGTLVYIEKPRSAAGLSSLVDLGPPLMEKQVFAYSTATIPKDRETSEKMMKTTANRNHTDSAGTPHVSGGKMLSALESTVPPSQPPPVGTSAIHMSLLEMRRSVAELRLQLQQMRQLQLQNQELLRAMMKKAELEISGKVMETMKRLEDPVQRQRVLVEQERQKYLHEEEKIVKKLCELEDFVEDLKKDSTAASRLVTLKDVEDGAFLLRQVGEAVATLKGEFPTLQNKMRAILRIEVEAVRFLKEEPHKLDSLLKRVRSMTDVLTMLRRHVTDGLLKGTDAAQAAQYMAMEKATAAEVLKSQEEAAHTSGQPFHSTGAPGDAKSEVVPLSGMMVRHAQSSPVVIQPSQHSVALLNPAQNLPHVASSPAVPQEATSTLQMSQAPQSPQIPMNGSAMQSLFIEEIHSVSAKNRAVSIEKAEKKWEEKRQNLDHYNGKEFEKLLEEAQANIMKSIPNLEMPPATGPLPRGDAPVDKVELSEDSPNSEQDLEKLGGKSPPPPPPPPRRSYLPGSGLTTTRSGDVVYTGRKENITAKASSEDAGPSPQTRATKYPAEEPASAWTPSPPPVTTSSSKDEEEEEEEGDKIMAELQAFQKCSFMDVNSNSHAEPSRADSHVKDTRSGATVPPKEKKGSSGAPQTSRMPVPMSAKNRPGTLDKPGKQSKLQDPRQYRQANGSAKKSGGDFKPTSPSLPASKIPALSPSSGKSSSLPSSSGDSSNLPNPPATKPSIASNPLSPQTGPPAHSASLIPSVSNGSLKFQSLTHTGKGHHLSFSPQSQNGRAPPPLSFSSSPPSPASSVSLNQGAKGTRTIHTPSLTSYKAQNGSSSKATPSTAKETS

SEQ ID NO: 43266 - protein, 1425 aa, Homo sapiens
MPPSPSRIPYGGTRSMVVPGNATIPRDRISSLPVSRPISPSPSAILERRDVKPDEDMSGKNIAMYRNEGFYADPYLYHEGRMSIASSHGGHPLDVPDHIIAYHRTAIRSASAYCNPSMQAEMHMEQSLYRQKSRKYPDSHLPTLGSKTPPASPHRVSDLRMIDMHAHYNAHGPPHTMQPDRASPSRQAFKKEPGTLVYIEKPRSAAGLSSLVDLGPPLMEKQVFAYSTATIPKDRETSEKMMKTTANRNHTDSAGTPHVSGGKMLSALESTVPPSQPPPVGTSAIHMSLLEMRRSVAELRLQLQQMRQLQLQNQELLRAMMKKAELEISGKVMETMKRLEDPVQRQRVLVEQERQKYLHEEEKIVKKLCELEDFVEDLKKDSTAASRLVTLKDVEDGAFLLRQVGEAVATLKGEFPTLQNKMRAILRIEVEAVRFLKEEPHKLDSLLKRVRSMTDVLTMLRRHVTDGLLKGTDAAQAAQYMAMEKATAAEVLKSQEEAAHTSGQPFHSTGAPGDAKSEVVPLSGMMVRHAQSSPVVIQPSQHSVALLNPAQNLPHVASSPAVPQEATSTLQMSQAPQSPQIPMNGSAMQSLFIEEIHSVSAKNRAVSIEKAEKKWEEKRQNLDHYNGKEFEKLLEEAQANIMKSIPNLEMPPATGPLPRGDAPVDKVELSEDSPNSEQDLEKLGGKSPPPPPPPPRRSYLPGSGLTTTRSGDVVYTGRKENITAKASSEDAGPSPQTRATKYPAEEPASAWTPSPPPVTTSSSKDEEEEEEEGDKIMAELQAFQKCSFMDVNSNSHAEPSRADSHVKDTRSGATVPPKEKKNLEFFHEDVRKSDVEYENGPQMEFQKVTTGAVRPSDPPKWERGMENSISDASRTSEYKTEIIMKENSISNMSLLRDSRNYSQETVPKASFGFSGISPLEDEINKGSKISGLQYSIPDTENQTLNYGKTKEMEKQNTDKCHVSSHTRLTESSVHDFKTEDQEVITTDFGQVVLRPKEARHANVNPNEDGESSSSSPTEENAATDNIAFMITETTVQVLSSGEVHDIVSQKGEDIQTVNIDARKEMTPRQEGTDNEDPVVCLDKKPVIIIFDEPMDIRSAYKRLSTIFEECDEELERMMMEEKIEEEEEEENGDSVVQNNNTSQMSHKKVAPGNLRTGQQVETKSQPHSLATETRNPGGQEMNRTELNKFSHVDSPNSECKGEDATDDQFESPKKKFKFKFPKKQLAALTQAIRTGTKTGKKTLQVVVYEEEEEDGTLKQHKEAKRFEIARSQPEDTPENTVRRQEQPSIESTSPISRTDEIRKNTYRTLDSLEQTIKQLENTISEMSPKALVDTSCSSNRDSVASSSHIAQEASPRPLLVPDEGPTALEPPTSIPSASRKGSSGAPQTSRMPVPMSAKNRPGTLDKPGKQSKLQDPRQYRQVVLP

SEQ ID NO: 43267 - protein, 866 aa, Homo sapiens
MPPSPSRIPYGGTRSMVVPGNATIPRDRISSLPVSRPISPSPSAILERRDVKPDEDMSGKNIAMYRNEGFYADPYLYHEGRMSIASSHGGHPLDVPDHIIAYHRTAIRSASAYCNPSMQAEMHMEQSLYRQKSRKYPDSHLPTLGSKTPPASPHRVSDLRMIDMHAHYNAHGPPHTMQPDRASPSRQAFKKEPGTLVYIEKPRSAAGLSSLVDLGPPLMEKQVFAYSTATIPKDRETSEKMMKTTANRNHTDSAGTPHVSGGKMLSALESTVPPSQPPPVGTSAIHMSLLEMRRSVAELRLQLQQMRQLQLQNQELLRAMMKKAELEISGKVMETMKRLEDPVQRQRVLVEQERQKYLHEEEKIVKKLCELEDFVEDLKKDSTAASRLVTLKDVEDGAFLLRQVGEAVATLKGEFPTLQNKMRAILRIEVEAVRFLKEEPHKLDSLLKRVRSMTDVLTMLRRHVTDGLLKGTDAAQAAQYMAMEKATAAEVLKSQEEAAHTSGQPFHSTGAPGDAKSEVVPLSGMMVRHAQSSPVVIQPSQHSVALLNPAQNLPHVASSPAVPQEATSTLQMSQAPQSPQIPMNGSAMQSLFIEEIHSVSAKNRAVSIEKAEKKWEEKRQNLDHYNGKEFEKLLEEAQANIMKSIPNLEMPPATGPLPRGDAPVDKVELSEDSPNSEQDLEKLGGKSPPPPPPPPRRSYLPGSGLTTTRSGDVVYTGRKENITAKASSEDAGPSPQTRATKYPAEEPASAWTPSPPPVTTSSSKDEEEEEEEGDKIMAELQAFQKCSFMDVNSNSHAEPSRADSHVKDTRSGATVPPKEKKGSSGAPQTSRMPVPMSAKNRPGTLDKPGKQSKLQDPRQYRQVVLP

SEQ ID NO: 43268 - protein, 165 aa, Homo sapiens [sequence omitted]

SEQ ID NO: 43269 - protein, 656 aa, Homo sapiens
MFSTLLGEMDLLTQSLGVDTLPPPDPNPPRAEFNYSVGFKDLNESLNALEDQDLDALMADLVADISEAEQRTIQAQKESLQNQHHSASLQASIFSGAASLGYGTNVAATGISQYEDDLPPPPADPVLDLPLPPPPPEPLSQEEEEAQAKADKIKLALEKLKEAKVKKLVVKVHMNDNSTKSLMVDERQLARDVLDNLFEKTHCDCNVDWCLYEIYPELQIERFFEDHENVVEVLSDWTRDTENKILFLEKEEKYAVFKNPQNFYLDNRGKKESKETNEKMNAKNKESLLEESFCGTSIIVPELEGALYLKEDGKKSWKRRYFLLRASGIYYVPKGKTKTSRDLACFIQFENVNIYYGTQHKMKYKAPTDYCFVLKHPQIQKESQYIKYLCCDDTRTLNQWVMGIRIAKYGKTLYDNYQRAVAKAGLASRWTNLGTVNAAAPAQPSTGPKTGTTQPNGQIPQATHSVSAVLQEAQRHAETSKDKKPALGNHHDPAVPRAPHAPKSSLPPPPPVRRSSDTSGSPATPLKAKGTGGGGLPAPPDDFLPPPPPPPPLDDPELPPPPPDFMEPPPDFVPPPPPSYAGIAGSELPPPPPPPPAPAPAPVPDSARPPPAVAKRPPVPPKRQENPGHPGGAGGGEQDFMSDLMKALQKKRGNVS

SEQ ID NO: 43270 - protein, 716 aa, Homo sapiens
MFSDFLTKLNIVSIGKGKIFEGYRSMFMEPAKRMKKSLDTTDNWHIRPEPFSLSIPPSLNLRDLGLSELKIGQIDQLVENLLPGFCKGKNISSHWHTSHVSAQSFFENKYGNLDIFSTLRSSCLYRHHSRALQSICSDLQYWPVFIQSRGFKTLKSRTRRLQSTSERLAETQNIAPSFVKGFLLRDRGSDVESLDKLMKTKNIPEAHQDAFKTGFAEGFLKAQALTQKTNDSLRRTRLILFVLLLFGIYGLLKNPFLSVRFRTTTGLDSAVDPVQMKNVTFEHVKGVEEAKQELQEVVEFLKNPQKFTILGGKLPKGILLVGPPGTGKTLLARAVAGEADVPFYYASGSEFDEMFVGVGASRIRNLFREAKANAPCVIFIDELDSVGGKRIESPMHPYSRQTINQLLAEMDGFKPNEGVIIIGATNFPEALDNALIRPGRFDMQVTVPRPDVKGRTEILKWYLNKIKFDQSVDPEIIARGTVGFSGAELENLVNQAALKAAVDGKEMVTMKELEFSKDKILMGPERRSVEIDNKNKTITAYHESGHAIIAYYTKDAMPINKATIMPRGPTLGHVSLLPENDRWNETRAQLLAQMDVSMGGRVAEELIFGTDHITTGASSDFDNATKIAKRMVTKFGMSEKLGVMTYSDTGKLSPETQSAIEQEIRILLRDSYERAKHILKTHAKEHKNLAEALLTYETLDAKEIQIVLEGKKLEVR

SEQ ID NO: 43271 - protein, 810 aa, Homo sapiens [sequence omitted]

SEQ ID NO: 43272 - protein, 353 aa, Homo sapiens
MQATATSGFASGKSTSGDKPVSHSCTTPSTSSASGLNPTSAPPTSASAVPVSPVPQSPIPPLLQDPNLLRQLLPALQATLQLNNSNVDISKINEVLTAAVTQASLQSIIHKFLTAGPSAFNITSLISQAAQLSTQAQPSNQSPMSLTSDASSPRSYVSPRISTPQTNTVPIKPLISTPPVSSQPKVSTPVVKQGPVSQSATQQPVTADKQQGHEPVSPRSLQRSSSQRSPSPGPNHTSNSSNASNATVVPQNSSARSTCSLTPALAAHFSENLIKHVQGWPADHAEKQASRLREEAHNMGTIHMSEICTELKNLRSLVRVCEIQATLREQRILFLRQQIKELEKLKNQNSFMV

SEQ ID NO: 43273 - protein, 349 aa, Homo sapiens
MQATATSGFASGKSTSGDKPVSHSCTTPSTSSASGLNPTSAPPTSASAVPVSPVPQSPIPPLLQDPNLLRQLLPALQATLQLNNSNVDISKINEAVTQASLQSIIHKFLTAGPSAFNITSLISQAAQLSTQAQPSNQSPMSLTSDASSPRSYVSPRISTPQTNTVPIKPLISTPPVSSQPKVSTPVVKQGPVSQSATQQPVTADKQQGHEPVSPRSLQRSSSQRSPSPGPNHTSNSSNASNATVVPQNSSARSTCSLTPALAAHFSENLIKHVQGWPADHAEKQASRLREEAHNMGTIHMSEICTELKNLRSLVRVCEIQATLREQRILFLRQQIKELEKLKNQNSFMV

SEQ ID NO: 43274 - protein, 278 aa, Homo sapiens
MEDKHSSDASSLLPQNILSQTSRHNDRDYRLPRAETHSSSTPVQHPIKPVVHPTATPSTVPSSPFTLQSDHQPKKSFDANGASTLSKLPTPTSSVPAQKTERKESTSGDKPVSHSCTTPSTSSASGLNPTSAPPTSASAVPVSPVPQSPIPPLLQDPNLLRQLLPALQATLQLNNSNVDISKINEVLTAAVTQASLQSIIHKFLTAGPSAFNITSLISQAAQLSTQDIPLHEGIQMERDTHRSKWEVKGSLCQKADKQQECLVWNGSIMVQRLLQPSG

SEQ ID NO: 43275 - protein, 218 aa, Homo sapiens [sequence omitted]

SEQ ID NO: 43276 - protein, 47 aa, Homo sapiens
MDEDVLHPEEPHHRLLLRFTDDTFDPELAATIDPSSVVNPARNAATP

SEQ ID NO: 43277 - protein, 22 aa, Homo sapiens
MYTRQNTSAIKIMTLCHLEQHS

SEQ ID NO: 43278 - protein, 2172 aa, Homo sapiens
MRASDPASPHIGRSNEEEETSDSSLEKQTRSKYCTETSGVHGDSPYGSGTMDTHSLESKAERIARYKAERRRQLAEKYGLTLDPEADSEYLSRYTKSRKEPDAVEKRGGKSDKQEESSRDASSLYPGTETMGLRTCAGESKDYALHVGDGSSDPEVLLNIENQRRGQELSATRQAHDLSPAAESSSTFSFSGRDSSFTEVPRSPKHAHSSSLQQAASRSPSFGDPQLSPEARPSTGKPKHEWFLQKDSEGDTPSLINWPSRVKVREKLVKEESARNSPELASESVTQRRHQPAPVHYVSFQSEHSAFDRVPSKAAGSTRQPIRGYVQPADTGHTAKLVTPETPENASECSWVASATQNVPKPPSLTVLEGDGRDSPVLHVCESKAEEEEGEGEGEEKEEDVCFTEALEQSKKTLLALEGDGLVRSPEDPSRNEDFGKPAVSTVTLEHQKELENVAQPPQAPHQPTERTGRSEMVLYIQSEPVSQDAKPTGHNREASKKRKVRTRSLSDFTGPPQLQALKYKDPASRRELELPSSKTEGPYGEISMLDTKVSVAQLRSAFLASANACRRPELKSRVERSAEGPGLPTGVERERGSRKPRRYFSPGESRKTSERFRTQPITSAERKESDRCTSHSETPTVDDEEKVDERAKLSVAAKRLLFREMEKSFDEQNVPKRRSRNTAVEQRLRRLQDRSLTQPITTEEVVIAATEPIPASCSGGTHPVMARLPSPTVARSAVQPARLQASAHQKALAKDQTNEGKELAEQGEPDSSTLSLAEKLALFNKLSQPVSKAISTRNRIDTRQRRMNARYQTQPVTLGEVEQVQSGKLIPFSPAVNTSVSTVASTVAPMYAGDLRTKPPLDHNASATDYKFSSSIENSDSPVRSILKSQAWQPLVEGSENKGMLREYGETESKRALTGRDSGMEKYGSFEEAEASYPILNRAREGDSHKESKYAVPRRGSLERANPPITHLGDEPKEFSMAKMNAQGNLDLRDRLPFEEKVEVENVMKRKFSLRAAEFGEPTSEQTGTAAGKTIAQTTAPVSWKPQDSSEQPQEKLCKNPCAMFAAGEIKTPTGEGLLDSPSKTMSIKERLALLKKSGEEDWRNRLSRRQEGGKAPASSLHTQEAGRSLIKKRVTESRESQMTIEERKQLITVREEAWKTRGRGAANDSTQFTVAGRMVKKGLASPTAITPVASPICGKTRGTTPVSKPLEDIEARPDMQLESDLKLDRLETFLRRLNNKVGGMHETVLTVTGKSVKEVMKPDDDETFAKFYRSVDYNMPRSPVEMDEDFDVIFDPYAPKLTSSVAEHKRAVRPKRRVQASKNPLKMLAAREDLLQEYTEQRLNVAFMESKRMKVEKMSSNSNFSEVTLAGLASKENFSNVSLRSVNLTEQNSNNSAVPYKRLMLLQIKGRRHVQTRLVEPRASALNSGDCFLLLSPHCCFLWVGEFANVIEKAKASELATLIQTKRELGCRATYIQTIEEGINTHTHAAKDFWKLLGGQTSYQSAGDPKEDELYEAAIIETNCIYRLMDDKLVPDDDYWGKIPKCSLLQPKEVLVFDFGSEVYVWHGKEVTLAQRKIAFQLAKHLWNGTFDYENCDINPLDPGECNPLIPRKGQGRPDWAIFGRLTEHNETILFKEKFLDWTELKRSNEKNPGELAQHKEDPRTDVKAYDVTRMVSMPQTTAGTILDGVNVGRGYGLVEGHDRRQFEITSVSVDVWHILEFDYSRLPKQSIGQFHEGDAYVVKWKFMVSTAVGSRQKGEHSVRAAGKEKCVYFFWQGRHSTVSEKGTSALMTVELDEERGAQVQVLQGKEPPCFLQCFQGGMVVHSGRREEEEENVQSEWRLYCVRGEVPVEGNLLEVACHCSSLRSRTSMVVLNVNKALIYLWHGCKAQAHTKEVGRTAANKIKEQCPLEAGLHSSSKVTIHECDEGSEPLGFWDALGRRDRKAYDCMLQDPGSFNFAPRLFILSSSSGDFAATEFVYPARAPSVVSSMPFLQEDLYSAPQPALFLVDNHHEVYLWQGWWPIENKITGSARIRWASDRKSAMETVLQYCKGKNLKKPAPKSYLIHAGLEPLTFTNMFPSWEHREDIAEITEMDTEVSNQITLVEDVLAKLCKTIYPLADLLARPLPEGVDPLKLEIYLTDEDFEFALDMTRDEYNALPAWKQVNLKKAKGLF

SEQ ID NO: 43279 - protein, 2140 aa, Homo sapiens
MRASDPASPHIGRSNEEEETSDSSLEKQTRSKYCTETSGVHGDSPYGSGTMDTHSLESKAERIARYKAERRRQLAEKYGLTLDPEADSEYLSRYTKSRKEPDAVEKRGGKSDKQEESSRDASSLYPGTETMGLRTCAGESKDYALHVGDGSSDPEVLLNIENQRRGQELSATRQAHDLSPAAESSSTFSFSGRDSSFTEVPRSPKHAHSSSLQQAASRSPSFGDPQLSPEARPSTGKPKHEWFLQKDSEGDTPSLINWPSRVKVREKLVKEESARNSPELASESVTQRRHQPAPVHYVSFQSEHSAFDRVPSKAAGSTRQPIRGYVQPADTGHTAKLVTPETPENASECSWVASATQNVPKPPSLTVLEGDGRDSPVLHVCESKAEEEEGEGEGEEKEEDVCFTEALEQSKKTLLALEGDGLVRSPEDPSRNEDFGKPAVSTVTLEHQKELENVAQPPQAPHQPTERTGRSEMVLYIQSEPVSQDAKPTGHNREASKKRKVRTRSLSDFTGPPQLQALKYKDPASRRELELPSSKTEGPYGEISMLDTKVSVAQLRSAFLASANACRRPELKSRVERSAEGPGLPTGVERERGSRKPRRYFSPGESRKTSERFRTQPITSAERKESDRCTSHSETPTVDDEEKVDERAKLSVAAKRLLFREMEKSFDEQNVPKRRSRNTAVEQRLRRLQDRSLTQPITTEEVVIAATLQASAHQKALAKDQTNEGKELAEQGEPDSSTLSLAEKLALFNKLSQPVSKAISTRNRIDTRQRRMNARYQTQPVTLGEVEQVQSGKLIPFSPAVNTSVSTVASTVAPMYAGDLRTKPPLDHNASATDYKFSSSIENSDSPVRSILKSQAWQPLVEGSENKGMLREYGETESKRALTGRDSGMEKYGSFEEAEASYPILNRAREGDSHKESKYAVPRRGSLERANPPITHLGDEPKEFSMAKMNAQGNLDLRDRLPFEEKVEVENVMKRKFSLRAAEFGEPTSEQTGTAAGKTIAQTTAPVSWKPQDSSEQPQEKLCKNPCAMFAAGEIKTPTGEGLLDSPSKTMSIKERLALLKKSGEEDWRNRLSRRQEGGKAPASSLHTQEAGRSLIKKRVTESRESQMTIEERKQLITVREEAWKTRGRGAANDSTQFTVAGRMVKKGLASPTAITPVASPICGKTRGTTPVSKPLEDIEARPDMQLESDLKLDRLETFLRRLNNKVGGMHETVLTVTGKSVKEVMKPDDDETFAKFYRSVDYNMPRSPVEMDEDFDVIFDPYAPKLTSSVAEHKRAVRPKRRVQASKNPLKMLAAREDLLQEYTEQRLNVAFMESKRMKVEKMSSNSNFSEVTLAGLASKENFSNVSLRSVNLTEQNSNNSAVPYKRLMLLQIKGRRHVQTRLVEPRASALNSGDCFLLLSPHCCFLWVGEFANVIEKAKASELATLIQTKRELGCRATYIQTIEEGINTHTHAAKDFWKLLGGQTSYQSAGDPKEDELYEAAIIETNCIYRLMDDKLVPDDDYWGKIPKCSLLQPKEVLVFDFGSEVYVWHGKEVTLAQRKIAFQLAKHLWNGTFDYENCDINPLDPGECNPLIPRKGQGRPDWAIFGRLTEHNETILFKEKFLDWTELKRSNEKNPGELAQHKEDPRTDVKAYDVTRMVSMPQTTAGTILDGVNVGRGYGLVEGHDRRQFEITSVSVDVWHILEFDYSRLPKQSIGQFHEGDAYVVKWKFMVSTAVGSRQKGEHSVRAAGKEKCVYFFWQGRHSTVSEKGTSALMTVELDEERGAQVQVLQGKEPPCFLQCFQGGMVVHSGRREEEEENVQSEWRLYCVRGEVPVEGNLLEVACHCSSLRSRTSMVVLNVNKALIYLWHGCKAQAHTKEVGRTAANKIKEQCPLEAGLHSSSKVTIHECDEGSEPLGFWDALGRRDRKAYDCMLQDPGSFNFAPRLFILSSSSGDFAATEFVYPARAPSVVSSMPFLQEDLYSAPQPALFLVDNHHEVYLWQGWWPIENKITGSARIRWASDRKSAMETVLQYCKGKNLKKPAPKSYLIHAGLEPLTFTNMFPSWEHREDIAEITEMDTEVSNQITLVEDVLAKLCKTIYPLADLLARPLPEGVDPLKLEIYLTDEDFEFALDMTRDEYNALPAWKQVNLKKAKGLF

SEQ ID NO: 43280 - protein, 43 aa, Homo sapiens
MDGSTEARLGKFSLEDTRGRKTSKRRLFLLIFWRSFWRGTFGM

SEQ ID NO: 43281 - protein, 1185 aa, Homo sapiens
MSGPAKWQNVSLESWNQPRKLGRQMSDGDGERLFQDLYPFIQGEHVLNSQNKGKSRSLPRVLSPESLSCTEIPIPLNERHSPKMPPYPPTCAPNLDSTRNSEKSGCSAPFPRPKFGRPLKPPSYSSHQQSRGGADSSDSQDSQQMDAYVPRHELCLSDPGLEPPVYVPPPSYRSPPQNIPNPYLEDTVPINVCGGHSQQQSPTEKAGASGQPPSGPPGTGNEYGVSPRLPQGLPAHPRPVTAYDGFVQYIPFDDPRLRHFKLAQPQGFCEDIKLDDKSYNSSPVTAQEPAHGGMQPDGAIWNPQSLIPPSGDERGLVLADSSPRWLWGQPPGDGENSGLPNQRDRCVARGQWPDVRGSQHGHTGRQVSSPYSQGESTCETQTKLKKFQTGTRTKKSSKKKMNETIFCLVSIPVKSESHLPDRDMDNNDLKPSADQKNGSDKSPALQEQSLLSMSSTDLELQALTGSMGGRTEFQKQDLGEPEEDRQTNDLSFIHLTKHRELKHSGSWPGHRYRDQQTQTSFSEEPQSSQLLPGAKLGGPSRAALSPKCSDPAASEAQTHTAFPTGDHKQRPSARNLKGHRSLSPSSNSAFSRTSLSVDQAPTPKAGRSQPCVDVHGLGAHPGPKREVVKGEPTGPCNSKQLFGQFLLKPVSRRPWDLISQLESFNKELQEEEESSSSSSSSSSSSEESEAEPQQENRAHCRQEDVGFRGNSPEMRVEPQPRMWVPESPVCRSGRGESKSESWSEELQPGHPRAWPPSPGRFRVEEGGGAPFCSADGSTSAEKRHLEVSNGMDELAGSPFPVTRMSSRSSDAKPLPASYPAEPREPQESPKITSAFSSVKPSEAVPRKFDSGGERGAGLPLSLSNKNRGLSAPDLRSVGLTPGQEQGASELEGSLGEASTIEIPPGESLQARAARILGIEVAVESLLPGIRRAGQNQPAEPDASACTPESPQEELLSRPAPADVPRVSTDAFYGRRKCGWTKSPLFVGDRDSARRAPQAFEHSDVDGVVTSTDPVPEPEPSPLESKFFEQKDVETKPPFRSTLFHFVERTPSVAGSEKRLRSPSKVIESLQEKLASPPRRADPDRLMRMKEVSSVSRMRVLSFRNADSQEDAEELKATTRGQAGLPGGLVSPGSGDRAQRLGHSLSVSKDSISREEKEHPAAQKEKSMDQDFWCPDSYDPSRVERV

SEQ ID NO: 43282 - protein, 20 aa, Homo sapiens
MREPLVLGPATTMVPVVELC

SEQ ID NO: 43283 - protein, 438 aa, Homo sapiens
MENLYASEEPAVYEPSLMTMCQDSNQNDERSKSLLLSGQEVPWLSSVRYGTVEDLLAFANHISNTAKHFYGQRPQESGILLNMVITPQNGRYQIDSDVLLIPWKLTYRNIGSDFIPRGAFGKVYLAQDIKTKKRMACKLIPVDQFKPSDVEIQACFRHENIAELYGAVLWGETVHLFMEAGEGGSVLEKLESCGPMREFEIIWVTKHVLKGLDFLHSKKVIHHDIKPSNIVFMSTKAVLVDFGLSVQMTEDVYFPKDLRGTEIYMSPEVILCRGHSTKADIYSLGATLIHMQTGTPPWVKRYPRSAYPSYLYIIHKQAPPLEDIADDCSPGMRELIEASLERNPNHRPRAADLLKHEALNPPREDQPRCQSLDSALLERKRLLSRKELELPENIADSSCTGSTEESEMLKRQRSLYIDLGALAGYFNLVRGPPTLEYG

SEQ ID NO: 43284 - protein, 442 aa, Homo sapiens
MTNSPVLPVGSTTNGSRSSTPSPSPLNLSSSRNTQGYLYTAEGAQEEPQVEPLDLSLPKQQGELLERSTITSVYQNSVYSVQEEPLNLSCAKKEPQKDSCVTDSEPVVNVIPPSANPINIAIPTVTAQLPTIVAIADQNSVPCLRALAANKQTILIPQVAYTYSTTVSPAVQEPPLKVIQPNGNQDERQDTSSEGVSNVEDQNDSDSTPPKKKMRKTENGMYACDLCDKIFQKSSSLLRHKYEHTGKRPHECGICKKAFKHKHHLIEHMRLHSGEKPYQCDKCGKRFSHSGSYSQHMNHRYSYCKREAEERDSTEQEEAGPEILSNEHVGARASPSQGDSDERESLTREEDEDSEKEEEEEDKEMEELQEEKECEKPQGDEEEEEEEEEVEEEEVEEAENEGEEAKTEGLMKDDRAESQASSLGQKVGESSEQVSEEKTNEA

SEQ ID NO: 43285 - protein, 814 aa, Homo sapiens
MADRSGKIIPGQVYIEVEYDYEYEAKDRKIVIKQGERYILVKKTNDDWWQVKPDENSKAFYVPAQYVKEVTRKALMPPVKQVAGLPNNSTKIMQSLHLQRSTENVNKLPELSSFGKPSSSVQGTGLIRDANQNFGPSYNQGQTVNLSLDLTHNNGKFNNDSHSPKVSSQNRTRSFGHFPGPEFLDVEKTSFSQEQSCDSAGEGSERIHQDSESGDELSSSSTEQIRATTPPNQGRPDSPVYANLQELKISQSALPPLPGSPAIQINGEWETHKDSSGRCYYYNRGTQERTWKPPRWTRDASISKGDFQNPGDQELLSSEENYYSTSYSQSDSQCGSPPRGWSEELDERGHTLYTSDYTNEKWLKHVDDQGRQYYYSADGSRSEWELPKYNASSQQQREIIKSRSLDRRLQEPIVLTKWRHSTIVLDTNDKDQEKYGLLNVTKIAENGKKVRKNWLSSWAVLQGSSLLFTKTQGSSTSWFGSNQSKPEFTVDLKGATIEMASKDKSSKKNVFELKTRQGTELLIQSDNDTVINDWFKVLSSTINNQAVETDEGIEEEIPDSPGIEKHDKEKEQKDPKKLRSFKVSSIDSSEQKKTKKNLKKFLTRRPTLQAVREKGYIKDQVFGSNLANLCQRENGTVPKFVKLCIEHVEEHGLDIDGIYRVSGNLAVIQKLRFAVNHDEKLDLNDSKWEDIHVITGALKMFFRELPEPLFTFNHFNDFVNAIKQEPRQRVAAVKDLIRQLPKPNQDTMQILFRHLRRVIENGEKNRMTYQSIAIVFGPTLLKPEKETGNIAVHTVYQNQIVELILLELSSIFGR

SEQ ID NO: 43286 - protein, 952 aa, Homo sapiens [sequence omitted]

SEQ ID NO: 43287 - protein, 769 aa, Homo sapiens [sequence omitted]

SEQ ID NO: 43288 - protein, 744 aa, Homo sapiens
MPTSARCDDLEALKKKGCPPDDIENPRGSKDIKKNKNVTNRSKGTAEKLKPEDITQIQPQQLVLRLRSGEPQTFTLKFKRAEDYPIDLYYLMDLSYSMKDDLENVKSLGTDLMNEMRRITSDFRIGFGSFVEKTVMPYISTTPAKLRNPCTSEQNCTSPFSYKNVLSLTNKGEVFNELVGKQRISGNLDSPEGGFDAIMQVAVCGSLIGWRNVTRLLVFSTDAGFHFAGDGKLGGIVLPNDGQCHLENNMYTMSHYYDYPSIAHLVQKLSENNIQTIFAVTEEFQPVYKELKNLIPKSAVGTLSANSSNVIQLIIDAYNSLSSEVILENGKLSEGVTISYKSYCKNGVNGTGENGRKCSNISIGDEVQFEISITSNKCPKKDSDSFKIRPLGFTEEVEVILQYICECECQSEGIPESPKCHEGNGTFECGACRCNEGRVGRHCECSTDEVNSEDMDAYCRKENSSEICSNNGECVCGQCVCRKRDNTNEIYSGKFCECDNFNCDRSNGLICGGNGVCKCRVCECNPNYTGSACDCSLDTSTCEASNGQICNGRGICECGVCKCTDPKFQGQTCEMCQTCLGVCAEHKECVQCRAFNKGEKKDTCTQECSYFNITKVESRDKLPQPVQPDPVSHCKEKDVDDCWFYFTYSVNGNNEVMVHVVENPECPTGPDIIPIVAGVVAGIVLIGLALLLIWKLLMIIHDRREFAKFEKEKMNAKWDTQENPIYKSPINNFKNPNYGRKAGL

SEQ ID NO: 43289 - protein, 856 aa, Homo sapiens
MINFNPHFDLEDRDCKYDYVEVFDGENENGHFRGKFCGKIAPPPVVSSGPFLFIKFVSDYETHGAGFSIRYEIFKRGPECSQNYTTPSGVIKSPGFPEKYPNSLECTYIVFVPKMSEIILEFESFDLEPDSNPPGGMFCRYDRLEIWDGFPDVGPHIGRYCGQKTPGRIRSSSGILSMVFYTDSAIAKEGFSANYSVLQSSVSEDFKCMEALGMESGEIHSDQITASSQYSTNWSAERSRLNYPENGWTPGEDSYREWIQVDLGLLRFVTAVGTQGAISKETKKKYYVKTYKIDVSSNGEDWITIKEGNKPVLFQGNTNPTDVVVAVFPKPLITRFVRIKPATWETGISMRFEVYGCKITDYPCSGMLGMVSGLISDSQITSSNQGDRNWMPENIRLVTSRSGWALPPAPHSYINEWLQIDLGEEKIVRGIIIQGGKHRENKVFMRKFKIGYSNNGSDWKMIMDDSKRKAKSFEGNNNYDTPELRTFPALSTRFIRIYPERATHGGLGLRMELLGCEVEAPTAGPTTPNGNLVDECDDDQANCHSGTGDDFQLTGGTTVLATEKPTVIDSTIQSEFPTYGFNCEFGWGSHKTFCHWEHDNHVQLKWSVLTSKTGPIQDHTGDGNFIYSQADENQKGKVARLVSPVVYSQNSAHCMTFWYHMSGSHVGTLRVKLRYQKPEEYDQLVWMAIGHQGDHWKEGRVLLHKSLKLYQVIFEGEIGKGNLGGIAVDDISINNHISQEDCAKPADLDKKNPEIKIDETGSTPGYEGEGEGDKNISRKPGNVLKTLDPILITIIAMSALGVLLGAVCGVVLYCACWHNGMSERNLSALENYNFELVDGVKLKKDKLNTQSTYSEA

SEQ ID NO: 43290 - protein, 577 aa, Homo sapiens
MINFNPHFDLEDRDCKYDYVEVFDGENENGHFRGKFCGKIAPPPVVSSGPFLFIKFVSDYETHGAGFSIRYEIFKRGPECSQNYTTPSGVIKSPGFPEKYPNSLECTYIVFVPKMSEIILEFESFDLEPDSNPPGGMFCRYDRLEIWDGFPDVGPHIGRYCGQKTPGRIRSSSGILSMVFYTDSAIAKEGFSANYSVLQSSVSEDFKCMEALGMESGEIHSDQITASSQYSTNWSAERSRLNYPENGWTPGEDSYREWIQVDLGLLRFVTAVGTQGAISKETKKKYYVKTYKIDVSSNGEDWITIKEGNKPVLFQGNTNPTDVVVAVFPKPLITRFVRIKPATWETGISMRFEVYGCKITDYPCSGMLGMVSGLISDSQITSSNQGDRNWMPENIRLVTSRSGWALPPAPHSYINEWLQIDLGEEKIVRGIIIQGGKHRENKVFMRKFKIGYSNNGSDWKMIMDDSKRKAKSFEGNNNYDTPELRTFPALSTRFIRIYPERATHGGLGLRMELLGCEVEAPTAGPTTPNGNLVDECDDDQANCHSGTGDDFQLTGGTTVLATEKPTVIDSTIQSGIK

SEQ ID NO: 43291 - protein, 1333 aa, Homo sapiens
MKVFSLIQQAVTRYRKAIAKDPNYWIQVHRLEHGDGGILDLDDILCDVADDKDRLVAVFDEQDPHHGGDGTSASSTGTQSPEIFGSELGTNNVSAFQPYQATSEIEVTPSVLRANMPLHVRRSSDPALIGLSTSVSDSNFSSEEPSRKNPTRWSTTAGFLKQNTAGSPKTCDRKKDENYRSLPRDTSNWSNQFQRDNARSSLSASHPMVGKWLEKQEQDEDGTEEDNSRVEPVGHADTGLEHIPNFSLDDMVKLVEVPNDGGPLGIHVVPFSARGGRTLGLLVKRLEKGGKAEHENLFRENDCIVRINDGDLRNRRFEQAQHMFRQAMRTPIIWFHVVPAANKEQYEQLSQSEKNNYYSSRFSPDSQYIDNRSVNSAGLHTVQRAPRLNHPPEQIDSHSRLPHSAHPSGKPPSAPASAPQNVFSTTVSSGYNTKKIGKRLNIQLKKGTEGLGFSITSRDVTIGGSAPIYVKNILPRGAAIQDGRLKAGDRLIEVNGVDLVGKSQEEVVSLLRSTKMEGTVSLLVFRQEDAFHPRELNAEPSQMQIPKETKAEDEDIVLTPDGTREFLTFEVPLNDSGSAGLGVSVKGNRSKENHADLGIFVKSIINGGAASKDGRLRVNDQLIAVNGESLLGKTNQDAMETLRRSMSTEGNKRGMIQLIVARRISKCNELKSPGSPPGPELPIETALDDRERRISHSLYSGIEGLDESPSRNAALSRIMGKYQLSPTVNMPQDDTVIIEDDRLPVLPPHLSDQSSSSSHDDVGFVTADAGTWAKAAISDSADCSLSPDVDPVLAFQREGFGRQSMSEKRTKQFSDASQLDFVKTRKSKSMDLGIADETKLNTVDDQKAGSPSRDVGPSLGLKKSSSLESLQTAVAEVTLNGDIPFHRPRPRIIRGRGCNESFRAAIDKSYDKPAVDDDDEGMETLEEDTEESSRSGRESVSTASDQPSHSLERQMNGNQEKGDKTDRKKDKTGKEKKKDRDKEKDKMKAKKGMLKGLGDMFRFGKHRKDDKIEKTGKIKIQESFTSEEERIRMKQEQERIQAKTREFRERQARERDYAEIQDFHRTFGCDDELMYGGVSSYEGSMALNARPQSPREGHMMDALYAQVKKPRNSKPSPVDSNRSTPSNHDRIQRLRQEFQQAKQDEDVEDRRRTYSFEQPWPNARPATQSGRHSVSVEVQMQRQRQEERESSQQAQRQYSSLPRQSRKNASSVSQDSWEQNYSPGEGFQSAKENPRYSSYQGSRNGYLGGHGFNARVMLETQELLRQEQRRKEQQMKKQPPSEGPSNYDSYKKVQDPSYAPPKGPFRQDVPPSPSQVARLNRLQTPEKGRPFYS

SEQ ID NO: 43292 - protein, 1224 aa, Homo sapiens
MKVFSLIQQAVTRYRKAIAKDPNYWIQVHRLEHGDGGILDLDDILCDVADDKDRLVAVFDEQDPHHGGDGTSASSTGTQSPEIFGSELGTNNVSAFQPYQATSEIEVTPSVLRANMPLHVRRSSDPALIGLSTSVSDSNFSSEEPSRKNPTRWSTTAGFLKQNTAGSPKTCDRKDEDGTEEDNSRVEPVGHADTGLEHIPNFSLDDMVKLVEVPNDGGPLGIHVVPFSARGGRTLGLLVKRLEKGGKAEHENLFRENDCIVRINDGDLRNRRFEQAQHMFRQAMRTPIIWFHVVPAANKEQYEQLSQSEKNNYYSSRFSPDSQYIDNRSVNSAGLHTVQRAPRLNHPPEQIDSHSRLPHSAHPSGKPPSAPASAPQNVFSTTVSSGYNTKKIGKRLNIQLKKGTEGLGFSITSRDVTIGGSAPIYVKNILPRGAAIQDGRLKAGDRLIEVNGVDLVGKSQEEVVSLLRSTKMEGTVSLLVFRQEDAFHPRELKAEDEDIVLTPDGTREFLTFEVPLNDSGSAGLGVSVKGNRSKENHADLGIFVKSIINGGAASKDGRLRVNDQLIAVNGESLLGKTNQDAMETLRRSMSTEGNKRGMIQLIVARRISKCNELKSPGSPPGPELPIETALDDRERRISHSLYSGIEGLDESPSRNAALSRIMGKYQLSPTVNMPQDDTVIIEDDRLPVLPPHLSDQSSSSSHDDVGFVTADAGTWAKAAISDSADCSLSPDVDPVLAFQREGFGRQSMSEKRTKQFSDASQLDFVKTRKSKSMDLGSSPSRDVGPSLGLKKSSSLESLQTAVAEVTLNGDIPFHRPRPRIIRGRGCNESFRAAIDKSYDKPAVDDDDEGMETLEEDTEESSRSGRESVSTASDQPSHSLERQMNGNQEKGDKTDRKKDKTGKEKKKDRDKEKDKMKAKKGMLKGLGDMFRIQAKTREFRERQARERDYAEIQDFHRTFGCDDELMYGGVSSYEGSMALNARPQSPREGHMMDALYAQVKKPRNSKPSPVDSNRSTPSNHDRIQRLRQEFQQAKQDEDVEDRRRTYSFEQPWPNARPATQSGRHSVSVEVQMQRQRQEERESSQQAQRQYSSLPRQSRKNASSVSQDSWEQNYSPGEGFQSAKENPRYSSYQGSRNGYLGGHGFNARVMLETQELLRQEQRRKEQQMKKQPPSEGPSNYDSYKKVQDPSYAPPKGPFRQDVPPSPSQVARLNRLQTPEKGRPFYS

SEQ ID NO: 43293 - protein, 83 aa, Homo sapiens
METLRRSMSTEGNKRGMIQLIVARRISKCNELKSPGSPPGPELPIETALDDRERRISHSLYSGIEGLDESPSRNAALSRIMGT

SEQ ID NO: 43294 - protein, 720 aa, Homo sapiens [sequence omitted]

SEQ ID NO: 43295 - protein, 32 aa, Homo sapiens
MAVPTSIYQTSTGQYSMYAAIRYDTVLALSLL

SEQ ID NO: 43296 - protein, 350 aa, Homo sapiens
MSALKQSTSEASVLGERTKSVMMEKGLDWEGRSSTEKNYKCKECGKVFKYNSSFISHQRNHTSEKPHKCKECGIAFMNSSSLLNHHKVHAGKQPYRCIECGKFLKKHSTFINHQRIHSREKPHKCIECGKTFRKNSILLSHQRIHTGQKPYKCNDCGKAFAQNAALTRHERIHSGEKPFKCNKCGRAFRDNSTVLEHQKIHTGEKPYQCNECGKAFRKSSTLISHQRMHTGEKPYHCSKCGKSFRYSSSFAGHQKTHSGNKPYQCRDCGKAFTKSSTLTGHQRIHTGEKPYHCKKCGKAFRHSSGLVEHQRLHTGEKPYKCNECGKAFPRSSALKQHKKIHNKERAMKCS

SEQ ID NO: 43297 - protein, 997 aa, Homo sapiens
MSDEEEDDDGCDLFADSEKEEEDIEDIEENTRPKRSRPTSFADELAARIKGDAMGRVDEEPTNEEDNLFAPPKLTDEDFSPFGSGGGLFSGGKGLFDDEDEESDLFTEASQDRQAGASVKEESSSSKPGKKIPAGAVSVFLGDTDVFGAASVPSLKEPQKPEQPTPRKSPYGPPPTGLFDDDDGDDDDDFFSAPHSKPSKTRKVQSTADIFGDEEGDLFKEKAVASPEATVSQTDENKARAEKKVTLSYSKNLKPSSETKTQKGLFSDEEDSEDLFSSQSASNLKGASLLPGKLPTSVSLFDDEDEEDNLFGGTAAKKQTLSLQAQREEKAKASELSKKKASALLFSSDEEDQWNIPASQTHLASDSRSKGEPRDSGTLQSQEAKAVKKTSLFEEDKEDDLFAIAKDSQKKTQRVSLLFEDDVDSGGSLFGSPPTSVPPATKEGLLTRSAQETVKHSDLFSSSSPWDKGTKPRTKTVLSLFDEEEDKMEDQNIIQAPQKEVGKGCDPDAHPKSTGVFQDEELLFSHKLQKDNDPDVDLFAGTKKTKLLEPSVGSLFGDDEDDDLFSSAKSQPLVQEKKRVVKKDHSVNSFKNQKHPESIQGSKEKGIWKPETPQANLAINPAALLPTAASQISEVKPVLPELAFPSSEHRRSHGLESVPVLPGSGEAGVSFDLPAQADTLHSANKSRVKMRGKRRPQTRAARRLAAQESSEAEDMSVPRGPIAQWADGAISPNGHRPQLRAASGEDSTEEALAAAAAPWEGGPVPGVDTSPFAKSLGHSRGEADLFDSGDIFSTGTGSQSVERTKPKAKIAENPANPPVGGKAKSPMFPALGEASSDDDLFQSAKPKPAKKTNPFPLLEDEDDLFTDQKVKKNETKSSSQQDVILTTQDIFEDDIFATEAIKPSQKTREKEKTLESNLFDDNIDIFADLTVKPKEKSKKKVEAKSIFDDDMDDIFSTGIQAKTTKPKSRSAQAAPEPRFEHKVSNIFDDPLNAFGGQ

SEQ ID NO: 43298 - protein, 288 aa, Homo sapiens
MALAPPPRGLWQAKDISPIVKAARRDGELLLSAQLDSEERDPGVPRPSPYAPYILVYANDLAISEPNSVAVTLQRYDPFPAGDPEPRAAPNNSADPRVRRAAQATGPLQDNELPGLDERPPRAHAQHFHKHQLWPSPFRALKPRPGRKDRRKKGQEVFMAASQVLDFDEKTMQKARRKQWDEPRVCSRRYLKVDFADIGWNEWIISPKSFDAYYCAGACEFPMPKIVRPSNHATIQSIVRAVGIIPGIPEPCCVPDKMNSLGVLFLDENRNVVLKVYPNMSVDTCACR

SEQ ID NO: 43299 - protein, 308 aa, Homo sapiens
MKCVNHKNIIGLLNVFTPQKSLEEFQDVYIVMELMDANLCQVIQMELDHERMSYLLYQMLCGIKHLHSAGIIHRDLKPSNIVVKSDCTLKILDFGLARTAGTSFMMTPYVVTRYYRAPEVILGMGYKENVDIWSVGCIMGEMIKGGVLFPGTDHIDQWNKVIEQLGTPCPEFMKKLQPTVRTYVENRPKYAGYSFEKLFPDVLFPADSEHNKLKASQARDLLSKMLVIDASKRISVDEALQHPYINVWYDPSEAEAPPPKIPDKQLDEREHTIEEWKELIYKEVMDLEERTKNGVIRGQPSPLAQVQQ

SEQ ID NO: 43300 - protein, 351 aa, Homo sapiens
MKCVNHKNIIGLLNVFTPQKSLEEFQDVYIVMELMDANLCQVIQMELDHERMSYLLYQMLCGIKHLHSAGIIHRDLKPSNIVVKSDCTLKILDFGLARTAGTSFMMTPYVVTRYYRAPEVILGMGYKENVDIWSVGCIMGEMIKGGVLFPGTDHIDQWNKVIEQLGTPCPEFMKKLQPTVRTYVENRPKYAGYSFEKLFPDVLFPADSEHNKLKASQARDLLSKMLVIDASKRISVDEALQHPYINVWYDPSEAEAPPPKIPDKQLDEREHTIEEWKELIYKEVMDLEERTKNGVIRGQPSPLGAAVINGSQHPSSSSSVNDVSSMSTDPTLASDTDSSLEAAAGPLGCCR

SEQ ID NO: 43301 - protein, 1158 aa, Homo sapiens
MLSNTQFIENRVYDEEVEEPVLKAEAEKTEQEKTREQKEVDLIPKVQEAVNYGLQVLDSAFEQLDIKAGNSDSEEDDANGRVELILEPKDLYIDRPLPYLIGSKLFMEQEDVGLGELSSEEGSVGSDRGSIVDTEEEKEEEESDEDFAHHSDNEQNRHTTQMSDEEEDDDGCDLFADSEKEEEDIEDIEENTRPKRSRPTSFADELAARIKGDAVGRVDEEPTNEEDNLFAPPKLTDEDFSPFGSGGGLFSGGKGLFDDEDEESDLFTEAPQDRQAGASVKEESSSSKPGKKIPAGAVSVFLGDTDVFGAASVPSMKEPQKPEQPTPRKSPYGPPPTGLFDDDDGDDDDDFFSAPHSKPSKTGKVQSTADIFGDEEGDLFKEKAVASPEATVSQTDENKARAEKKVTLSSSKNLKPSSETKTQKGLFSDEEDSEDLFSSQSASKLKGASLLPGKLPTLVSLFDDEDEEDNLFGGTAAKKQTLCLQAQREEKAKASELSKKKASALLFSSDEEDQWNIPASQTHLASDSRSKGEPRDSGTLQSQEAKAVKKTSLFEEDEEDDLFAIAKDSQKKTQRVSLLFEDDVDSGGSLFGSPPTSVPPATKEGLLTRSAQETVKHSDLFSSSSPWDKGTKPRTKTVLSLFDEEEDKMEDQNIIQAPQKEVGKGRDPDAHPKSTGVFQDEELLFSHKLQKDNDPDVDLFAGTKKTKLLEPSVGSLFGDDEDDDLFSSAKSQPLVQEKKRVVKKDHSVDSFKNQKHPESIQGSKEKGIWKPETPQANLAINPAALLPTAASQISEVKPVLPELAFPSSEHRRSHGLESVPVLPGSGEAGVSFDLPAQADTLHSANKSRVKMRGKRRPQTRAARRLAAQESSETEDMSVPRGPIAQWADGAISPNGHRPQLRAASGEDSTEEALAAAAAPWEGGPVPGVDRSPFAKSLGHSRGEADLFDSGDIFSTGTGSQSVERTKPKAKIAENPANPPVGGKAKSPMFPALGEASSDDDLFQSAKPKPAKKTNPFPLLEDEDDLFTDQKVKKNETKSNSQQDVILTTQDIFEDDIFATEAIKPSQKTREKEKTLESNLFDDNIDIFADLTVKPKEKSKKKVEAKSIFDDDMDDIFSSGIQAKTTKPKSRSAQAAPEPRFEHKVSNIFDDPLNAFGGQ

SEQ ID NO: 43302 - protein, 393 aa, Homo sapiens [sequence omitted]

SEQ ID NO: 43303 - protein, 659 aa, Homo sapiens
MLKEERIKELEKRLSEKEEEIQELKRKLHKCQSVLPVPSTHIGPRTTRAQGISAEPQTYRSFHDLRQAFRKFTKSERSKDLIKEAILDNDFMKNLELSQIQEIVDCMYPVEYGKDSCIIKEGDVGSLVYVMEDGKVEVTKEGVKLCTMGPGKVFGELAILYNCTRTATVKTLVNVKLWAIDRQCFQTIMMRTGLIKHTEYMEFLKSVPTFQSLPEEILSKLADVLEETHYENGEYIIRQGARGDTFFIISKGTVNVTREDSPSEDPVFLRTLGKGDWFGEKALQGEDVRTANVIAAEAVTCLVIDRDSFKHLIGGLDDVSNKAYEDAEAKAKYEAEAAFFANLKLSDFNIIDTLGVGGFGRVELVQLKSEESKTFAMKILKKRHIVDTRQQEHIRSEKQIMQGAHSDFIVRLYRTFKDSKYLYMLMEACLGGELWTILRDRGSFEDSTTRFYTACVVEAFAYLHSKGIIYRDLKPENLILDHRGYAKLVDFGFAKKIGFGKKTWTFCGTPEYVAPEIILNKGHDISADYWSLGILMYELLTGSPPFSGPDPMKTYNIILRGIDMIEFPKKIAKNAANLIKKLCRDNPSERLGNLKNGVKDIQKHKWFEGFNWEGLRKGTLTPPIIPSVASPTDTSNFDSFPEDNDEPPPDDNSGWDIDF

SEQ ID NO: 43304 - protein, 45 aa, Homo sapiens
MGPGKVFGELAILYNCTRTATVKKMESCYVAQLFLNSWAQEVLLP

SEQ ID NO: 43305 - protein, 398 aa, Homo sapiens
MRTSPAIESTPEGTPQPAGGRLRFLNGCVPLSHQVAGHMYGKDKVGILQHPDGTVLKQLQPPPRGPRELEFYNMVYAADCFDGVLLELRKYLPKYYGIWSPPTAPNDLYLKLEDVTHKFNKPCIMDVKIGQKSYDPFASSEKIQQQVSKYPLMEEIGFLVLGMRVYHVHSDSYETENQHYGRSLTKETIKDGVSRFFHNGYCLRKDAVAASIQKIEKILQWFENQKQLNFYASSLLFVYEGSSQPTTTKLNDRTLAEKFLSKGQLSDTEVLEYNNNFHVLSSTANGKIESSVGKSLSKMYARHRKIYTKKHHSQTSLKVENLEQDNGWKSMSQEHLNGNVLSQLEKVFYHLPTGCQEIAEVEVRMIDFAHVFPSNTIDEGYVYGLKHLISVLRSILDN

SEQ ID NO: 43306 - protein, 65 aa, Homo sapiens [sequence omitted]

SEQ ID NO: 43307 - protein, 208 aa, Homo sapiens [sequence omitted]

SEQ ID NO: 43308 - protein, 240 aa, Homo sapiens [sequence omitted]

SEQ ID NO: 43309 - protein, 854 aa, Homo sapiens
MIMSVLDTKSNRVTLKMDVSHTEHSHVIGKGGNNIKKVMEETGCHIHFPDSNRNNQAEKSNQVSIAGQPAGVESARVRIRELLPLVLMFELPIAGILQPVPDPNSPSIQHISQTYNISVSFKQRSRMYGATVIVRGSQNNTSAVKEGTAMLLEHLAGSLASAIPVSTQLDIAAQHHLFMMGRNGSNIKHIMQRTGAQIHFPDPSNPQKKSTVYLQGTIESVCLARQYLMGCLPLVLMFDMKEEIEVDPQFIAQLMEQLDVFISIKPKPKQPSKSVIVKSVERNALNMYEARKCLLGLESSGVTIATSPSPASCPAGLACPSLDILASAGLGLTGLGLLGPTTLSLNTSTTPNSLLNALNSSVSPLQSPSSGTPSPTLWAPPLANTSSATGFSAIPHLMIPSTAQATLTNILLSGVPTYGHTAPSPPPGLTPVDVHINSMQTEGKKISAALNGHAQSPDIKYGAISTSSLGEKVLSANHGDPSIQTSGSEQTSPKSSPTEGCNDAFVEVGMPRSPSHSGNAGDLKQMMCPSKVSCAKRQTVELLQGTKNSHLHSTDRLLSDPELSATESPLADKKAPGSERAAERAAAAQQNSERAHLAPRSSYVNMQAFDYEQKKLLATKAMLKKPVVTEVRTPTNTWSGLGFSKSMPAETIKELRRANHVSYKPTMTTTYEGSSMSLSRSNSREHLGGGSESDNWRDRNGIGPGSHSEFAASIGSPKRKQNKSTEHYLSSSNYMDCISSLTGSNGCNLNSSFKGSDLPELFSKLGLGKYTDVFQQQEIDLQTFLTLTDQDLKELGITTFGARRKMLLAISELNKNRRKLFESPNARTSFLEGGASGRLPRQYHSDIASVSGRW

SEQ ID NO: 43310 - protein, 25 aa, Homo sapiens
MDLGNTPFATRSVLARRFLAWLSKT

SEQ ID NO: 43311 - protein, 1722 aa, Homo sapiens
MAAQENHLEVVKFLLDNGASQSLATEDGFTPLAVALQQGHDQVVSLLLENDTKGKVRLPALHIAARKDDTKAAALLLQNDNNADVESKSGFTPLHIAAHYGNINVATLLLNRAAAVDFTARNDITPLHVASKRGNANMVKLLLDRGAKIDAKTRDGLTPLHCGARSGHEQVVEMLLDRAAPILSKTKNGLSPLHMATQGDHLNCVQLLLQHNVPVDDVTNDYLTALHVAAHCGHYKVAKVLLDKKANPNAKALNGFTPLHIACKKNRIKVMELLLKHGASIQAVTESGLTPIHVAAFMGHVNIVSQLMHHGASPNTTNVRGETALHMAARSGQAEVVRYLVQDGAQVEAKAKDDQTPLHISARLGKADIVQQLLQQGASPNAATTSGYTPLHLSAREGHEDVAAFLLDHGASLSITTKKGFTPLHVAAKYGKLEVANLLLQKSASPDAAGKSGLTPLHVAAHYDNQKVALLLLDQGASPHAAAKNGYTPLHIAAKKNQMDIATTLLEYGADANAVTRQGIASVHLAAQEGHVDMVSLLLGRNANVNLSNKSGLTPLHLAAQEDRVNVAEVLVNQGAHVDAQTKMGYTPLHVGCHYGNIKIVNFLLQHSAKVNAKTKNGYTPLHQAAQQGHTHIINVLLQNNASPNELTVNGNTALGIARRLGYISVVDTLKIVTEETMTTTTVTEKHKMNVPETMNEVLDMSDDEVRKANAPEMLSDGEYISDVEEGEDAMTGDTDKYLGPQDLKELGDDSLPAEGYMGFSLGARSASLRSFSSDRSYTLNRSSYARDSMMIEELLVPSKEQHLTFTREFDSDSLRHYSWAADTLDNVNLVSSPIHSGFLVSFMVDARGGSMRGSRHHGMRIIIPPRKCTAPTRITCRLVKRHKLANPPPMVEGEGLASRLVEMGPAGAQFLGPVIVEIPHFGSMRGKERELIVLRSENGETWKEHQFDSKNEDLTELLNGMDEELDSPEELGKKRICRIITKDFPQYFAVVSRIKQESNQIGPEGGILSSTTVPLVQASFPEGALTKRIRVGLQAQPVPDEIVKKILGNKATFSPIVTVEPRRRKFHKPITMTIPVPPPSGEGVSNGYKGDTTPNLRLLCSITGGTSPAQWEDITGTTPLTFIKDCVSFTTNVSARFWLADCHQVLETVGLATQLYRELICVPYMAKFVVFAKMNDPVESSLRCFCMTDDKVDKTLEQQENFEEVARSKDIEVLEGKPIYVDCYGNLAPLTKGGQQLVFNFYSFKENRLPFSIKIRDTSQEPCGRLSFLKEPKTTKGLPQTAVCNLNITLPAHKKIEKTDRRQSFASLALRKRYSYLTEPGMSPQSPCERTDIRMAIVADHLGLSWTELARELNFSVDEINQIRVENPNSLISQSFMLLKKWVTRDGKNATTDALTSVLTKINRIDIVTLLEGPIFDYGNISGTRSFADENNVFHDPVDGYPSLQVELETPTGLHYTPPTPFQQDDYFSDISSIESPLRTPSRLSDGLVPSQGNIEHSADGPPVVTAEDASLEDSKLEDSVPLTEMPEAVDVDESQLENVCLSWQNETSSGNLESCAQARRVTGGLLDRLDDSPDQCRDSITSYLKGEAGKFEANGSHTEITPEAKTKSYFPESQNDVGKQSTKETLKPKIHGSGHVEEPASPLAAYQKSLEETSKLIIEETKPCVPVSMKKMSRTSPADGKPRLSLHEEEGSSGSEQKQGEGFKVKTKKEIRHVEKKSHS

SEQ ID NO: 43312 - protein, 266 aa, Homo sapiens
MKKIRLESEEEGVPSTAIREISLLKELRHPNIVSLQDVLMQDSRLYLIFEFLSMDLKKYLDSIPPGQYMDSSLVKSYLYQILQGIVFCHSRRVLHRDLKPQNLLIDDKGTIKLADFGLARAFGIPIRVYTHEVVTLWYRSPEVLLGSARYSTPVDIWSIGTIFAELATKKPLFHGDSEIDQLFRIFRALGTPNNEVWPEVESLQDYKNTFPKWKPGSLASHVKNLDENGLDLLSKMLIYDPAKRISGKMALNHPYFNDLDNQIKKM

SEQ ID NO: 43313 - protein, 692 aa, Homo sapiens [sequence omitted]

SEQ ID NO: 43314 - protein, 146 aa, Homo sapiens
MNAARLLFHKLIQPDHPQISQQVAASLEKNLIPKLTSSLPDVEALRFYLTLPECPLMSDSNNFTTIAIPFGTALVNLEKAPLKVLENWWSVLEPPLFLKIVELFKEVVVHLLKLYKIGIPPSERRIFNSFLHTALKVLEILHRCNK

SEQ ID NO: 43315 - protein, 45 aa, Homo sapiens [sequence omitted]

SEQ ID NO: 43316 - protein, 76 aa, Homo sapiens [sequence omitted]

SEQ ID NO: 43317 - protein, 314 aa, Homo sapiens [sequence omitted]

SEQ ID NO: 43318 - protein, 302 aa, Homo sapiens
MAEMKTEDGKVEKHYLFYDGESVSGKVNLAFKQPGKRLEHQGIRIEFVGQIELFNDKSNTHEFVNLVKELALPGELTQSRSYDFEFMQVEKPYESYIGANVRLRYFLKVTIVRRLTDLVKEYDLIVHQLATYPDVNNSIKMEVGIEDCLHIEFEYNKSKYHLKDVIVGKIYFLLVRIKIQHMELQLIKKEITGIGPSTTTETETIAKYEIMDGAPVKGESIPIRLFLAGYDPTPTMRDVNKKFSVRYFLNLVLVDEEDRRYFKQQEIILWRKAPEKLRKQRTNFHQRFESPESQASAEQPEM

SEQ ID NO: 43319 - protein, 589 aa, Homo sapiens
MQRKIIFHSGPTNSGKTYHAIQKYFSAKSGVYCGPLKLLAHEIFEKSNAAGVPCDLVTGEERVTVQPNGKQASHVSCTVEMCSVTTPYEVAVIDEIQMIRDPARGWAWTRALLGLCAEEVHLCGEPAAIDLVMELMYTTGEEVEVRDYKRLTPISVLDHALESLDNLRPGDCIVCFSKNDIYSVSRQIEIRGLESAVIYGSLPPGTKLAQAKKFNDPNDPCKILVATDAIGMGLNLSIRRIIFYSLIKPSINEKGERELEPITTSQALQIAGRAGRFSSRFKEGEVTTMNHEDLSLLKEILKRPVDPIRAAGLHPTAEQIEMFAYHLPDATLSNLIDIFVDFSQVDGQYFVCNMDDFKFSAELIQHIPLSLRVRYVFCTAPINKKQPFVCSSLLQFARQYSRNEPLTFAWLRRYIKWPLLPPKNIKDLMDLEAVHDVLDLYLWLSYRFMDMFPDASLIRDLQKELDGIIQDGVHNITKLIKMSETHKLLNLEGFPSGSQSRLSGTLKSQARRTRGTKALGSKATEPPSPDAGELSLASRLVQQGLLTPDMLKQLEKEWMTQQTEHNKEKTESGTHPKGTRRKKKEPDSD

SEQ ID NO: 43320 - protein, 558 aa, Homo sapiens [sequence omitted]

SEQ ID NO: 43321 - protein, 155 aa, Homo sapiens
MLKDDRLGQHVPTLHPTSEELTIAGMTFTTFDLGGHEQARRVWKNYLPAINGIVFLVDCADHSRLVESKVELNALMTDETISNVPILILGNKIDRTDAISEEKLREIFGLYGQTTGKGNVTLKELNARPMEVFMCSVLKRQGYGEGFRWLSQYID

SEQ ID NO: 43322 - protein, 144 aa, Homo sapiens [sequence omitted]

SEQ ID NO: 43323 - protein, 360 aa, Homo sapiens
MLCLVANFLLVNRVAVHIRVLASLTVILAIFMVITALVKVDTSSWTRGFFAVTIVCMVILSGASTVFSSSIYGMTGSFPMRNSQALISGGAMGGTVSAVASLVDLAASSDVRNSALAFFLTATVFLVLCMGLYLLLSRLEYARYYMRPVLAAHVFSGEEELPQDSLSAPSVASRFIDSHTPPLRPILKKTASLGFCVTYVFFITSLIYPAICTNIESLNKGSGSLWTTKFFIPLTTFLLYNFADLCGRQLTAWIQVPGPNSKALPGFVLLRTCLIPLFVLCNYQPRVHLKTVVFQSDVYPALLSSLLGLSNGYLSTLALLYGPKIVPRELAEATGVVMSFYVCLGLTLGSACSTLLVHLI

SEQ ID NO: 43324 - protein, 141 aa, Homo sapiens
MVITALVKVDTSSWTRGFFAVTIVCMVILSGASTVFSSSIYGMTGSFPMRNSQALISGGAMGGTVSAVASLVDLAASSDVRNSALAFFLTATVFLVLCMGLYLLLSRLEYARQGNGESGRNPQTPEWYKLTFRKNTDGCLP

SEQ ID NO: 43325 - protein, 460 aa, Homo sapiens
MRSKYALFLVFVVIVFVFIEKENKIISRVSDKLKQIPQALADANSTDPALILAENASLLSLSELDSAFSQLQSRLRNLSLQLGVEPAMEAAGEEEEEQRKEEEPPRPAVAGPRRHVLLMATTRTGSSFVGEFFNQQGNIFYLFEPLWHIERTVSFEPGGANAAGSALVYRDVLKQLFLCDLYVLEHFITPLPEDHLTQFMFRRGSSRSLCEDPVCTPFVKKVFEKYHCKNRRCGPLNVTLAAEACRRKEHMALKAVRIRQLEFLQPLAEDPRLDLRVIQLVRDPRAVLASRMVAFAGKYKTWKKWLDDEGQDGLREEEVQRLRGNCESIRLSAELGLRQPAWLRGRYMLVRYEDVARGPLQKAREMYRFAGIPLTPQVEDWIQKNTQAAHDGSGIYSTQKNSSEQFEKWRFSMPFKLAQVVQAACGPAMRLFGYKLARDAAALTNRSVSLLEERGTFWVT

SEQ ID NO: 43326 - protein, 198 aa, Homo sapiens
MDHGVDSSIFQNPKKLHLTIGMLVLLSEEEIQQTCEMLQQCKEEFINDISGGKPLEVEMAGIEYMNDDPGMVDVLYAKVHMKDGSNRLQELVDRVLERFQASGLIVKEWNSVKLHATVMNTLFRKDPNAEGRYNLYTAEGKYIFKERESFDGRNILKSFALLPRLEYNDAISAHCNLCLPGSSDSPASASQVAGITVV

SEQ ID NO: 43327 - protein, 130 aa, Homo sapiens
MDHGVDSSIFQNPKKLHLTIGMLVLLSEEEIQQTCEMLQQCKEEFINDISGGKPLEVEMAGIEYMNDDPGMVDVLYAKVHMKDGSNRLQELVDRVLERFQASGLIVKEWNSVKLHATVMNTLFRKDPNVV

SEQ ID NO: 43328 - protein, 32 aa, Homo sapiens
MEKLAGLVEELEADEWRFKPIEQLLGFTPSSG

SEQ ID NO: 43329 - protein, 153 aa, Homo sapiens
MRYTYQQRQDRRDNQGDGGLGVFVQLMPILILILVSALSQLMVSSPPYSLSPRPSVGHIHRRVTDHLGVVYYVGDTFSEEYTGSSLKTVERNVEDDYIANLRNNCWKEKQQKEGLLYRARYFGDTDMYHRAQKMGTPSCSRLSETMKSLENFW

SEQ ID NO: 43330 - protein, 640 aa, Homo sapiens [sequence omitted]

SEQ ID NO: 43331 - protein, 422 aa, Homo sapiens
MFTAIDELLYEQKLSVHTKSLQEECQQWTASFPHLRILGRQIITPSEGYRLYPRSPSAVSASYETTLSQERDSTIFGIRGKKLHFSSSYAHKASSIAKSSSFCSMERDEEDSIIVSEGIIEEYLAFDHIDIEEGFHGKKSEAATEKQKLGYPPIAPFYCMKEDVLAYVFDSVWCKVVSCMEQLTRSHWEGFASDDESNVAVTRPDSESSCVLSELHPLVLPRVPQSKMSLCQASRHQPNVNDLLVHGMPLQPRNLSLMDKLLDLDDKLLMRPGSSTILSTRNWPNRAVEFSTSSLSYTVQSTRRRNPPPRTLHPISTSHSCAETPRSVEEILRGARVPVAPDSLSSPSPTPLSRNNLLPPIGTAEVEHVSTVGPQRQMKPHGDSSRAQSAVVDEPNYQQPQERLLLPDFFPRPNTTQSFLVE

SEQ ID NO: 43332 - protein, 36 aa, Homo sapiens
MMITNAERLRRKRAREVLLASQKTDAEATDTEATET

SEQ ID NO: 43333 - protein, 824 aa, Homo sapiens
MGDSCIFCALKGIFNQFQCSSEKVLPSDTLRSALAKTFQDEQRFQLGIMDDAAECFENLLMRIHFHIADETKEDICTAQHCISHQKFAMTLFEQCVCTSCGATSDPLPFIQMVHYISTTSLCNQAICMLERREKPSPSMFGELLQNASTMGDLRNCPSNCGERIRIRRVLMNAPQIITIGLVWDSDHSDLAEDVIHSLGTCLKLGDLFFRVTDDRAKQSELYLVGMICYYGKHYSTFFFQTKIRKWMYFDDAHVKEIGPKWKDVVTKCIKGHYQPLLLLYADPQGTPVSTQDLPPQAEFQSYSRTCYDSEDSGREPSISSDTRTDSSTESYPYKHSHHESVVSHFSSDSQGTVIYNVENDSMSQSSRDTGHLTDSECNQKHTSKKGSLIERKRSSGRVRRKGDEPQASGYHSEGETLKEKQAPRNASKPSSSTNRLRDFKETVSNMIHNRPSLASQTNVGSHCRGRGGDQPDKKPPRTLPLHSRDWEIESTSSESKSSSSSKYRPTWRPKRESLNIDSIFSKDKRKHCGYTQLSPFSEDSAKEFIPDEPSKPPSYDIKFGGPSPQYKRWGPARPGSHLLEQHPRLIQRMESGYESSERNSSSPVSLDAALPESSNVYRDPSAKRSAGLVPSWRHIPKSHSSSILEVDSTASMGGWTKSQPFSGEEISSKSELDELQEEVARRAQEQELRRKREKELEAAKGFNPHPSRFMDLDELQNQGRSDGFERSLQEAESVFEESLHLEQKGDCAAALALCNEAISKLRLALHGASCSTHSRALVDKKLQISIRKARSLQDRMQQQQSPQQPSQPSACLPTQAGTLSQPTR

SEQ ID NO: 43334 - protein, 858 aa, Homo sapiens
MTGPLGPLPPMHSPQQPGYQPQQNGSFGPARGPQSNYGGPYPAAPTFGSQPGPPQPLPPKRLDPDAIPSPQLSELPPQQKTRHRIDPDAIPSPIQVIEDDRNNRGTEPFVTGVRGQVPPLVTTNFLVKDQGNASPRYIRCTSYNIPCTSDMAKQAQVPLAAVIKPLARLPPEEASPYVVDHGESGPLRCNRCKAYMCPFMQFIEGGRRFQCCFCSCINDVPPQYFQHLDHTGKRVDAYDRPELSLGSYEFLATVDYCKNNKFPSPPAFIFMIDVSYNAIRTGLVRLLCEELKSLLDFLPREGGAEESAIRVGFVTYNKVLHFYNVKSSLAQPQMMVVSDVADMFVPLLDGFLVNVNESRAVITSLLDQIPEMFADTRETETVFVPVIQAGMEALKAAECAGKLFLFHTSLPIAEAPGKLKNRDDRKLINTDKEKTLFQPQTGAYQTLAKECVAQGCCVDLFLFPNQYVDVATLSVVPQLTGGSVYKYASFQVENDQERFLSDLRRDVQKVVGFDAVMRVRTSTGIRAVDFFGAFYMSNTTDVELAGLDGDKTVTVEFKHDDRLNEESGALLQCALLYTSCAGQRRLRIHNLALNCCTQLADLYRNCETDTLINYMAKFAYRGVLNSPVKAVRDTLITQCAQILACYRKNCASPSSAGQLILPECMKLLPVYLNCVLKSDVLQPGAEVTTDDRAYVRQLVTSMDVTETNVFFYPRLLPLTKSPVESTTEPPAVRASEERLSNGDIYLLENGLNLFLWVGASVQQGVVQSLFSVSSFSQITSGLSVLPVLDNPLSKKVRGLIDSLRAQRSRYMKLTVVKQEDKMEMLFKHFLVEDKSLSGGASYVDFLCHMHKEIRQLLS

SEQ ID NO: 43335 - protein, 1839 aa, Homo sapiens
MFAEWEDGERFSFEDSDRFEEDSLCSFISEAESLCQNWRGWRKQSAGPNSPTGGGGGGGSGGTRMRDGLVIPLVELSAKQVAFHIPFEVVEKVYPPVPEQLQLRIAFWSFPENEEDIRLYSCLANGSADEFQRGDQLFRMRAVKDPLQIGFHLSATVVPPQMVPPKGAYNVAVMFDRCRVTSCSCTCGAGAKWCTHVVALCLFRIHNASAVCLRAPVSESLSRLQRDQLQKFAQYLISELPQQILPTAQRLLDELLSSQSTAINTVCGAPDPTAGPSASDQSTWYLDESTLTDNIKKTLHKFCGPSPVVFSDVNSMYLSSTEPPAAAEWACLLRPLRGREPEGVWNLLSIVREMFKRRDSNAAPLLEILTDQCLTYEQITGWWYSVRTSASHSSASGHTGRSNGQSEVAAHACASMCDEMVTLWRLAVLDPALSPQRRRELCTQLRQWQLKVIENVKRGQHKKTLERLFPGFRPAVEACYFNWEEAYPLPGVTYSGTDRKLALCWARALPSRPGASRSGGLEESRDRPRPLPTEPAVRPKEPGTKRKGLGEGVPSSQRGPRRLSAEGGDKALHKMGPGGGKAKALGGAGSGSKGSAGGGSKRRLSSEDSSLEPDLAEMSLDDSSLALGAEASTFGGFPESPPPCPLHGGSRGPSTFLPEPPDTYEEDGGVYFSEGPEPPTASVGPPGLLPGDVCTQDDLPSTDESGNGLPKTKEAAPAVGEEDDDYQAYYLNAQDGAGGEEEKAEGGAGEEHDLFAGLKPLEQESRMEVLFACAEALHAHGYSSEASRLTVELAQDLLANPPDLKVEPPPAKGKKNKVSTSRQTWVATNTLSKAAFLLTVLSERPEHHNLAFRVGMFALELQRPPASTKALEVKLAYQESEVAALLKKIPLGPSEMSTMRCRAEELREGTLCDYRPVLPLMLASFIFDVLCAPVVSPTGSRPPSRNWNSETPGDEELGFEAAVAALGMKTTVSEAEHPLLCEGTRREKGDLALALMITYKDDQAKLKKILDKLLDRESQTHKPQTLSSFYSSSRPTTASQRSPSKHGGPSAPGALQPLTSGSAGPAQPGSVAGAGPGPTEGFTEKNVPESSPHSPCEGLPSEAALTPRPEGKVPSRLALGSRGGYNGRGWGSPGRPKKKHTGMASIDSSAPETTSDSSPTLSRRPLRGGWAPTSWGRGQDSDSISSSSSDSLGSSSSSGSRRASASGGARAKTVEVGRYKGRRPESHAPHVPNQPSEAAAHFYFELAKTVLIKAGGNSSTSIFTHPSSSGGHQGPHRNLHLCAFEIGLYALGLHNFVSPNWLSRTYSSHVSWITGQAMEIGSAALTILVECWDGHLTPPEVASLADRASRARDSNMVRAAAELALSCLPHAHALNPNEIQRALVQCKEQDNLMLEKACMAVEEAAKGGGVYPEVLFEVAHQWFWLYEQTAGGSSTAREGATSCSASGIRAGGEAGRGMPEGRGGPGTEPVTVAAAAVTAAATVVPVISVGSSLYPGPGLGHGHSPGLHPYTALQPHLPCSPQYLTHPAHPAHPMPHMPRPAVFPVPSSAYPQGVHPAFLGAQYPYSVTPPSLAATAVSFPVPSMAPITVHPYHTEPGLPLPTSVACELWGQGTVSSVHPASTFPAIQGASLPALTTQPSPLVSGGFPPPEEETHSQPVNPHSLHHLHAAYRVGMLALEMLGRRAHNDHPNNFSRSPPYTDDVKWLLGLAAKLGVNYVHQFCVGAAKGVLSPFVLQEIVMETLQRLSPAHAHNHLRAPAFHQLVQRCQQAYMQYIHHRLIHLTPADYDDFVNAIRSARSAFCLTPMGMMQFNDILQNLKRSKQTKELWQRVSLEMATFSP

SEQ ID NO: 43336 - protein, 1831 aa, Homo sapiens
MFAEWEDGERFSFEDSDRFEEDSLCSFISEAESLCQNWRGWRKQSAGPNSPTGGGGGGGSGGTRMRDGLVIPLVELSAKQVAFHIPFEVVEKVYPPVPEQLQLRIAFWSFPENEEDIRLYSCLANGSADEFQRGDQLFRMRAVKDPLQIGFHLSATVVPPQMVPPKGAYNVAVMFDRCRVTSCSCTCGAGAKWCTHVVALCLFRIHNASAVCLRAPVSESLSRLQRDQLQKFAQYLISELPQQILPTAQRLLDELLSSQSTAINTVCGAPDPTAGPSASDQSTWYLDESTLTDNIKKTLHKFCGPSPVVFSDVNSMYLSSTEPPAAAEWACLLRPLRGREPEGVWNLLSIVREMFKRRDSNAAPLLEILTDQCLTYEQITGWWYSVRTSASHSSASGHTGRSNGQSEVAAHACASMCDEMVTLWRLAVLDPALSPQRRRELCTQLRQWQLKVIENVKRGQHKKTLERLFPGFRPAVEACYFNWEEAYPLPGVTYSGTDRKLALCWARALPSRPGASRSGGLEESRDRPRPLPTEPAVRPKEPGTKRKGLGEGVPSSQRGPRRLSAEGGDKALHKMGPGGGKAKALGGAGSGSKGSAGGGSKRRLSSEDSSLEPDLAEMSLDDSSLALGAEASTFGGFPESPPPCPLHGGSRGPSTFLPEPPDTYEEDGGVYFSEGPEPPTASVGPPGLLPGDVCTQDDLPSTDESGNGLPKTKEAAPAVGEEDDDYQAYYLNAQDGAGGEEEKAEGGAGEEHDLFAGLKPLEQESRMEVLFACAEALHAHGYSSEASRLTVELAQDLLANPPDLKVEPPPAKGKKNKVSTSRQTWVATNTLSKAAFLLTVLSERPEHHNLAFRVGMFALELQRPPASTKALEVKLAYQESEVAALLKKIPLGPSEMSTMRCRAEELREGTLCDYRPVLPLMLASFIFDVLCAPVVSPTGSRPPSRNWNSETPGDEELGFEAAVAALGMKTTVSEAEHPLLCEGTRREKGDLALALMITYKDDQAKLKKILDKLLDRESQTHKPQTLSSFYSSSRPTTASQRSPSKHGGPSAPGALQPLTSGSAGPAQPGSVAGAGPGPTEGFTEKNVPESSPHSPCEGLPSEAALTPRPEGKVPSRLALGSRGGYNGRGWGSPGRPKKKHTGMASIDSSAPETTSDSSPTLSRRPLRGGWAPTSWGRGQDSDSISSSSSDSLGSSSSSGSRRASASGGARAKTVEVGRYKGRRPESHAPHVPNQPSEAAAHFYFELAKTVLIKAGGNSSTSIFTHPSSSGGHQGPHRNLHLCAFEIGLYALGLHNFVSPNWLSRTYSSHVSWITGQAMEIGSAALTILVECWDGHLTPPEVASLADRASRARDSNMVRAAAELALSCLPHAHALNPNEIQRALVQCKEQDNLMLEKACMAVEEAAKGGGVYPEVLFEVAHQWFWLYEQTAGGSSTAREGATSCSASGIRAGGEAGRGMPEGRGGPGTEPVTVAAAAVTAAATVVPVISVGSSLYPGPGLGHGHSPGLHPYTALQPHLPCSPQYLTHPAHPAHPMPHMPRPAVFPVPSSAYPQGVHPAFLGAQYPYSVTPPSLAATAVSFPVPSMAPITVHPYHTEPGLPLPTSVALSSVHPASTFPAIQGASLPALTTQPSPLVSGGFPPPEEETHSQPVNPHSLHHLHAAYRVGMLALEMLGRRAHNDHPNNFSRSPPYTDDVKWLLGLAAKLGVNYVHQFCVGAAKGVLSPFVLQEIVMETLQRLSPAHAHNHLRAPAFHQLVQRCQQAYMQYIHHRLIHLTPADYDDFVNAIRSARSAFCLTPMGMMQFNDILQNLKRSKQTKELWQRVSLEMATFSP

SEQ ID NO: 43337 - protein, 345 aa, Homo sapiens
MGRPCLPWNSATVLQQTYHAHRSDALQLGLGKHNYCRNPDNRRRPWCYVQVGLKLLVQECMVHDCADGKKPSSPPEELKFQCGQKTLRPRFKIIGGEFTTIENQPWFAAIYRRHRGGSVTYVCGGSLISPCWVISATHCFIDYPKKEDYIVYLGRSRLNSNTQGEMKFEVENLILHKDYSADTLAHHNDIALLKIRSKEGRCAQPSRTIQTICLPSMYNDPQFGTSCEITGFGKENSTDYLYPEQLKMTVVKLISHRECQQPHYYGSEVTTKMLCAADPQWKTDSCQGDSGGPLVCSLQGRMTLTGIVSWGRGCALKDKPGVYTRVSHFLPWIRSHTKEENGLAL

SEQ ID NO: 43338 - protein, 1154 aa, Homo sapiens
MSSNIHANHLSLDASSSSSSSSSSSSSSSSSSSSSSVHEPKMDALIIPVTMEVPCDSRGQRMWWAFLASSMVTFFGGLFIILLWRTLKYLWTVCCHCGGKTKEAQKINNGSSQADGTLKPVDEKEEAVAAEVGWMTSVKDWAGVMISAQTLTGRVLVVLVFALSIGALVIYFIDSSNPIESCQNFYKDFTLQIDMAFNVFFLLYFGLRFIAANDKLWFWLEVNSVVDFFTVPPVFVSVYLNRSWLGLRFLRALRLIQFSEILQFLNILKTSNSIKLVNLLSIFISTWLTAAGFIHLVENSGDPWENFQNNQALTYWECVYLLMVTMSTVGYGDVYAKTTLGRLFMVFFILGGLAMFASYVPEIIELIGNRKKYGGSYSAVSGRKHIVVCGHITLESVSNFLKDFLHKDRDDVNVEIVFLHNISPNLELEALFKRHFTQVEFYQGSVLNPHDLARVKIESADACLILANKYCADPDAEDASNIMRVISIKNYHPKIRIITQMLQYHNKAHLLNIPSWNWKEGDDAICLAELKLGFIAQSCLAQGLSTMLANLFSMRSFIKIEEDTWQKYYLEGVSNEMYTEYLSSAFVGLSFPTVCELCFVKLKLLMIAIEYKSANRESRILINPGNHLKIQEGTLGFFIASDAKEVKRAFFYCKACHDDITDPKRIKKCGCKRLEDEQPSTLSPKKKQRNGGMRNSPNTSPKLMRHDPLLIPGNDQIDNMDSNVKKYDSTGMFHWCAPKEIEKVILTRSEAAMTVLSGHVVVCIFGDVSSALIGLRNLVMPLRASNFHYHELKHIVFVGSIEYLKREWETLHNFPKVSILPGTPLSRADLRAVNINLCDMCVILSANQNNIDDTSLQDKECILASLNIKSMQFDDSIGVLQANSQGFTPPGMDRSSPDNSPVHGMLRQPSITTGVNIPIITELVNDTNVQFLDQDDDDDPDTELYLTQPFACGTAFAVSVLDSLMSATYFNDNILTLIRTLVTGGATPELEALIAEENALRGGYSTPQTLANRDRCRVAQLALLDGPFADLGDGGCYGDLFCKALKTYNMLCFGIYRLRDAHLSTPSQCTKRYVITNPPYEFELVPTDLIFCLMQFDHNAGQSRASLSHSSHSSQSSSKKSSSVHSIPSTANRQNRPKSRESRDKQKYVQEERL

SEQ ID NO: 43339 - protein, 285 aa, Homo sapiens
MDSNVKKYDSTGMFHWCAPKEIEKVILTRSEAAMTVLSGHVVVCIFGDVSSALIGLRNLVMPLRASNFHYHELKHIVFVGSIEYLKREWETLHNFPKVSILPGTPLSRADLRAVNINLCDMCVILSANQNNIDDTSLQDKECILASLNIKSMQFDDSIGVLQANSQGFTPPGMDRSSPDNSPVHGMLRQPSITTGVNIPIITELVNDTNVQFLDQDDDDDPDTELYLTQPFACGTAFAVSVLDSLMSAILLPHSSAPGCLHGKIKESHHLGCSASSESRQLCSEI

SEQ ID NO: 43340 - protein, 1014 aa, Homo sapiens
MGCLTVVSRVAAQQGFDLDLGYRLLAVCAANRDKFTPKSAALLSSWCEELGRLLLLRHQKSRQSDPPGKLPMQPPLSSMSSMKPTLSHSDGSFPYDSVPWQQNTNQPPGSLSVVTTVWGVTNTSQSQVLGNPMANANNPMNPGGNPMASGMTTSNPGLNSPQFAGQQQQFSAKAGPAQPYIQQSMYGRPNYPGSGGFGASYPGGPNAPAGMGIPPHTRPPADFTQPAAAAAAAAVAAAAATATATATATVAALQETQNKDINQYGPMGPTQAYNSQFMNQPGPRGPASMGGSMNPASMAAGMTPSGMSGPPMGMNQPRPPGISPFGTHGQRMPQQTYPGPRPQSLPIQNIKRPYPGEPNYGNQQYGPNSQFPTQPGQYPAPNPPRPLTSPNYPGQRMPSQPSSGQYPPPTVNMGQYYKPEQFNGQNNTFSGSSYSNYSQGNVNRPPRPVPVANYPHSPVPGNPTPPMTPGSSIPPYLSPSQDVKPPFPPDIKPNMSALPPPPANHNDELRLTFPVRDGVVLEPFRLEHNLAVSNHVFHLRPTVHQTLMWRSDLELQFKCYHHEDRQMNTNWPASVQVSVNATPLTIERGDNKTSHKPLHLKHVCQPGRNTIQITVTACCCSHLFVLQLVHRPSVRSVLQGLLKKRLLPAEHCITKIKRNFSSVAASSGNTTLNGEDGVEQTAIKVSLKCPITFRRIQLPARGHDCKHVQCFDLESYLQLNCERGTWRCPVCNKTALLEGLEVDQYMWGILNAIQHSEFEEVTIDPTCSWRPVPIKSDLHIKDDPDGIPSKRFKTMSPSQMIMPNVMEMIAALGPGPSPYPLPPPPGGTNSNDYSSQGNNYQGHGNFDFPHGNPGGTSMNDFMHGPPQLSHPPDMPNNMAALEKPLSHPMQETMPHAGSSDQPHPSIQQGLHVPHPSSQSGPPLHHSGAPPPPPSQPPRQPPQAAPSSHPHSDLTFNPSSALEGQAGAQGASDMPEPSLDLLPELTNPDELLSYLDPPDLPSNSNDDLLSLFENN

SEQ ID NO: 43341 - protein, 171 aa, Homo sapiens
MGVTFLPDLGTPALSNSVYKGASPYGSLNNIADGLSSLTEHFSDLTLTSEARKPSKRPPPNYLCHLCFNKGHYIKDCPQARPKGEGLTPYQGKKRCFGEYKCPKCKRKWMSGNSWANMGQECIKCHINVYPHKQRPLEKPDGLDVSDQSKEHPQHLCEKCKVLGYYCRRVQ

SEQ ID NO: 43342 - protein, 46 aa, Homo sapiens
MEEMVEKTVDHLGTEVKGLLGLLEELAWNLPPGPFSPAPDLLGDGF

SEQ ID NO: 43343 - protein, 731 aa, Homo sapiens
MFDKNGIKGGLKSVSLFTSKLAKPSTMFVSSTEELNQKSFSGPSNLGKFTKGTLLGRTSYSSINTPKSQLNGFYGNRSAGSMQRPRANSCATRSSSGESLAQSPDSSKSINCEKMVRSQSFSHSIQNSFLPPSSITRSHSFNRAVDLTKPYQNQQLSIRVPLRSSMLTRNSRQPEVLNGNEHLGYGFNRPYAAGGKKLALPNGPGVTSTLGYRMVHPSLLKSSRSPFSGTMTVDGNKNSPADTCVEEDATVLAKDRAANKDQELIENESYRTKNNQTMKHDAKMRYLSDDVDDISLSSLSSSDKNDLSEDFSDDFIDIEDSNRTRITPEEMSLKEEKHENGPPQDMFDSPKENEKAFSKTDEWIDISVSDRSECTKHTSGNNLVSPDTDYRAGSSFELSPSDSSDGTYMWDEEGLEPIGNVHPVGSYESSEMNSIDILNNLESCDLEDDDLMLDVDLPEDAPLENVECDNMNRFDRPDRNVRQPQEGFWKRPPQRWSGQEHYHLSHPDHYHHHGKSDLSRGSPYRESPLGHFESYGGMPFFQAQKMFVDVPENTVILDEMTLRHMVQDCTAVKTQLLKLKRLLHQHDGSGSLHDIQLSLPSSPEPEDGDKVYKNEDLLNEIKQLKDEIKKKDEKIQLLELQLATQHICHQKCKEEKCTYADKYTQTPWRRIPGGYSAPSFSPWQGSFQGIPRTVPPHRRQTSSTTAFQQPSQTHRSHPGKTNKATTYRGPQ

SEQ ID NO: 43344 - protein, 464 aa, Homo sapiens
MFDKNGIKGGLKSVSLFTSKLAKPSTMFVSSTEELNQKSFSGPSNLGKFTKGTLLGRTSYSSINTPKSQLNGFYGNRSAGSMQRPRANSCATRSSSGESLAQSPDSSKSINCEKMVRSQSFSHSIQNSFLPPSSITRSHSFNRAVDLTKPYQNQQLSIRVPLRSSMLTRNSRQPEVLNGNEHLGYGFNRPYAAGGKKLALPNGPGVTSTLGYRMVHPSLLKSSRSPFSGTMTVDGNKNSPADTCVEEDATVLAKDRAANKDQELIENESYRTKNNQTMKHDAKMRYLSDDVDDISLSSLSSSDKNDLSEDFSDDFIDIEDSNRTRITPEEMSLKEEKHENGPPQDMFDSPKENEKAFSKTDEWIDISVSDRSECTKHTSGNNLVSPDTDYRAGSSFELSPSDSSDGTYMWDEEGLEPIGNVHPVGSYESSEMNSIVCMDLYTLGIFCLPYYRETCDMIDFVKNL

SEQ ID NO: 43345 - protein, 927 aa, Homo sapiens
MTQGILALVTSTGCASANALQSLTDAMHIPHLFVQRNPGGSPRTACHLNPSPDGEAYTLASRPPVRLNDVMLRLVTELRWQKFVMFYDSEYDIRGLQSFLDQASRLGLDVSLQKVDKNISHVFTSLFTTMKTEELNRYRDTLRRAILLLSPQGAHSFINEAVETNLASKDSHWVFVNEEISDPEILDLVHSALGRMTVVRQIFPSAKDNQKCTRNNHRISSLLCDPQEGYLQMLQISNLYLYDSVLMLANAFHRKLEDRKWHSMASLNCIRKSTKPWNGGRSMLDTIKKGHITGLTGVMEFREDSSNPYVQFEILGTTYSETFGKDMRKLATWDSEKGLNGSLQERPMGSRLQGLTLKVVTVLEEPFVMVAENILGQPKRYKGFSIDVLDALAKALGFKYEIYQAPDGRYGHQLHNTSWNGMIGELISKRADLAISAITITPERESVVDFSKRYMDYSVGILIKKPEEKISIFSLFAPFDFAVWACIAAAIPVVGVLIFVLNRIQAVRAQSAAQPRPSASATLHSAIWIVYGAFVQQGGESSVNSMAMRIVMGSWWLFTLIVCSSYTANLAAFLTVSRMDNPIRTFQDLSKQVEMSYGTVRDSAVYEYFRAKGTNPLEQDSTFAELWRTISKNGGADNCVSSPSEGIRKAKKGNYAFLWDVAVVEYAALTDDDCSVTVIGNSISSKGYGIALQHGSPYRDLFSQRILELQDTGDLDVLKQKWWPHMGRCDLTSHASAQADGKSLKLHSFAGVFCILAIGLLLACLVAALELWWNSNRCHQETPKEDKEVNLEQVHRRMNSLMDEDIAHKQISPASIELSALEMGGLAPTQTLEPTREYQNTQLSVSTFLPEQSSHGTSRTLSSGPSSNLPLPLSSSATMPSMQCKHRSPNGGLFRQSPVKTPIPMSFQPVPGGVLPEALDTSHGTSI

SEQ ID NO: 43346 - protein, 334 aa, Homo sapiens
MHFDTLLDDGVINMSIPIVLPVSAEDKTRLEGCSKFVLAHGGRRVAILRDAEFYEHRKEERCSRVWGTTCTKHPHIKMVMESGDWLVGGDLQVLEKIRWNDGLDQYRLTPLELKQKCKEMNADAVFAFQLRNPVHNGHALLMQDTRRRLLERGYKHPVLLLHPLGGWTKDDDVPLDWRMKQHAAVLEEGVLDPKSTIVAIFPSPMLYAGPTEVQWHCRSRMIAGANFYIVGRDPAGMPHPETKKDLYEPTHGGKVLSMAPGLTSVEIIPFRVAAYNKAKKAMDFYDPARHNEFDFISGTRMRKLAREGENPPDGFMAPKAWKVLTDYYRSLEKN

SEQ ID NO: 43347 - protein, 303 aa, Homo sapiens
MKQIGVKNVKLSEYEMSIAAHLVDPLNMHVTWSDIAGLDDVITDLKDTVILPIKKKHLFENSRLLQPPKGVLLYGPPGCGKTLIAKATAKEAGCRFINLQPSTLTDKWYGESQKLAAAVFSLAIKLQPSIIFIDEIDSFLRNRSSSDHEATAMMKAQFMSLWDGLDTDHSCQVIVMGATNRPQDLDSAIMRRMPTRFHINQPALKQREAILKLILKNENVDRHVDLLEVAQETDGFSGSDLKEMCRDAALLCVREYVNSTSEESHDEDEIRPVQQQDLHRAIEKMKKSKDAAFQNVLTHVCLD

SEQ ID NO: 43348 - protein, 332 aa, Homo sapiens
MTGSLCAALLRRQTSGPLYLAVWDKAEDSGGRMTTACSPHNPQCTADLGAQYITCTPHYAKKHQRFYDELLAYGVLRPLSSPIEGMVMKEGDCNFVAPQGISSIIKHYLKESGAEVYFRHRVTQINLRDDKWEVSKQTGSPEQFDLIVLTMPVPEILQLQGDITTLISECQRQQLEAVSYSSRYALGLFYEAGTKIDVPWAGQYITSNPCIRFVSIDNKKRNIESSEIGPSLVIHTTVPFGVTYLEHSIEDVQELVFQQLENILPGLPQPIATKCQKWRHSQVTNAAANCPGQMTLHHKPFLACGGDGFTQSNFDGCITSALCVLEALKNYI

SEQ ID NO: 43349 - protein, 96 aa, Homo sapiens
MTLSQVKGFVRKNGVNEAKIDEIKNDNVQDTAEQKVQLLRNWHQLHGKKEAYDTLIKDLKKANLCTLAEKIQTIILKDITSDSENSNFRNEIQSLV

SEQ ID NO: 43350 - protein, 459 aa, Homo sapiens
MEGENSLDDFEDKVFYRTEFQNREFKATMCNLLAYLKHLKGQNEAALECLRKAEELIQQEHADQAEIRSLVTWGNYAWVYYHMGRLSDVQIYVDKVKHVCEKFSSPYRIESPELDCEEGWTRLKCGGNQNERAKVCFEKALEKKPKNPEFTSGLAIASYRLDNWPPSQNAIDPLRQAIRLNPDNQYLKVLLALKLHKMREEGEEEGEGEKLVEEALEKAPGVTDVLRSAAKFYRRKDEPDKAIELLKKALEYIPNNAYLHCQIGCCYRAKVFQVMNLRENGMYGKRKLLELIGHAVAHLKKADEANDNLFRVCSILASLHALADQYEDAEYYFQKEFSKELTPVAKQLLHLRYGNFQLYQMKCEDKAIHHFIEGVKINQKSREKEKMKDKLQKIAKMRLSKNGADSEALHVLAFLQELNEKMQQADEDSERGLESGSLIPSASSWNGERIEMWCPLGYC

SEQ ID NO: 43351 - protein, 376 aa, Homo sapiens
MDQLEEAQKYTGKIGNVCKKLSSPSNYKLECPETDCEKGWALLKFGGKYYQKAKAAFEKALEVEPDNPEFNIGYAITVYRLDDSDREGSVKSFSLGPLRKAVTLNPDNSYIKVFLALKLQDVHAEAEGEKYIEEILDQISSQPYVLRYAAKFYRRKNSWNKALELLKKALEVTPTSSFLHHQMGLCYRAQMIQIKKATHNRPKGKDKLKVDELISSAIFHFKAAMERDSMFAFAYTDLANMYAEGGQYSNAEDIFRKALRLENITDDHKHQIHYHYGRFQEFHRKSENTAIHHYLEALKVKDRSPLRTKLTSALKKLSTKRLCHNALDVQSLSALGFVYKLEGEKRQAAEYYEKAQKIDPENAEFLTALCELRLSI

SEQ ID NO: 43352 - protein, 318 aa, Homo sapiens
MVLKVEELVTGKKNGNGEAGEFLPEDFRDGEYEAAVTLEKQEDLKTLLAHPVTLGEQQWKSEKQREAELKKKKLEQRSKLENLEDLEIIIQLKKRKKYRKTKVPVVKEPEPEIITEPVDVPTFLKAALENKLPVVEKFLSDKNNPDVCDEYKRTALHRACLEGHLAIVEKLMEAGAQIEFRDMLESTAIHWASRGGNLDVLKLLLNKGAKISARDKLLSTALHVAVRTGHYECAEHLIACEADLNAKDREGDTPLHDAVRLNRYKMIRLLIMYGADLNIKNCAGKTPMDLVLHWQNGTKAIFDSLRENSYKTSRIATF

SEQ ID NO: 43353 - protein, 974 aa, Homo sapiens [sequence omitted]

SEQ ID NO: 43354 - protein, 612 aa, Homo sapiens
MESPLLPGLSFHQPPQQPPPPQEPAAPGASLSPSFGSTWSTGTTNAVEDSFFQGITPVNGTMLFQNFPHHVNPVFGGTFSPQIGLAQTQHHQQPPPPAPAPQPAQPAQPPQAQPPQQRRSPASPSQAPYAQRSAAAAYGHQPIMTSKPSSSSAVAAAAAAAAASSASSSWNTHQSVNAAWSAPSNPWGGLQAGRDPRRAVGVGVGVGVGVPSPLNPISPLKKPFSSNVIAPPKFPRAAPLTSKSWMEDNAFRTDNGNNLLPFQDRSRPYDTFNLHSLENSLMDMIRTDHEPLKGRMGINFHHPGTDNIMALNSRSSLFPFEDAFLDDSHGDQALSSGLSSPTRCQNGERVERYSRKVFVGGLPPDIDEDEITASFRRFGPLVVDWPHKAESKSYFPPKGYAFLLFQEESSVQALIDACLEEDGKLYLCVSSPTIKDKPVQIRPWNLSDSDFVMDGSQPLDPRKTIFVGGVPRPLRAVELAMIMDRLYGGVCYAGIDTDPELKYPKGAGRVAFSNQQSYIAAISARFVQLQHNDIDKRVEVKPYVLDDQMCDECQGTRCGGKFAPFFCANVTCLQYYCEYCWASIHSRAGREFHKPLVKEGGDRPRHVPFRWS

SEQ ID NO: 43355 - protein, 656 aa, Homo sapiens
MSAKRYYSALKTMEQLENVYFPWVSQYRFCQLMIENLPKLREDIKEISMSDLKDFLESIRKHSDKIGETAMKQAQHQKTFSVSLQKQNKMKFGKNMYINRDRIPEERNETVLKHSLEEEDENEEEILTVQDLVDFSPVYRCLHIYSVLGDEETFENYYRKQRKKQARLVLQPQSNMHETVDGYRRYFTQIVGFFVVEDHILHVTQGLVTRAYTDELWNMALSKIIAVLRAHSSYCTDPDLVLELKNLTVIFADTLQGYGFPVNRLFDLLFEIRDQYNETLLKKWAGVFRDIFEEDNYSPIPVVNEEEYKIVISKFPFQDPDLEKQSFPKKFPMSQSVPHIYIQVKEFIYASLKFSESLHRSSTEIDDMLRKSTNLLLTRTLSSCLLNLIRKPHIGLTELVQIIINTTHLEQACKYLEDFITNITNISQETVHTTRLYGLSTFKDARHAAEGEIYTKLNQKIDEFVQLADYDWTMSEPDGRASGYLMDLINFLRSIFQVFTHLPGKVAQTACMSACQHLSTSLMQMLLDSELKQISMGAVQQFNLDVIQCELFASSEPVPGFQGDTLQLAFIDLRQLLDLFMVWDWSTYLADYGQPASKYLRVNPNTALTLLEKMKDTSKKNNIFAQFRKNDRDKQKLIETVVKQLRSLVNGMSQHM

SEQ ID NO: 43356 - protein, 1140 aa, Homo sapiens
MAERLQTNIEALKSGIQGKIPANQLAELWLKLIDEVIEDTRYTLPLTEGKANVTVLDTQIRKLRSRSLSQIHEAAVRMRSEATDVKSTLAEIEDWLDKLMQLTEEPQNSMPDIIIWMIRGEKRLAYARIPAHQVLYSTSGENASGKYCGKTQTIFLKYPQEKNNGPKVPVELRVNIWLGLSAVEKKFNSFAEGTFTVFAEMYENQALMFGKWGTSGLVGRHKFSDVTGKIKLKREFFLPPKGWEWEGEWIVDPERSLLTEADAGHTEFTDEVYQNESRYPGGDWKPAEDTYTDANGDKAASPSELTCPPGWEWEDDAWSYDINRAVDEKGWEYGITIPPDHKPKSWVAAEKMYHTHRRRRLVRKRKKDLTQTASSTARAMEELQDQEGWEYASLIGWKFHWKQRSSDTFRRRRWRRKMAPSETHGAAAIFKLEGALGADTTEDGDEKSLEKQKHSATTVFGANTPIVSCNFDRVYIYHLRCYVYQARNLLALDKDSFSDPYAHICFLHRSKTTEIIHSTLNPTWDQTIIFDEVEIYGEPQTVLQNPPKVIMELFDNDQVGKDEFLGRSIFSPVVKLNSEMDITPKLLWHPVMNGDKACGDVLVTAELILRGKDGSNLPILPPQRAPNLYMVPQGIRPVVQLTAIEILAWGLRNMKNFQMASITSPSLVVECGGERVESVVIKNLKKTPNFPSSVLFMKVFLPKEELYMPPLVIKVIDHRQFGRKPVVGQCTIERLDRFRCDPYAGKEDIVPQLKASLLSAPPCRDIVIEMEDTKPLLASKCLSSMSTALSKMASPATVHLTEKEEEIVDWWSKFYASSGEHEKCGQYIQKGYSKLKIYNCELENVAEFEGLTDFSDTFKLYRGKSDENEDPSVVGEFKGSFRIYPLPDDPSVPAPPRQFRELPDSVPQECTVRIYIVRGLELQPQDNNGLCDPYIKITLGKKVIEDRDHYIPNTLNPVFGRMYELSCYLPQEKDLKISVYDYDTFTRDEKVGETIIDLENRFLSRFGSHCGIPEEYCVSGVNTWRDQLRPTQLLQNVARFKGFPQPILSEDGSRIRYGGRDYSLDEFEANKILHQHLGAPEERLALHILRTQGLVPEHVETRTLHSTFQPNISQILPACDHLEHQGRYLGREKHHRRGNE

SEQ ID NO: 43357 - protein, 46 aa, Homo sapiens
MDVVFAFIFQIIFFNNVPTWWTVGGALCVVASNVGAAIRKWYQSSK

SEQ ID NO: 43358 - protein, 1980 aa, Homo sapiens
MEEVRQLHVRFCKGIKIWHQAWFLCSLLGREPQEREAGCQLWLCTLSAVLKVGWLFPLSEVPNFTLLKDGCGCWRLKEDQIYNAVRREETENTVGSLLHFLTKLPASETAHGRISVGPCLKQCVRDTVCEYRATLQRTSISQYITGSLLEATTSLGARSGLLSTFGGSTGRMMLKERQPGPSVANSNALPSSSAGISKELIDLQPLIQFPEEVASILMEQEQTIYRRVLPVDYLCFLTRDLGTPECQSSLPCLKASISASILTTQNGEHNALEDLVMRFNEVSSWVTWLILTAGSMEEKREVFSYLVHVAKCCWNMGNYNAVMEFLAGLRSRKVLKMWQFMDQSDIETMRSLKDAMAQHESSCEYRKVVTRALHIPGCKVVPFCGVFLKELCEVLDGASGLMKLCPRYNSQEETLEFVADYSGQDNFLQRVGQNGLKNSEKESTVNSIFQVIRSCNRSLETDEEDSPSEGNSSRKSSLKDKSRWQFIIGDLLDSDNDIFEQSKEYDSHGSEDSQKAFDHGTELIPWYVLSIQADVHQFLLQGATVIHYDQDTHLSARCFLQLQPDNSTLTWVKPTTASPASSKAKLGVLNNTAEPGKFPLLGNAGLSSLTEGVLDLFAVKAVYMGHPGIDIHTVCVQNKLGSMFLSETGVTLLYGLQTTDNRLLHFVAPKHTAKMLFSGLLELTRAVRKMRKFPDQRQQWLRKQYVSLYQEDGRYEGPTLAHAVELFGGRRWSARNPSPGTSAKNAEKPNMQRNNTLGISTTKKKKKILMRGESGEVTDDEMATRKAKMHKECRSRSGSDPQDINEQEESEVNAIANPPNPLPSRRAHSLTTAGSPNLAAGTSSPIRPVSSPVLSSSNKSPSSAWSSSSWHGRIKGGMKGFQSFMVSDSNMSFVEFVELFKSFSVRSRKDLKDLFDVYAVPCNRSGSESAPLYTNLTIDENTSDLQPDLDLLTRNVSDLGLFIKSKQQLSDNQRQISDAIAAASIVTNGTGIESTSLGIFGVGILQLNDFLVNCQGEHCTYDEILSIIQKFEPSISMCHQGLMSFEGFARFLMDKENFASKNDESQENIKELQLPLSYYYIESSHNTYLTGHQLKGESSVELYSQVLLQGCRSVELDCWDGDDGMPIIYHGHTLTTKIPFKEVVEAIDRSAFINSDLPIIISIENHCSLPQQRKMAEIFKTVFGEKLVTKFLFETDFSDDPMLPSPDQLRKKVLLKNKKLKAHQTPVDILKQKAHQLASMQVQAYNGGNANPRPANNEEEEDEEDEYDYDYESLSDDNILEDRPENKSCNDKLQFEYNEEIPKRIKKADNSACNKGKVYDMELGEEFYLDQNKKESRQIAPELSDLVIYCQAVKFPGLSTLNASGSSRGKERKSRKSIFGNNPGRMSPGETASFNKTSGKSSCEGIRQTWEESSSPLNPTTSLSAIIRTPKCYHISSLNENAAKRLCRRYSQKLTQHTACQLLRTYPAATRIDSSNPNPLMFWLHGIQLVALNYQTDDLPLHLNAAMFEANGGCGYVLKPPVLWDKNCPMYQKFSPLERDLDSMDPAVYSLTIVSGQNVCPSNSMGSPCIEVDVLGMPLDSCHFRTKPIHRNTLNPMWNEQFLFHVHFEDLVFLRFAVVENNSSAVTAQRIIPLKALKRGYRHLQLRNLHNEVLEISSLFINSRRMEENSSGNTMSASSMFNTEERKCLQTHRVTVHGVPGPEPFTVFTINGGTKAKQLLQQILTNEQDIKPVTTDYFLMEEKYFISKEKNECRKQPFQRAIGPEEEIMQILSSWFPEEGYMGRIVLKTQQENLEEKNIVQDDKEVILSSEEESFFVQVHDVSPEQPRTVIKAPRVSTAQDVIQQTLCKAKYSYSILSNPNPSDYVLLEEVVKDTTNKKTTTPKSSQRVLLDQECVFQAQSKWKGAGKFILKLKEQVQASREDKKKGISFASELKKLTKSTKQPRGLTSPSQLLTSESIQTKEEKPVGGLSSSDTMDYRQ

SEQ ID NO: 43359 - protein, 269 aa, Homo sapiens
MTHLEAQNRIKGCTDNLTLTVARSEHKVWSPLVTEEGKRHPYKMNLASEPQEVLHIGSAHNRSAMPFTASPASSTTARVITNQYNNPAGLYSSENISNFNNALESKTAASGVEANSRPLDHAQPPSSLVIDKESEVYKMLQEKQELNEPPKQSTSFLVLQEILESEEKGDPNKPSGFRSVKAPVTKVAASIGNAQKLPMCDKCGTGIVGVFVKLRDRHRHPECYVCTDCGTNLKQKGHFFVEDQIYCEKHARERVTPPEGYEVVTVFPK

SEQ ID NO: 43360 - protein, 672 aa, Homo sapiens
MNGLAPGSNGQDKDMDLTKICTGKGAVTLRASSSYRETPSSSPASPQETRQHESKPDEWRLSSSADANGNAQPSSLAAKGYRSVHPNLPSDKSQDSSPLLNEVSSSLIGTDSQAFPSVSKPSSAYPSTTIVNPTIVLLQHNREQQKRLSSLSDPVSERRVGEQDSAPTQEKPTSPGKAIEKRAKDDSRRVVKSTQDLSDVSMDEVGIPLRNTERSKDWYKTMFKQIHKLNRDDDSDLYSPRYSFSEDTKSPLSVPRSKSEMSYIDGEKVVKRSATLPLPARSSSLKSSSERNDWEPPDKKVDTRKYRAEPKSIYEYQPGKSSVLTNEKMSSAISPTPEISSETPGYIYSSNFHAVKRESDGAPGDLTSLENERQIYKSVLEGGDIPLQGLSGLKRPSSSASTKDSESPRHFIPADYLESTEEFIRRRHDDKEMRPARAKFDFKAQTLKELPLQKGDIVYIYKQIDQNWYEGEHHGRVGIFPRTYIELLPPAEKAQPKKLTPVQVLEYGEAIAKFNFNGDTQVEMSFRKGERITLLRQVDENWYEGRIPGTSRQGIFPITYVDVIKRPLVKNPVDYMDLPFSSSPSRSATASPQQPQAQQRRVTPDRSQTSQDLFSYQALYSYIPQNDDELELRDGDIVDVMEKCDDGWFVGTSRRTKQFGTFPGNYVKPLYL

SEQ ID NO: 43361 - protein, 804 aa, Homo sapiens
MNGLAPGSNGQDKDMDLTKICTGKGAVTLRASSSYRETPSSSPASPQETRQHESKPGLEPEPSSADEWRLSSSADANGNAQPSSLAAKGYRSVHPNLPSDKSQDATSSSAAQPEVIVVPLYLVNTDRGQEGTARPPTPLGPLGCVPTIPATASAASPLTFPTLDDFIPPHLQRWPHHSQPARASGSFAPISQTPPSFSPPPPLVPPAPEDLRRVSEPDLTGAVSSTDSSPLLNEVSSSLIGTDSQAFPSVSKPSSAYPSTTIVNPTIVLLQHNREQQKRLSSLSDPVSERRVGEQDSAPTQEKPTSPGKAIEKRAKDDSRRVVKSTQDLSDVSMDEVGIPLRNTERSKDWYKTMFKQIHKLNRDDDSDLYSPRYSFSEDTKSPLSVPRSKSEMSYIDGEKVVKRSATLPLPARSSSLKSSSERNDWEPPDKKVDTRKYRAEPKSIYEYQPGKSSVLTNEKMSSAISPTPEISSETPGYIYSSNFHAVKRESDGAPGDLTSLENERQIYKSVLEGGDIPLQGLSGLKRPSSSASTKDSESPRHFIPADYLESTEEFIRRRHDDKEMRPARAKFDFKAQTLKELPLQKGDIVYIYKQIDQNWYEGEHHGRVGIFPRTYIELLPPAEKAQPKKLTPVQVLEYGEAIAKFNFNGDTQVEMSFRKGERITLLRQVDENWYEGRIPGTSRQGIFPITYVDVIKRPLVKNPVDYMDLPFSSSPSRSATASPQQPQAQQRRVTPDRSQTSQDLFSYQALYSYIPQNDDELELRDGDIVDVMEKCDDGWFVGTSRRTKQFGTFPGNYVKPLYL

SEQ ID NO: 43362 - protein, 415 aa, Homo sapiens
MGEVDLKLPGGAGPASGFFRSLMSLKRKEKGVIFGSPLTEEGIAQIYQLIEYLHKNLRVEGLFRVPGNSVRQQILRDALNNGTDIDLESGEFHSNDVATLLKMFLGELPEPLLTHKHFNAHLKIADLMQFDDKGNKTNIPDKDRQIEALQLLFLILPPPNRNLLKLLLDLLYQTAKKQDKNKMSAYNLALMFAPHVLWPKNVTANDLQENITKLNSGMAFMIKHSQKLFKAPAYIRECARLHYLGSRTQASKDDLDLIASCHTKSFQLAKSQKRNRVDSCPHQEETQHHTEEALRELFQHVHDMPESAKKKQLIRQFNKQSLTQTPGREPSTSQVQKRARSRSFSGLIKRKVLGNQMMSEKKKKNPTPESVAIGELKGTSKENRNLLFSGSPAVTMTPTRLKWSEGKKEGKKGFL

SEQ ID NO: 43363 - protein, 103 aa, Homo sapiens [sequence omitted]

SEQ ID NO: 43364 - protein, 186 aa, Homo sapiens
MTDGQLRSKRDEFWDTAPAFEGRKEIWDALKAAAYAAEANDHELAQAILDGASITLPHGTLCECYDELGNRYQLPIYCLSPPVNLLLEHTEEESLEPPEPPPSVRREFPLKVRLSTGKDVRLSASLPDTVGQLKRQLHAQEGIEPSWQRWFFSGKLLTDRTRLQETKIQKDFVIQVIINQPPPPQD

SEQ ID NO: 43365 - protein, 287 aa, Homo sapiens
MRRKYHSVRQEDLQRGRLSRPEAVAEVKSFLIQLEAFLSRLCCTCEAAYRVLHWENPVVSSQFYGALLGTVCMLYLLPLCWVLTLLNSTLFLGNVEFFRVVSEYRASLQQRMNPKQEEHAFESPPPPDVGGKDGLMDSTPALTPTESLSSQDLTPGSVEEAEEAEPDEEFKDAIEEDDEGAPCPAEDELALQDNGFLSKNEVLRSKVSRLTERLRKRYPTNNFGNCTGCSATFSVLKKRRSCSNCGNSFCSRCCSFKVPKSSMGATAPEAQRETVFVCASCNQTLSK

SEQ ID NO: 43366 - protein, 685 aa, Homo sapiens
MDTCLQKTNRVCSKRGTTESKEVLSQGQQQGAPNAGVITNAPLQRHFKPKKVECLEVETTDVTGHERILLSQACLEISEAQVPSKPFQNVEFCDFSRHEPDGEAFEDKDLEGRIETDTKVLEILYEFPRVFSSVMKPENMIVPIKLSSDSEIVQQSMQTSDGILNPSSGGITTTSVPGSPDGVFDQTCVDFEVESVGGIANSTGFILDQKDTDSIPATMGHISLSESTNDTVSPVMIRECEKNDSTADELHVKHEPPDTAVLAHETHRDSGFKNVGDITNKACMMDTTGMSCSDHVTVDSPYVVAVRIADETSINTRSFSKFVGMSADATPLHVARSGNDTEDFSNPSACSDIYGESISSHFTESTGKLIESLSDCASSLPIKKIAGSNYNTFLDSELSMLNGTKVLSDSAVGIDLGSTGDTTEALHELRTAEEFKTEEQDDSGSIEFGVSFPDRESSSMETSIEPKATETSHTEGITAIEESWESMFNDDGDCLDPRLLQELSGNTKSRESIQEPRSDYYNHEVPDIDLSDCEFPHVIEIYDFPQEFHTEDLLRVFCSYQKKGFDIKWVDDTHALGVFSSPITARDALGIKHTMVKIRPLSQATRAAKAKARAYAEFLQPAKERPETSAALARRLVISALGVRSKQSKTEREAELKKLQEARERKRLEAKQREDIWEGRDQSTV

SEQ ID NO: 43367 - protein, 1431 aa, Homo sapiens [sequence omitted]

SEQ ID NO: 43368 - protein, 729 aa, Homo sapiens [sequence omitted]

SEQ ID NO: 43369 - protein, 400 aa, Homo sapiens
MLCTTSQFKGVDILLTSPWPKCVGNFGNSSGEVDTKKCGSALVSSLATGLKPRYHFAALEKTYYERLPYRNHIILQENAQHATRFIALANVGNPEKKKYLYAFSIVPMKLMDAAELVKQPPDVTENPYRKSGQEASIGKQILAPVEESACQFFFDLNEKQGRKRSSTGRDSKSSPHPKQPRKPPQPPGPCWFCLASPEVEKHLVVNIGTHCYLALAKGGLSDDHVLILPIGHYQSVVELSAEVVEEVEKYKATLRRFFKSRGKWCVVFERNYKSHHLQLQVIPVPISCSTTDDIKDAFITQAQEQQIELLEIPEHSDIKQIAQPGAAYFYVELDTGEKLFHRIKKNFPLQFGREVLASEAILNVPDKSDWRQCQISKEDEETLARRFRKDFEPYDFTLDD

SEQ ID NO: 43370 - protein, 74 aa, Homo sapiens
MNKLTSLKYLEMKDIAINISRNLKDLNQKYAGLQPYLDQINVIEEQVAALEQAAYKLDAYSKKLEAKYKKLEKR

SEQ ID NO: 43371 - protein, 663 aa, Homo sapiens
MGRRGLPRNLAPGPPRRRYRKETLQALDMPVLPVTATEIRQYLRGHGIPFQDGHSCLRALSPFAESSQLKGQTGVTTSFSLFIDKTTGHFLCMTSLAEGSWEDFQASVEGRGDGAREGFLLSKAPEFEDSEEVRRIWNRAIPLWELPDQEEVQLADTMFGLTKVTDDTLKRFSVRYLRPARSLVFPWFSPGGSGLRGLKLLEAKCQGDGVSYEETTIPRPSAYHNLFGLPLISRRDAEVVLTSRELDSLALNQSTGLPTLTLPRGTTCLPPALLPYLEQFRRIVFWLGDDLRSWEAAKLFARKLNPKRCFLVRPGDQQPRPLEALNGGFNLSRILRTALPAWHKSIVSFRQLREEVLGELSNVEQAAGLRWSRFPDLNRILKGHRKGELTVFTGPTGSGKTTFISEYALDLCSQGVNTLWGSFEISNVRLARVMLTQFAEGRLEDQLDKYDHWADRFEDLPLYFMTFHGQQSIRTVIDTMQHAVYVYDICHVIIDNLQFMMGHEQLSTDRIAAQDYIIGVFRKFATDNNCHVTLVIHPRKEDDDKELQTASIFGSAKASQEADNVLILQDRKLVTGPGKRYLQVSKNRFDGDVGVFPLEFNKNSLTFSIPPKNKARLKKIKDDTGPVAKKPSSGKKGATTQNSEICSGQAPTPDQPDTSKRSK

SEQ ID NO: 43372 - protein, 105 aa, Homo sapiens
MASIEWRKDGLDIQLPGDDPHISVQFRGGPQRFEVTGWLQIQAVRPSDEGTYRCLGRNALGQVEAPASLTVLTPDQLNSTGIPQLRSLNLVPEEEAESEENDDYY

SEQ ID NO: 43373 - protein, 590 aa, Homo sapiens
MCSMPRSLWLGCSSLADSMPSLRCLYNPGTGALTAFQNSSEREDCNNGEPPRKIIPEKNSLRQTYNSCARLCLNQETVCLASTAMKTENCVAKTKLANGTSSMIVPKQRKLSASYEKEKELCVKYFEQWSESDQVEFVEHLISQMCHYQHGHINSYLKPMLQRDFITALPARGLDHIAENILSYLDAKSLCAAELVCKEWYRVTSDGMLWKKLIERMVRTDSLWRGLAERRGWGQYLFKNKPPDGNAPPNSFYRALYPKIIQDIETIESNWRCGRHSLQRIHCRSETSKGVYCLQYDDQKIVSGLRDNTIKIWDKNTLECKRILTGHTGSVLCLQYDERVIITGSSDSTVRVWDVNTGEMLNTLIHHCEAVLHLRFNNGMMVTCSKDRSIAVWDMASPTDITLRRVLVGHRAAVNVVDFDDKYIVSASGDRTIKVWNTSTCEFVRTLNGHKRGIACLQYRDRLVVSGSSDNTIRLWDIECGACLRVLEGHEELVRCIRFDNKRIVSGAYDGKIKVWDLVAALDPRAPAGTLCLRTLVEHSGRVFRLQFDEFQIVSSSHDDTILIWDFLNDPAAQAEPPRSPSRTYTYISR

SEQ ID NO: 43374 - protein, 245 aa, Homo sapiens
MRPFFEEYWATSFPIALIYLVLIAVGQNYMKERKGFNLQGPLILWSFCLAIFSILGAVRMWGIMGTVLLTGGLKQTVCFINFIDNSTVKFWSWVFLLSKVIELGDTAFIILRKRPLIFIHWYHHSTVLVYTSFGYKNKVPAGGWFVTMNFGVHAIMYTYYTLKAANVKPPKMLPMLITSLQILQMFVGAIVSILTYIWRQDQGCHTTMEHLFWSFILYMTYFILFAHFFCQTYIRPKVKAKTKSQ

SEQ ID NO: 43375 - protein, 693 aa, Homo sapiens
MEKSKSYYLCTSLSTPALGAGGSGSTGGAVGGKGGSGVAGLPPPPWAETTWIYHDGEDTKMIVGEEKKFLLPFWLQVIFISLLLCLSGMFSGLNLGLMALDPMELRIVQNCGTEKEKNYAKRIEPVRRQGNYLLCSLLLGNVLVNTTLTILLDDIAGSGLVAVVVSTIGIVIFGEIVPQAICSRHGLAVGANTIFLTKFFMMMTFPASYPVSKLLDCVLGQEIGTVYNREKLLEMLRVTDPYNDLVKEELNIIQGALELRTKTVEDVMTPLRDCFMITGEAILDFNTMSEIMESGYTRIPVFEGERSNIVDLLFVKDLAFVDPDDCTPLKTITKFYNHPLHFVFNDTKLDAMLEEFKKGKSHLAIVQRVNNEGEGDPFYEVLGIVTLEDVIEEIIKSEILDETDLYTDNRTKKKVAHRERKQDFSAFKQTDSEMKVKISPQLLLAMHRFLATEVEAFSPSQMSEKILLRLLKHPNVIQELKYDEKNKKAPEYYLYQRNKPVDYFVLILQGKVEVEAGKEGMKFEASAFSYYGVMALTASPVPLSLSRTFVVSRTELLAAGSPGENKSPPRPCGLNHSDSLSRSDRIDAVTPTLGSSNNQLNSSLLQVYIPDYSVRALSDLQFVKISRQQYQNALMASRMDKTPQSSDSENTKIELTLTELHDGLPDETANLLNEQNCVTHSKANHSLHNEGAI

SEQ ID NO: 43376 - protein, 1054 aa, Homo sapiens
MQLLDKFPIEGGQKDPKQRIIPFLPGKILFRRSHIRDVAVKRLKPIDEYCRALVRLPPHISQCDEVFRFFEARPEDVNPPKEDYGSSKRKSVWLSSWAESPKKDVTGADATAEPMILEQYVVVSNYKKQENSELSLQAGEVVDVIEKNESGWWFVSTSEEQGWVPATYLEAQNGTRDDSDINTSKTGEEEKYVTVQPYTSQSKDEIGFEKGVTVEVIRKNLEGWWYIRYLGKEGWAPASYLKKAKDDLPTRKKNLAGPVEIIGNIMEISNLLNKKASGDKETPPAEGEGHEAPIAKKEISLPILCNASNGSAVGVPDRTVSRLAQGSPAVARIAPQRAQISSPNLRTRPPPRRESSLGFQLPKPPEPPSVEVEYYTIAEFQSCISDGISFRGGQKAEVIDKNSGGWWYVQIGEKEGWAPASYIDKRKKPNLSRRTSTLTRPKVPPPAPPSKPKEAEEGPTGASESQDSPRKLKYEEPEYDIPAFGFDSEPELSEEPVEDRASGERRPAQPHRPSPASSLQRARFKVGESSEDVALEEETIYENEGFRPYAEDTLSARGSSGDSDSPGSSSLSLTRKNSPKSGSPKSSSLLKLKAEKNAQAEMGKNHSSASFSSSITINTTCCSSSSSSSSSLSKTSGDLKPRSASDAGIRGTPKVRAKKDADANAGLTSCPRAKPSVRPKPFLNRAESQSQEKMDISTLRRQLRPTGQLRGGLKGSKSEDSELPPQTASEAPSEGSRRSSSDLITLPATTPPCPTKKEWEGPATSYMTCSAYQKVQDSEISFPAGVEVQVLEKQESGWWYVRFGELEGWAPSHYLVLDENEQPDPSGKELDTVPAKGRQNEGKSDSLEKIERRVQALNTVNQSKKATPPIPSKPPGGFGKTSGTPAVKMRNGVRQVAVRPQSVFVSPPPKDNNLSCALRRNESLTATDGLRGVRRNSSFSTARSAAAEAKGRLAERAASQGSDSPLLPAQRNSIPVSPVRPKPIEKSQFIHNNLKDVYVSIADYEGDEETAGFQEGVSMEVLERNPNGWWYCQILDGVKPFKGWVPSNYLEKKN

SEQ ID NO: 43377 - protein, 234 aa, Homo sapiens [sequence omitted]

SEQ ID NO: 43378 - protein, 223 aa, Homo sapiens [sequence omitted]

SEQ ID NO: 43379 - protein, 283 aa, Homo sapiens
MLRDLNLGEMKSGVPVLAVSLALEGKASHREMTSKLLSDLCGTVMSTTDVEKSFDKLLKDLPELALDTPRAPQLVGQFIARAVGDGILCNTYIDSYKGTVDCVQARAALDKATVLLSMSKGGKRKDSVWGSGGGQQSVNHLVKEIDMLLKEYLLSGDISEAEHCLKELEVPHFHHELVYEAIIMVLESTGESTFKMILDLLKSLWKSSTITVDQMKRGYERIYNEIPDINLDVPHSYSVLERFVEECFQAGIISKQLRDLCPSRGRKRFVSEGDGGRLKPESY

SEQ ID NO: 43380 - protein, 407 aa, Homo sapiens
MLLTVFGNVLVIIAVFTSRALKAPQNLFLVSLASADILVATLVIPFSLANEVMGYWYFGKAWCEIYLALDVLFCTSSIVHLCAISLDRYWSITQAIEYNLKRTPRRIKAIIITVWVISAVISFPPLISIEKKGGGGGPQPAEPRCEINDQKWYVISSCIGSFFAPCLIMILVYVRIYQIAKRRTRVPPSRRGPDAVAAPPGGTERRPNGLGPERSAGPGGAEAEPLPTQLNGAPGEPAPAGPRDTDALDLEESSSSDHAERPPGPRRPERGPRGKGKARASQVKPGDSLPRRGPGATGIGTPAAGPGEERVGAAKASRWRGRQNREKRFTFVLAVVIGVFVVCWFPFFFTYTLTAVGCSVPRTLFKFFFWFGYCNSSLNPVIYTIFNHDFRRAFKKILCRGDRKRIV

SEQ ID NO: 43381 - protein, 705 aa, Homo sapiens
MFATNVTENVLNSSRVQEAIAEVAAELNPDGSAQQQSKAVNKVKKKAKRILQEMVATVSPAMIRLTGWVLLKLFNSFFWNIQIHKGQLEMVKAATETNLPLLFLPVHRSHIDYLLLTFILFCHNIKAPYIASGNNLNIPIFSTLIHKLGGFFIRRRLDETPDGRKDVLYRALLHGHIVELLRQQQFLEIFLEGTRSRSGKTSCARAGLLSVVVDTLSTNVIPDILIIPVGISYDRIIEGHYNGEQLGKPKKNESLWSVARGVIRMLRKNYGCVRVDFAQPFSLKEYLESQSQKPVSALLSLEQALLPAILPSRPSDAADEGRDTSINESRNATDESLRRRLIANLAEHILFTASKSCAIMSTHIVACLLLYRHRQGIDLSTLVEDFFVMKEEVLARDFDLGFSGNSEDVVMHAIQLLGNCVTITHTSRNDEFFITPSTTVPSVFELNFYSNGVLHVFIMEAIIACSLYAVLNKRGLGGPTSTPPNLISQEQLVRKAASLCYLLSNEGTISLPCQTFYQVCHETVGKFIQYGILTVAEHDDQEDISPSLAEQQWDKKLPEPLSWRSDEEDEDSDFGEEQRDCYLKVSQSKEHQQFITFLQRLLGPLLEAYSSAAIFVHNFSGPVPEPEYLQKLHKYLITRTERNVAVYAESATYCLVKNAVKMFKDIGVFKETKQKRVSVLELSSTFLPQCNRQKLLEYILSFVVL

SEQ ID NO: 43382 - protein, 181 aa, Homo sapiens
MVANVEKQLEEAKELLEQMDLEVREIPPQSRGMYSNRMRSYKQEMGKLETDFKRSRIAYSDEVRNELLGDDGNSSENQRAHLLDNTERLERSSRRLEAGYQIAVETEQIGQEMLENLSHDREKIQRARERLRETDANLGKSSRILTGMLRRIIQNRILLVILGIIVVITILMAITFSVRRH

SEQ ID NO: 43383 - protein, 167 aa, Homo sapiens
MVANVEKQLEEAKELLEQMDLEVREIPPQSRGMYSNRMRSYKQEMGKLETDFKRSRIAYSDEVRNELLGDDGNSSENQRAHLLDNTERLERSSRRLEAGYQIAVETEQIGQEMLENLSHDREKIQRARERLRETDANLGKSSRILTGMLRRGCSVKKQCNLSLAPKA

SEQ ID NO: 43384 - protein, 490 aa, Homo sapiens
MIPDLTSPYLPNGSLSPTARTYLQMKWPLLDVQAGSLQSRQALKDARSPSPAHIVSNKVPVVQHPHHVHPLTPLITYSNEHFTPGNPPPHLPADVDPKTGIPRPPHPPDISPYYPLSPGTVGQIPHPLGWLVPQQGQPVYPITTGGFRHPYPTALTVNASMSRFPPHMVPPHHTLHTTGIPHPAIVTPTVKQESSQSDVGSLHSSKHQDSKKEEEKKKPHIKKPLNAFMLYMKEMRAKVVAECTLKESAAINQILGRRWHALSREEQAKYYELARKERQLHMQLYPGWSARDNYGKKKKRKRDKQPGETNEHSECFLNPCLSLPPITDLSAPKKCRARFGLDQQNNWCGPCRRKKKCVRYIQGEGSCLSPPSSDGSLLDSPPPSPNLLGSPPRDAKSQTEQTQPLSLSLKPDPLAHLSMMPPPPALLLAEATHKASALCPNGALDLPPAALQPAAPSSSIAQPSTSSLHSHSSLAGTQPQPLSLVTKSLE

SEQ ID NO: 43385 - protein, 473 aa, Homo sapiens
MIPDLTSPYLPNGSLSPTARTYLQMKWPLLDVQAGSLQSRQALKDARSPSPAHIVSNKVPVVQHPHHVHPLTPLITYSNEHFTPGNPPPHLPADVDPKTGIPRPPHPPDISPYYPLSPGTVGQIPHPLGWLVPQQGQPVYPITTGGFRHPYPTALTVNASMSRFPPHMVPPHHTLHTTGIPHPAIVTPTVKQESSQSDVGSLHSSKHQDSKKEEEKKKPHIKKPLNAFMLYMKEMRAKVVAECTLKESAAINQILGRRWHALSREEQAKYYELARKERQLHMQLYPGWSARDNYGKKKKRKRDKQPGETNDLSAPKKCRARFGLDQQNNWCGPCRRKKKCVRYIQGEGSCLSPPSSDGSLLDSPPPSPNLLGSPPRDAKSQTEQTQPLSLSLKPDPLAHLSMMPPPPALLLAEATHKASALCPNGALDLPPAALQPAAPSSSIAQPSTSSLHSHSSLAGTQPQPLSLVTKSLE

SEQ ID NO: 43386 - protein, 376 aa, Homo sapiens
MIPDLTSPYLPNGSLSPTARTLHFQSGSTHYSAYKTIEHQIAVQYLQMKWPLLDVQAGSLQSRQALKDARSPSPAHIVSNKVPVVQHPHHVHPLTPLITYSNEHFTPGNPPPHLPADVDPKTGIPRPPHPPDISPYYPLSPGTVGQIPHPLGWLVPQQGQPVYPITTGGFRHPYPTALTVNASMSRFPPHMVPPHHTLHTTGIPHPAIVTPTVKQESSQSDVGSLHSSKHQDSKKEEEKKKPHIKKPLNAFMLYMKEMRAKVVAECTLKESAAINQILGRRWHALSREEQAKYYELARKERQLHMQLYPGWSARDNYGKKKKRKRDKQPGETNEHSECFLNPCLSLPPITGEKKSAFATYKVKAAASAHPLQMEAY

SEQ ID NO: 43387 - protein, 501 aa, Homo sapiens
MIPDLTSPYLPNGSLSPTARTLHFQSGSTHYSAYKTIEHQIAVQYLQMKWPLLDVQAGSLQSRQALKDARSPSPAHIVSNKVPVVQHPHHVHPLTPLITYSNEHFTPGNPPPHLPADVDPKTGIPRPPHPPDISPYYPLSPGTVGQIPHPLGWLVPQQGQPVYPITTGGFRHPYPTALTVNASMSSFLSSRFPPHMVPPHHTLHTTGIPHPAIVTPTVKQESSQSDVGSLHSSKHQDSKKEEEKKKPHIKKPLNAFMLYMKEMRAKVVAECTLKESAAINQILGRRWHALSREEQAKYYELARKERQLHMQLYPGWSARDNYGKKKKRKRDKQPGETNDANTPKKCRALFGLDRQTLWCKPCRRKKKCVRYIQGEGSCLSPPSSDGSLLDSPPPSPNLLGSPPRDAKSQTEQTQPLSLSLKPDPLAHLSMMPPPPALLLAEATHKASALCPNGALDLPPAALQPAAPSSSIAQPSTSSLHSHSSLAGTQPQPLSLVTKSLE

SEQ ID NO: 43388 - protein, 370 aa, Homo sapiens
MIPDLTSPYLPNGSLSPTARTYLQMKWPLLDVQAGSLQSRQALKDARSPSPAHIVSNKVPVVQHPHHVHPLTPLITYSNEHFTPGNPPPHLPADVDPKTGIPRPPHPPDISPYYPLSPGTVGQIPHPLGWLVPQQGQPVYPITTGGFRHPYPTALTVNASMSSFLSSRFPPHMVPPHHTLHTTGIPHPAIVTPTVKQESSQSDVGSLHSSKHQDSKKEEEKKKPHIKKPLNAFMLYMKEMRAKVVAECTLKESAAINQILGRRWHALSREEQAKYYELARKERQLHMQLYPGWSARDNYGKKKKRKRDKQPGETNEHSECFLNPCLSLPPITDLSAPKKCRARFGLDQQNNWCGPCRCKYSKEVSGTVRA

SEQ ID NO: 43389 - protein, 242 aa, Homo sapiens
MNFEKLGKCIIINNKNFDKVTGMGVRNGTDKDAEALFKCFRSLGFDVIVYNDCSCAKMQDLLKKASEEDHTNAACFACILLSHGEENVIYGKDGVTPIKDLTAHFRGDRCKTLLEKPKLFFIQACRGTELDDGIQADSGPINDTDANPRYKIPVEADFLFAYSTVPGYYSWRSPGRGSWFVQALCSILEEHGKDLEIMQILTRVNDRVARHFESQSDDPHFHEKKQIPCVVSMLTKELYFSQ

SEQ ID NO: 43390 - protein, 251 aa, Homo sapiens
MPSPEWTKRKKQTLKIGHGGTLDSAARGVLVVGIGSGTKMLTSMLSGSKRYTAIGELGKATDTLDSTGRVTEEKPYDKITQEDIEGILQKFTGNIMQVPPLYSALKKDGQRLSTLMKRGEVVEAKPARPVTVYSISLQKFQPPFFTLDVECGGGFYIRSLVSDIGKELSSCANVLELTRTKQGPFTLEEHALPEDKWTIDDIAQSLEHCSSLFPAELALKKSKPESNEQVLSCEYITLNEPKREDDVIKTC

SEQ ID NO: 43391 - protein, 674 aa, Homo sapiens [sequence omitted]

SEQ ID NO: 43392 - protein, 85 aa, Homo sapiens
MPQLKIPAPVNATSLLDCLLPDSIQARKRVASGYHELKTKPTWGKVQNQENGREMEPRTDAVVKHLNQTAPEDRPIPAFFIYMSQ

SEQ ID NO: 43393 - protein, 531 aa, Homo sapiens
MLSEQAQKWFPTHVQVTVLQAKDLKPKGKSGTNDTYTIIQLGKEKYSTSVAEKTLEPVWKEEASFELPGLLIQGSPEKYILFLIVMHRSLVGLDKFLGQVAINLNDIFEDKQRRKTEWFRLESKQGKRIKNRGEIKVNIQFMRNNMTASMFDLSMKDKTRSPFAKLKDKMKGRKNDGTFSDTSSAIIPSTHMPDANSEFSSGEIQMKSKPKKPFLLGPQRLSSAHSMSDLSGSHMSSEKLKAGTIGQTHLLGHQLDSFGTVPESGSLKSPHRRTLSFDTSKMNQPDSIVDEGELCFGRQNDPFTNVTASLPQKFATLPRKKNPFEESSETWDSSMNLFSKPIEIRKENKREKREKVSLFERVTGKKDSRRSDKLNNGGSDSPCDLKSPNAFSENRQDYFDYESTNPFTAKFRASNIMPSSRNTLLTPAVAEWRGSLRWAELFHMSPTSNEDLRKIPDSNPFDATAGYRSLTYEEVLQELVKHKELLRRKDTHIRELEDYIDNLLVRVMEETPSILRVPYEPSRKAGKFSNS

SEQ ID NO: 43394 - protein, 280 aa, Homo sapiens
MLKSCDAAAAVAKAAPAPTASSTININTSTSKFLMNVITIEDYKSTYWPKLDGAIDQLLTQSPGDYIPISYEQIYSCVYKCVCQQHSEQMYSDLIKKITNHLERVSKELQASPPDLYIERFNIALGQYMGALQSIVPLFIYMNKFYIETKLNRDLKDDLIKLFTEHVAEKHIYSLMPLLLEAQSTPFQVTPSTMANIVKGLYTLRPEWVQMAPTLFSKFIPNILPPAVESELSEYAAQDQKFQRELIQNGFTRGDQSRKRAGDELAYNSSSACASSRGYR

SEQ ID NO: 43395 - protein, 96 aa, Homo sapiens [sequence omitted]

SEQ ID NO: 43396 - protein, 651 aa, Homo sapiens
MEPQDLELELCKKHHFGINKPEKIIPSPDDSKFLLKTFTHIKSNVSAPNKKKVKESKEKEKLERRLLEELLKMFMDSESFYYSLTYDLTNSVQRQSTGERDGRPLWQKVDDRFFWNKYMIQDLTEIGTPDVDFWIIPMIQGFVQIEELVVNYTESSDDEKSSPETPPQESTCVDDIHPRFLVALISRRSRHRAGMRYKRRGVDKNGNVANYVETEQLIHVHNHTLSFVQTRGSVPVFWSQVGYRYNPRPRLDRSEKETVAYFCAHFEEQLNIYKKQVIINLVDQAGREKIIGDAYLKQVLLFNNSHLTYVSFDFHEHCRGMKFENVQTLTDAIYDIILDMKWCWVDEAGVICKQEGIFRVNCMDCLDRTNVVQAAIARVVMEQQLKKLGVMPPEQPLPVKCNRIYQIMWANNGDSISRQYAGTAALKGDFTRTGERKLAGVMKDGVNSANRYYLNRFKDAYRQAVIDLMQGIPVTEDLYSIFTKEKEHEALHKENQRSHQELISQLLQSYMKLLLPDDEKFHGGWALIDCDPSLIDATHRDVDVLLLLSNSAYYVAYYDDEVDKVNQYQRLSLENLEKIEIGPEPTLFGKPKFSCMRLHYRYKEASGYFHTLRAVMRNPEEDGKGRAVNLTKTSLVSGLKTKVLWPRERIF

SEQ ID NO: 43397 - protein, 568 aa, Homo sapiens
MFDPEFYMGVYETVNQNTKAHVLHFGKYRDVAECGPQQELDLNSPRNTTLERQTFYCVPVPGESTWVKEAYVNANQARVSPSTSYTPSRHKRSYEDDDDMDLQPNKQKDQHAGARQAGSVGGLQWCGEPKRLETEASTGQQLNSLNLSSPFDLNFPLPGEKGPACLVKVYEDWDCFKVNDILELYGILSVDPVLSILNNDERDASALLDPMECTDTAEEQRVHSPPASLVPRIHVILAQKLQHINPLLPACLNKEESKTCKFVSSFMSELSPVRAELLGFLTHALLGDSLAAEYLILHLISTVYTRRDVLPLGKFTVNLSGCPRNSTFTEHLYRIIQHLVPASFRLQMTIENMNHLKFIPHKDYTANRLVSGLLQLPSNTSLVIDETLLEQGQLDTPGVHNVTALSNLITWQKVDYDFSYHQMEFPCNINVFITSEGRSLLPADCQIHLQPQLIPPNMEEYMNSLLSAVLPSVLNKFRIYLTLLRFLEYSISDEITKAVEDDFVEMRKNDPQSITADDLHQLLVVARCLSLSAGQTTLSRERWLRAKQLESLRRTRLQQQKCVNGNEL

SEQ ID NO: 43398 - protein, 566 aa, Homo sapiens [sequence omitted]

SEQ ID NO: 43399 - protein, 851 aa, Homo sapiens
MGINSYLPSQPSSLPPSYFGNQPQGIPQPGYNPYRHTPGSSRANPYIAPPQLQQCQTPGPPAHPPPSGPPVQMYQMPPGSLPPVPSSVQSPAQQQVPARPGAPSVQVPSPFLLQNQYEPVQPHWFYCKEVEYKQLWMPFSVFDSLNLEEIYNSVQPDPESVVLGTDGGRYDVYLYDRIRKAAYWEEEPAEVRRCTWFYKGDTDSRFIPYTEEFSEKLEAEYKKAVTTNQWHRRLEFPSGETIVMHNPKVIVQFQPSSVPDEWGTTQDGQTRPRVVKRGIDDNLDEIPDGEMPQVDHLVFVVHGIGPVCDLRFRSIIECVDDFRVVSLKLLRTHFKKSLDDGKVSRVEFLPVHWHSSLGGDATGVDRNIKKITLPSIGRFRHFTNETLLDILFYNSPTYCQTIVEKVGMEINHLHALFMSRNPDFKGGVSVAGHSLGSLILFDILSNQKDLNLSKCPGPLAVANGVVKQLHFQEKQMPEEPKLTLDESYDLVVENKEVLTLQETLEALSLSEYFSTFEKEKIDMESLLMCTVDDLKEMGIPLGPRKKIANFVEHKAAKLKKAASEKKAVAATSTKGQEQSAQKTKDMASLPSESNEPKRKLPVGACVSSVCVNYESFEVGAGQVSVAYNSLDFEPEIFFALGSPIAMFLTIRGVDRIDENYSLPTCKGFFNIYHPLDPVAYRLEPMIVPDLDLKAVLIPHHKGRKRLHLELKESLSRMGSDLKQGFISSLKSAWQTLNEFARAHTSSTQLQEELEKVANQIKEEEEKQVVEAEKVVESPDFSKDEDYLGKVGMLNGGRRIDYVLQEKPIESFNEYLFALQSHLCYWESEDTALLLLKEIYRTMNISPEQPQH

SEQ ID NO: 43400 - protein, 41 aa, Homo sapiens
MAKKWKICVQTCHESNMLSSVHNKMSPWIPQWMMLLRVTLH

SEQ ID NO: 43401 - protein, 248 aa, Homo sapiens
MRKYFLQANDQQDLVEWVNVLNKAIKITVPKQSDSQPNSDNLSRHGECGKKQVSYRTDIVGGVPIITPTQKEEVNECGESIDRNNLKRSQSHLPYFTPKPPQDSAVIKAGYCVKQGAVMKNWKRRYFQLDENTIGYFKSELEKEPLRVIPLKEVHKVQECKQSDIMMRDNLFEIVTTSRTFYVQADSPEEMHSWIKAVSGAIVAQRGPGRSASSMRQARRLSNPCIQRYTSRAGECSTYVGSHANVPS

SEQ ID NO: 43402 - protein, 297 aa, Homo sapiens
MRKYFLQANDQQDLVEWVNVLNKAIKITVPKQSDSQPNSDNLSRHGECGKKQVSYRTDIVGGVPIITPTQKEEVNECGESIDRNNLKRSQSHLPYFTPKPPQDSAVIKAGYCVKQGAVMKNWKRRYFQLDENTIGYFKSELEKEPLRVIPLKEVHKVQECKQSDIMMRDNLFEIVTTSRTFYVQADSPEEMHSWIKAVSGAIVAQRGPGRSASSMRQARRLSNPCIQRSIPPVLQNPNTLSVLPTQPPPPHIPQPLAATLWSQPLPWRSEDFTSLLPRSSQGTSRSRLSLQENQLPK

SEQ ID NO: 43403 - protein, 647 aa, Homo sapiens
MRTKSSEKAANDDHSVRVAREDVRESCPPLGLETLKITDFQLHASTVKRYGLGAHRGRLNIQAGINENDFYDGAWCAGRNDLQQWIEVDARRLTRFTGVITQGRNSLWLSDWVTSYKVMVSNDSHTWVTVKNGSGDMIFEGNSEKEIPVLNELPVPMVARYIRINPQSWFDNGSICMRMEILGCPLPDPNNYYHRRNEMTTTDDLDFKHHNYKEMRQLMKVVNEMCPNITRIYNIGKSHQGLKLYAVEISDHPGEHEVGEPEFHYIAGAHGNEVLGRELLLLLVQFVCQEYLARNARIVHLVEETRIHVLPSLNPDGYEKAYEGGSELGGWSLGRWTHDGIDINNNFPDLNTLLWEAEDRQNVPRKVPNHYIAIPEWFLSENATVAAETRAVIAWMEKIPFVLGGNLQGGELVVAYPYDLVRSPWKTQEHTPTPDDHVFRWLAYSYASTHRLMTDARRRVCHTEDFQKEEGTVNGASWHTVAGSLNDFSYLHTNCFELSIYVGCDKYPHESQLPEEWENNRESLIVFMEQVHRGIKGLVRDSHGKGIPNAIISVEGINHDIRTANDGDYWRLLNPGEYVVTAKAEGFTASTKNCMVGYDMGATRCDFTLSKTNMARIREIMEKFGKQPVSLPARRLKLRGQKRRQRG

SEQ ID NO: 43404 - protein, 213 aa, Homo sapiens [sequence omitted]

SEQ ID NO: 43405 - protein, 683 aa, Homo sapiens
MCRAQRPSGTIITEDPFKSGSSDVGRDWDPSSTEGGSSPLICPDSSARPRVKSSYSMENANKWSCHMCTYLNWPRAIRCTQCLSQRRTRSPTESPQSSGSGSRPVAFSVDPCEEYNDRNKLNTRTQHWTCSVCTYENWAKAKRCVVCDHPRPNNIEAIELAETEEASSIINEQDRARWRGSCSSGNSQRRSPPATKRDSEVKMDFQRIELAGAVGSKEELEVDFKKLKQIKNRMKKTDWLFLNACVGVVEGDLAAIEAYKSSGGDIARQLTADEVRLLNRPSAFDVGYTLVHLAIRFQRQDMLAILLTEVSQQAAKCIPAMVCPELTEQIRREIAASLHQRKGDFACYFLTDLVTFTLPADIEDLPPTVQEKLFDEVLDRDVQKELEEESPIINWSLELATRLDSRLYALWNRTAGDCLLDSVLQATWGIYDKDSVLRKALHDSLHDCSHWFYTRWKDWESWYSQSFGLHFSLREEQWQEDWAFILSLASQPGASLEQTHIFVLAHILRRPIIVYGVKYYKSFRGETLGYTRFQGVYLPLLWEQSFCWKSPIALGYTRGHFSALVAMENDGYGNRGAGANLNTDDDVTITFLPLVDSERKLLHVHFLSAQELGNEEQQEKLLREWLDCCVTEGGVLVAMQKSSRRRNHPLVTQMVEKWLDRYRQIRPCTSLSDGEEDEDDEDE

SEQ ID NO: 43406 - protein, 420 aa, Homo sapiens
MNGPLHPRPLVALLDGRDCTVEMPILKDLATVAFCDAQSTQEIHEKVLNEAVGAMMYHTITLTREDLEKFKALRVIVRIGSGYDNVDIKAAGELGIAVCNIPSAAVEETADSTICHILNLYRRNTWLYQALREGTRVQSVEQIREVASGAARIRGETLGLIGFGRTGQAVAVRAKAFGFSVIFYDPYLQDGIERSLGVQRVYTLQDLLYQSDCVSLHCNLNEHNHHLINDFTIKQMRQGAFLVNAARGGLVDEKALAQALKEGRIRGAALDVHESEPFSFAQGPLKDAPNLICTPHTAWYSEQASLEMREAAATEIRRAITGRIPESLRNCVNKEFFVTSAPWSVIDQQAIHPELNGATYRYPPGIVGVAPGGLPAAMEGIIPGGIPVTHNLPTVAHPSQAPSPNQPTKHGDNREHPNEQ

SEQ ID NO: 43407 - protein, 172 aa, Homo sapiens [sequence omitted]

SEQ ID NO: 43408 - protein, 332 aa, Homo sapiens
MEGGRPPPQSVGPAGAAAQAQALAGPSLLCSTRVGGLKKMQSSLKLVDCIIEVHDARIPLSGRNPLFQETLGLKPHLLVLNKMDLADLTEQQKIMQHLEGEGLKNVIFTNCVKDENVKQIIPMVTELIGRSHRYHRKENLEYCIMVIGVPNVGKSSLINSLRRQHLRKGKATRVGGEPGITRAVMSKIQVSERPLMFLLDTPGVLAPRIESVETGLKLALCGTVLDHLVGEETMADYLLYTLNKHQRFGYVQHYGLGSACDNVERVLKSVAVKLGKTQKVKVLTGTGNVNIIQPNYPAAARDFLQTFRRGLLGSVMLDLDVLRGHPPAETLP

SEQ ID NO: 43409 - protein, 1440 aa, Homo sapiens
MECLDPPLQEVPVDEWFCPECAAPGVVLAADAGPVSEEEVSLLLADVVPTTSRLRPRAGRTRAIARTRQSERVRATVNRNRISTARRVQHTPGRLGSSLLDEAIEAVATGLSTAVYQRPLTPRTPARRKRKTRRRKKVPGRKKTPSGPSAKSKSSATRSKKRQHRVKKRRGKKVKSEATTRSRIARTLGLRRPVHSSCIPSVLKPVEPSLGLLRADIGAASLSLFGDPYELDPFDSSEELSANPLSPLSAKRRALSRSALQSHQPVARPVSVGLSRRRLPAAVPEPDLEEEPVPDLLGSILSGQSLLMLGSSDVIIHRDGSLSAKRAAPVSFQRNSGSLSRGEEGFKGCLQPRALPSGSPAQGPSGNRPQSTGLSCQGRSRTPARTAGAPVRLDLPAAPGAVQARNLSNGSVPGFRQSHSPWFNGTNKHTLPLASAASKISSRDSKPPCRSVVPGPPLKPAPRRTDISELPRIPKIRRDDGGGRRDAAPAHGQSIEIPSACISRLTGREGTGQPGRGTRAESEASSRVPREPGVHTGSSRPPAPSSHGSLAPLGPSRGKGVGSTFESFRINIPGNMAHSSQLSSPGFCNTFRPVDDKEQRKENPSPLFSIKKTKQLRSEVYDPSDPTGSDSSAPGSSPERSGPGLLPSEITRTISINSPKAQTVQAVRCVTSYTVESIFGTEPEPPLGPSSAMSKLRGAVAAEGASDTEREEPTESQGLAARLRRPSPPEPWDEEDGASCSTFFGSEERTVTCVTVVEPEAPPSPDVLQAATHRVVELRPPSRSRSTSSSRSRKKAKRKRVSREHGRTRSGTRSESRDRSSRSASPSVGEERPRRQRSKAKSRRSSSDRSSSRERAKRKKAKDKSREHRRGPWGHSRRTSRSRSGSPGSSSYEHYESRKKKKRRSASRPRGRECSPTSSLERLCRHKHQRERSHERPDRKESVAWPRDRRKRRSRSPSSEHRAREHRRPRSREKWPQTRSHSPERKGAVREASPAPLAQGEPGREDLPTRLPALGEAHVSPEVATADKAPLQAPPVLEVAAECEPDDLDLDYGDSVEAGHVFDDFSSDAVFIQLDDMSSPPSPESTDSSPERDFPLKPALPPASLAVAAIQREVSLMHDEDPSQPPPLPEGTQEPHLLRPDAAEKAEAPSSPDVAPAGKEDSPSASGRVQEAARPEEVVSQTPLLRSRALVKRVTWNLQESESSAPAEDRAPRAPLHRPQKPREGAWDMEDVAPTGVRQVFSELPFPSHVLPEPGFPDTDPSQVYSPGLPPAPAQPSSIPPCALVSQPTVQFILQGSLPLVGCGAAQTLAPVPAALTPASEPASQATAASNSEEKTPAPRLAAEKTKKEEYMKKLHMQERAVEEVKLAIKPFYQKREVTKEEYKDILRKAVQKICHSKSGEINPVKVANLVKAYVDKYRHMRRHKKPEAGEEPPTQGAEG

SEQ ID NO: 43410 - protein, 1439 aa, Homo sapiens
MECLDPPLQEVPVDEWFCPECAAPGVVLAADAGPVSEEEVSLLLADVVPTTSRLRPRAGRTRAIARTRQSERVRATVNRNRISTARRVQHTPGRLGSSLLDEAIEAVATGLSTAVYQRPLTPRTPARRKRKTRRRKKVPGRKKTPSGPSAKSKSSATRSKKRQHRVKKRRGKKVKSEATTRSRIARTLGLRRPVHSSCIPSVLKPVEPSLGLLRADIGAASLSLFGDPYELDPFDSEELSANPLSPLSAKRRALSRSALQSHQPVARPVSVGLSRRRLPAAVPEPDLEEEPVPDLLGSILSGQSLLMLGSSDVIIHRDGSLSAKRAAPVSFQRNSGSLSRGEEGFKGCLQPRALPSGSPAQGPSGNRPQSTGLSCQGRSRTPARTAGAPVRLDLPAAPGAVQARNLSNGSVPGFRQSHSPWFNGTNKHTLPLASAASKISSRDSKPPCRSVVPGPPLKPAPRRTDISELPRIPKIRRDDGGGRRDAAPAHGQSIEIPSACISRLTGREGTGQPGRGTRAESEASSRVPREPGVHTGSSRPPAPSSHGSLAPLGPSRGKGVGSTFESFRINIPGNMAHSSQLSSPGFCNTFRPVDDKEQRKENPSPLFSIKKTKQLRSEVYDPSDPTGSDSSAPGSSPERSGPGLLPSEITRTISINSPKAQTVQAVRCVTSYTVESIFGTEPEPPLGPSSAMSKLRGAVAAEGASDTEREEPTESQGLAARLRRPSPPEPWDEEDGASCSTFFGSEERTVTCVTVVEPEAPPSPDVLQAATHRVVELRPPSRSRSTSSSRSRKKAKRKRVSREHGRTRSGTRSESRDRSSRSASPSVGEERPRRQRSKAKSRRSSSDRSSSRERAKRKKAKDKSREHRRGPWGHSRRTSRSRSGSPGSSSYEHYESRKKKKRRSASRPRGRECSPTSSLERLCRHKHQRERSHERPDRKESVAWPRDRRKRRSRSPSSEHRAREHRRPRSREKWPQTRSHSPERKGAVREASPAPLAQGEPGREDLPTRLPALGEAHVSPEVATADKAPLQAPPVLEVAAECEPDDLDLDYGDSVEAGHVFDDFSSDAVFIQLDDMSSPPSPESTDSSPERDFPLKPALPPASLAVAAIQREVSLMHDEDPSQPPPLPEGTQEPHLLRPDAAEKAEAPSSPDVAPAGKEDSPSASGRVQEAARPEEVVSQTPLLRSRALVKRVTWNLQESESSAPAEDRAPRAPLHRPQKPREGAWDMEDVAPTGVRQVFSELPFPSHVLPEPGFPDTDPSQVYSPGLPPAPAQPSSIPPCALVSQPTVQFILQGSLPLVGCGAAQTLAPVPAALTPASEPASQATAASNSEEKTPAPRLAAEKTKKEEYMKKLHMQERAVEEVKLAIKPFYQKREVTKEEYKDILRKAVQKICHSKSGEINPVKVANLVKAYVDKYRHMRRHKKPEAGEEPPTQGAEG

SEQ ID NO: 43411 - protein, 488 aa, Homo sapiens
MGAEALPGPDEAAAAAAFAEVTTVTVANVGAAADNVFTTSVANAASISGHVLSGRTALQIGDSLNTEKATLIVVHTDGSIVETTGLKGPAAPLTPGPQSPPTPLAPGQEKGGTKYNWDPSVYDSELPVRCRNISGTLYKNRLGSGGRGRCIKQGENWYSPTEFEAMAGRASSKDWKRSIRYAGRPLQCLIQDGILNPHAASCTCAACCDDMTLSGPVRLFVPYKRRKKENELPTTPVKKDSPKNITLLPATAATTFTVTPSGQITTSGALTFDRASTVEATAVISESPAQGDVFAGATVQEASVQPPCRASHPEPHYPGYQDSCQIAPFPEAALPTSHPKIVLTSLPALAVPPPTPTKAAPPALVNGLELSEPRSWLYLEEMVNSLLNTAQQLKTLFEQAKHASTYREAATNQAKIHADAERKEQSCVNCGREAMSECTGCHKVNYCSTFCQRKDWKDHQHICGQSAAVTVQADEVHVAESVMEKVTV

SEQ ID NO: 43412 - protein, 143 aa, Homo sapiens
MAAPRRGRGSSTVLSSVPLQMLFYLSGTYYALYFLATLLMITYKSQVFSYPHRYLVLDLALLFLMGILEAVRLYLGTRGNLTEAERPLAASLALTAGTALLSAHFLLWQALVLWADWALSATLLALHGLEAVLQVVAIAAFTR

SEQ ID NO: 43413 - protein, 689 aa, Homo sapiens [sequence omitted]

SEQ ID NO: 43414 - protein, 110 aa, Homo sapiens
MARACLQAVKYLMFAFNLLFWFFLLLLLVFLLEATIAILFFAYTDKVRLPWPQAQLQGWGLHPHSQGALWARCGQSGPACALTGSQDSGCGFTRPGGAAPATLGGCAVAL

SEQ ID NO: 43415 - protein, 74 aa, Homo sapiens [sequence omitted]

SEQ ID NO: 43416 - protein, 530 aa, Homo sapiens
MGFHHATQACLELLGSSDLPASASQSAGITGVNHRAQPGLNVSVDKFTAMSSHFTQDLLPEQGIQDAFPKRILRGYGNCGLDNLYLRKDWESLDECKLQKDYNGLNQCSSTTHSKIFQYNKYVKIFDNFSNLHRRNISNTGEKPFKCQECGKSFQMLSFLTEHQKIHTGKKFQKCGECGKTFIQCSHFTEPENIDTGEKPYKCQECNNVIKTCSVLTKNRIYAGGEHYRCEEFGKVFNQCSHLTEHEHGTEEKPCKYEECSSVFISCSSLSNQQMILAGEKLSKCETWYKGFNHSPNPSKHQRNEIGGKPFKCEECDSIFKWFSDLTKHKRIHTGEKPYKCDECGKAYTQSSHLSEHRRIHTGEKPYQCEECGKVFRTCSSLSNHKRTHSEEKPYTCEECGNIFKQLSDLTKHKKTHTGEKPYKCDECGKNFTQSSNLIVHKRIHTGEKPYKCEECGRVFMWFSDITKHKKTHTGEKPYKCDECGKNFTQSSNLIVHKRIHTGEKPYKCEKCGKAFTQFSHLTVHESIHT

SEQ ID NO: 43417 - protein, 553 aa, Homo sapiens
MGFHHATQACLELLGSSDLPASASQSAGITGVNHRAQPGLNVSVDKFTALCSPGVLQTVKWFLEFRCIFSLAMSSHFTQDLLPEQGIQDAFPKRILRGYGNCGLDNLYLRKDWESLDECKLQKDYNGLNQCSSTTHSKIFQYNKYVKIFDNFSNLHRRNISNTGEKPFKCQECGKSFQMLSFLTEHQKIHTGKKFQKCGECGKTFIQCSHFTEPENIDTGEKPYKCQECNNVIKTCSVLTKNRIYAGGEHYRCEEFGKVFNQCSHLTEHEHGTEEKPCKYEECSSVFISCSSLSNQQMILAGEKLSKCETWYKGFNHSPNPSKHQRNEIGGKPFKCEECDSIFKWFSDLTKHKRIHTGEKPYKCDECGKAYTQSSHLSEHRRIHTGEKPYQCEECGKVFRTCSSLSNHKRTHSEEKPYTCEECGNIFKQLSDLTKHKKTHTGEKPYKCDECGKNFTQSSNLIVHKRIHTGEKPYKCEECGRVFMWFSDITKHKKTHTGEKPYKCDECGKNFTQSSNLIVHKRIHTGEKPYKCEKCGKAFTQFSHLTVHESIHT

SEQ ID NO: 43418 - protein, 762 aa, Homo sapiens
MDFVDPAQITMKVIQGLYSGVTTVELDTLAAETAATLTTKHPDYAILAARIAVSNLHKETKKVFSDVMEDLYNYINPHNGKHSPMVAKSTLDIVLANKDRLNSAIIYDRDFSYNYFGFKTLERSYLLKINGKVAERPQHMLMRVSVGIHKEDIDAAIETYNLLSERWFTHASPTLFNAGTNRPQLSSCFLLSMKDDSIEGIYDTLKQCALISKSAGGIGVAVSCIRATGSYIAGTNGNSNGLVPMLRVYNNTARYVDQGGNKRPGAFAIYLEPWHLDIFEFLDLKKNTGKEEQRARDLFFALWIPDLFMKRVETNQDWSLMCPNECPGLDEVWGEEFEKLYASYEKQGRVRKVVKAQQLWYAIIESQTETGTPYMLYKDSCNRKSNQQNLGTIKCSNLCTEIVEYTSKDEVAVCNLASLALNMYVTSEHTYDFKKLAEVTKVVVRNLNKIIDINYYPVPEACLSNKRHRPIGIGVQGLADAFILMRYPFESAEAQLLNKQIFETIYYGALEASCDLAKEQGPYETYEGSPVSKGILQYDMWNVTPTDLWDWKVLKEKIAKYGIRNSLLIAPMPTASTAQILGNNESIEPYTSNIYTRRVLSGEFQIVNPHLLKDLTERGLWHEEMKNQIIACNGSIQSIPEIPDDLKQLYKTVWEISQKTVLKMAAERGAFIDQSQSLNIHIAEPNYGKLTSMHFYGWKQGLKTGMYYLRTRPAANPIQFTLNKEKLKDKEKVSKEEEEKERNTAAMVCSLENRDECLMCGS

SEQ ID NO: 43419 - protein, 639 aa, Homo sapiens
MEPERCRIQTEFNQLRNILDRVEQRELKKLEQEEKKGLRIIEEAENDLVHQTQSLRELISDLERRCQGSTMELLQDVSDVTERSEFWTLRKPEALPTKLRSMFRAPDLKRMLRVCRELTDVQSYWAIQGSLTRRERRASGVRTRRSQGSSAMASKILLNVQEEVTCPICLELLTEPLSLDCGHSLCRACITVSNKEAVTSMGGKSSCPVCGISYSFEHLQANQHLANIVERLKEVKLSPDNGKKRDLCDHHGEKLLLFCKEDRKVICWLCERSQEHRGHHTVLTEEVFKECQEKLQAVLKRLKKEEEEAEKLEADIREEKTSWKYQVQTERQRIQTEFDQLRSILNNEEQRELQRLEEEEKKTLDKFAEAEDELVQQKQLVRELISDVECRSQWSTMELLQDMSGIMKWSEIWRLKKPKMVSKKLKTVFHAPDLSRMLQMFRELTAVRCYWVDVTLNSVNLNLNLVLSEDQRQVISVPIWPFQCYNYGVLGSQYFSSGKHYWEVDVSKKTAWILGVYCRTYSRHMKYVVRRCANRQNLYTKYRPLFGYWVIGLQNKCKYGVFEESLSSDPEVLTLSMAVPPCRVGVFLDYEAGIVSFFNVTSHGSLIYKFSKCCFSQPVYPYFNPWNCPAPMTLCPPSS

SEQ ID NO: 43420 - protein, 969 aa, Homo sapiens
MNWLSRLASRGPGHRIPQGANLQTPVMADPETCLMVFKNHWSQVVRILERQGPRAAPGGADDLSAVRNHTYQMLTLLAEDRAVPSAPTGPGPLLEFALHEDLLTRVLTWQLQWDELGDGVEERRAEQLKLFEMLVSEARQPLLRHGPVREALLTLLDACGRPVPSSPALDEGLVLLLSQLCVCVAQEPSLLEFFLQPPPEPGAAPRLLLFSRLVPFVHREGTLGQQARDALLLLMALSAGSPTVGRYIADHSYFCPVLATGLSALYSSLPRKIEVPGDDWHCLRREDWLGVPALALFMSSLEFCNAVIQVAHPLVQKQLVDYIHNGFLVPVMGPALHKTSVEEMIASTAYLELFLRSISEPALLRTFLRFLLLHRHDTHTILDTLVARIGSNSRLCMVSLSLFRTLLNLSCEDVLLQLVLRYLVPCNHVMLSQKPAVRDVDLYGRAADKFLSLIPRCCRHHAPSPPRPEHASWARGPGSPSVDSSSVTTVPRPSTPSRLALFLRQQSLGGSESPGPAPCSPGLSASPASSPGRRPTPAEEPGELEDNYLEYLREARRGVDRCVRACRTWSAPYDGERPSPEPSPFGSRTKKRSLLPEEDRNNVGEGEEEELGRRGRAGGAGEGPGHLPPPQLNGVPGSWPEGAKKVRLVPKEGAGELLEGISEGMAGLEGFGQELRELEVALSNGGTGSESPLEPPLPLEEEEAYESFTCPPEPPGPFLSSPLRTLNQLPSQPFTGPFMAVLFAKLENMLQNSVYVNFLLTGLVAQLACHPQPLLRSFLLNTNMVFQPSVKSLLQVLGSVKNKIENFAASQEDFPALLSKAKKYLIARGKLDWAEGPAAGPAPRRSDPLVKSRRPSLGELLLRHAHSPTRARQAAQLVLQPGRDGAGLGLSGGSPGASTPVLLTRGGAPERQGEALRVKNAVYCAVIFPEFLKELAAISQAHAVTSPFLLETSEEGSGPLISGCGPLNP

SEQ ID NO: 43421 - protein, 730 aa, Homo sapiens [sequence omitted]

SEQ ID NO: 43422 - protein, 401 aa, Homo sapiens
MLIMRGARINVMNRGDDTPLHLAASHGHRDIVQKLLQYKADINAVNEHGNVPLHYACFWGQDQVAEDLVANGALVSICNKYGEMPVDKAKAPLRELLRERAEKMGQNLNRIPYKDTFWKGTTRTRPRNGTLNKHSGIDFKQLNFLTKLNENHSGELWKGRWQGNDIVVKVLKVRDWSTRKSRDFNEECPRLRIFSHPNVLPVLGACQSPPAPHPTLITHWMPYGSLYNVLHEGTNFVVDQSQAVKFALDMARGMAFLHTLEPLIPRHALNSRSVMIDEDMTARISMADVKFSFQCPGRMYAPAWVAPEALQKKPEDTNRRSADMWSFAVLLWELVTREVPFADLSNMEIGMKVALEGLRPTIPPGISPHVCKLMKICMNEDPAKRPKFDMIVPILEKMQDK

SEQ ID NO: 43423 - protein, 2937 aa, Homo sapiens
MTVIFLSADGSPQVSEAAPPGQLVARISVSDPDDGDFAHVNVSLEGGEGHFALSTQDSVIYLVCVARRLDREERDAYNLRVTATDSGSPPLRAEAAFVLHVTDVNDNAPAFDRQLYRPEPLPEVALPGSFVVRVTARDPDQGTNGQVTYSLAPGAHTHWFSIDPTSGIITTAASLDYELEPQPQLIVVATDGGLPPLASSATVSVALQDVNDNEPQFQRTFYNASLPEGTQPGTCFLQVTATDADSGPFGLLSYSLGAGLGSSGSPPFRIDAHSGDVCTTRTLDRDQGPSSFDFTVTAVDGGGLKSMVYVKVFLSDENDNPPQFYPREYAASISAQSPPGTAVLRLRAHDPDQGSHGRLSYHILAGNSPPLFTLDEQSGLLTVAWPLARRANSVVQLEIGAEDGGGLQAEPSARVDISIVPGTPTPPIFEQLQYVFSVPEDVAPGTSVGIVQAHNPPGRLAPVTLSLSGGDPRGLFSLDAVSGLLQTLRPLDRELLGPVLELEVRAGSGVPPAFAVARVRVLLDDVNDNSPAFPAPEDTVLLPPNTAPGTPIYTLRALDPDSGVNSRVTFTLLAGGGGAFTVDPTTGHVRLMRPLGPSGGPAHELELEARDGGSPPRTSHFRLRVVVQDVGTRGLAPRFNSPTYRVDLPSGTTAGTQVLQVQAQAPDGGPITYHLAAEGASSPFGLEPQSGWLWVRAALDREAQELYILKVMAVSGSKAELGQQTGTATVRVSILNQNEHSPRLSEDPTFLAVAENQPPGTSVGRVFATDRDSGPNGRLTYSLQQLSEDSKAFRIHPQTGEVTTLQTLDREQQSSYQLLVQVQDGGSPPRSTTGTVHVAVLDLNDNSPTFLQASGAAGGGLPIQVPDRVPPGTLVTTLQAKDPDEGENGTILYTLTGPGSELFSLHPHSGELLTAAPLIRAERPHYVLTLSAHDQGSPPRSASLQLLVQVLPSARLAEPPPDLAERDPAAPVPVVLTVTAAEGLRPGSLLGSVAAPEPAGVGALTYTLVGGADPEGTFALDAASGRLYLARPLDFEAGPPWRALTVRAEGPGGAGARLLRVQVQVQDENEHAPAFARDPLALALPENPEPGAALYTFRASDADGPGPNSDVRYRLLRQEPPVPALRLDARTGALSAPRGLDRETTPALLLLVEATDRPANASRRRAARVSARVFVTDENDNAPVFASPSRVRLPEDQPPGPAALHVVARDPDLGEAARVSYRLASGGDGHFRLHSSTGALSVVRPLDREQRAEHVLTVVASDHGSPPRSATQVLTVSVADVNDEAPTFQQQEYSVLLRENNPPGTSLLTLRATDPDVGANGQVTYGGVSSESFSLDPDTGVLTTLRALDREEQEEINLTVYAQDRGSPPQLTHVTVRVAVEDENDHAPTFGSAHLSLEVPEGQDPQTLTMLRASDPDVGANGQLQYRILDGDPSGAFVLDLASGEFGTMRPLDREVEPAFQLRIEARDGGQPALSATLLLTVTVLDANDHAPAFPVPAYSVEVPEDVPAGTLLLQLQAHDPDAGANGHVTYYLGAGTAGAFLLEPSSGELRTAAALDREQCPSYTFSVSAVDGAAAGPLSTTVSVTITVRDVNDHAPTFPTSPLRLRLPRPGPSFSTPTLALATLRAEDRDAGANASILYRLAGTPPPGTTVDSYTGEIRVARSPVALGPRDRVLFIVATDLGRPARSATGVIIVGLQGEAERGPRFPRASSEATIRENAPPGTPIVSPRAVHAGGTNGPITYSILSGNEKGTFSIQPSTGAITVRSAEGLDFEVSPRLRLVLQAESGGAFAFTVLTLTLQDANDNAPRFLRPHYVAFLPESRPLEGPLLQVEADDLDQGSGGQISYSLAASQPARGLFHVDPTTGTITTTAILDREIWAETRLVLMATDRGSPALVGSATLTVMVIDTNDNRPTIPQPWELRVSEDALLGSEIAQVTGNDVDSGPVLWYVLSPSGPQDPFSVGRYGGRVSLTGPLDFEQCDRYQLQLLAHDGPHEGRANLTVLVEDVNDNAPAFSQSLYQVMLLEHTPPGSAILSVSATDRDSGANGHISYHLASPADGFSVDPNNGTLFTIVGTVALGHDGSGAVDVVLEARDHGAPGRAARATVHVQLQDQNDHAPSFTLSHYRVAVTEDLPPGSTLLTLEATDADGSRSHAAVDYSIISGNWGRVFQLEPRLAEAGESAGPGPRALGCLVLLEPLDFESLTQYNLTVAAADRGQPPQSSVVPVTVTVLDVNDNPPVFTRASYRVTVPEDTPVGAELLHVEASDADPGPHGLVRFTVSSGDPSGLFELDESSGTLRLAHALDCETQARHQLVVQAADPAGAHFALAPVTIEVQDVNDHGPAFPLNLLSTSVAENQPPGTLVTTLHAIDGDAGAFGRLRYSLLEAGPGPEGREAFALNSSTGELRARVPFDYEHTESFRLLVGAADAGNLSASVTVSVLVTGEDEYDPVFLAPAFHFQVPEGARRGHSLGHVQATDEDGGADGLVLYSLATSSPYFGINQTTGALYLRVDSRAPGSGTATSGGGGRTRREAPRELRLEVIARGPLPGSRSATVPVTVDITHTALGLAPDLNLLLVGAVAASLGVVVVLALAALVLGLVRARSRKAEAAPGPMSQAAPLASDSLQKLGREPPSPPPSEHLYHQTLPSYGGPGAGGPYPRGGSLDPSHSSGRGSAEAAEDDEIRMINEFPRVASVASSLAARGPDSGIQQDADGLSDTSCEPPAPDTWYKGRKAGLLLPGAGATLYREEGPPATATAFLGGCGLSPAPTGDYGFPADGKPCVAGALTAIVAGEEELRGSYNWDYLLSWCPQFQPLASVFTEIARLKDEARPCPPAPRIDPPPLITAVAHPGAKSVPPKPANTAAARAIFPPASHRSPISHEGSLSSAAMSPSFSPSLSPLAARSPVVSPFGVAQGPSASALSAESGLEPPDDTELHI

SEQ ID NO: 43424 - protein, 121 aa, Homo sapiens
MSSQLIDYGKLGDTNERAMRMADFWLTEKDLIPKLFQVLAPRYKDQTGGYTRMLQIPNRSLDRAKMAVIEYKGNCLPPLPLPRRDSHLTLLNQLLQGLRQDLRQSQEASNHSSHTAQTPGI

SEQ ID NO: 43425 - protein, 489 aa, Homo sapiens
MSWQQETNPVVETHDSEASRQKFRHFQYLKVSGPHEALSQLWELCLQWLRPEIHTKKQIIELLVLEQFLAILPEEVRTWVNLQHPNNSKDMVTLIEDVIEMLEDEDMPCKDSALQMGSIKEKMKAGSRTGKPQEPVTFKDVVVEFSKEEWGQLDSAVKNLYRNVMLENFRNLNSLRKAHLLSKPFESLKLESKKKRWIMEKEIPRKTIFDMKSISGEESSHGVIMTRLTESGHPSSDAWKGENWLYRNQKKWDINLPQEAFIPETIYTEEEDFECSENKKSFDINSVSSICAIQVGIPSRKGSPKCDKFKTYFKFNLDSVGKQHSEYEYGNDLSLSTDIRHQKSHTTMNSYECYQCGKAFCRSSSLIRHQIIHTGEKPYKCSECGRFFNRRTNLTKHQKLHAEAKACTSNKCGKAFSKSEDSNNPTLHFGNNFYQCVNCGKSFNRSSSLIRHQMIHTGEKPFKCKECSKAFNRSSNLVKHQKLHTRDKS

SEQ ID NO: 43426 - protein, 401 aa, Homo sapiens
MVALRGASALLVLFLAAFLPPPQCTQDPAMVHYIYQRFRVLEQGLEKCTQATRAYIQEFQEFSKNISVMLGRCQTYTSEYKSAVGNLALRVERAQREIDYIQYLREADECIESEDKTLAEMLLQEAEEEKKIRTLLNASCDNMLMGIKSLKIVKKMMDTHGSWMKDAVYNSPKVYLLIGSRNNTVWEFANIRAFMEDNTKPAPRKQILTLSWQGTGQVIYKGFLFFHNQATSNEIIKYNLQKRTVEDRMLLPGGVGRALVYQHSPSTYIDLAVDEHGLWAIHSGPGTHSHLVLTKIEPGTLGVEHSWDTPCRSQDAEASFLLCGVLYVVYSTGGQGPHRITCIYDPLGTISEEDLPNLFFPKRPRSHSMIHYNPRDKQLYAWNEGNQIIYKLQTKRKLPLK

SEQ ID NO: 43427 - protein, 147 aa, Homo sapiens
MSIKAYVSTLMGVPGRTMGVMFTPLTVKYAYYDTERIGVDLIMKTCFSPNRVIGLSSDLQQVGGASARIQDALSTVLQYAEDVLSGKVSADNTVGRFLMSLVNQVPKIVPDDFETMLNSNINDLLMVTYLANLTQSQIALNEKLVNL

SEQ ID NO: 43428 - protein, 1135 aa, Homo sapiens
MTANKNSSITHGAGGTKAPRGTLSRSQSVSPPPVLSPPRSPIYPLSDSETSACRYPSHSSSRVLLKDRHPPAPSPQNPQDPSPDTSPPTCPFKTASFGYLDRSPSACKRDAQKESVQGAAQDVAGVAACLPLAQSTPFPGPAAGPRGVLLTRTGTRAHSLGIREKISAWEGRREASPRMSMCGEKREGSGSEWAASEGCPSLGCPSVVPSPCSSEKTFDFKGLRRMSRTFSECSYPETEEEGEALPVRDSFYRLEKRLGRSEPSAFLRGHGSRKESSAVLSRIQKIEQVLKEQPGRGLPQLPSSCYSVDRGKRKTGTLGSLEEPAGGASVSAGSRAVGVAGVAGEAGPPPEREGSGSTKPGTPGNSPSSQRLPSKSSLDPAVNPVPKPKRTFEYEADKNPKSKPSNGLPPSPTPAAPPPLPSTPAPPVTRRPKKDMRGHRKSQSRKSFEFEDASSLQSLYPSSPTENGTENQPKFGSKSTLEENAYEDIVGDLPKENPYEDVDLKSRRAGRKSQQLSENSLDSLHRMWSPQDRKYNSPPTQLSLKPNSQSLRSGNWSERKSHRLPRLPKRHSHDDMLLLAQLSLPSSPSSLNEDSLSTTSELLSSRRARRIPKLVQRINSIYNAKRGKKRLKKLSMSSIETASLRDENSESESDSDDRFKAHTQRLVHIQSMLKRAPSYRTLELELLEWQERELFEYFVVVSLKKKPSRNTYLPEVSYQFPKLDRPTKQMREAEERLKAIPQFCFPDAKDWLPVSEYSSETFSFMLTGEDGSRRFGYCRRLLPSGKGPRLPEVYCVISRLGCFGLFSKVLDEVERRRGISAALVYPFMRSLMESPFPAPGKTIKVKTFLPGAGNEVLELRRPMDSRLEHVDFECLFTCLSVRQLIRIFASLLLERRVIFVADKLSTLSSCSHAVVALLYPFSWQHTFIPVLPASMIDIVCCPTPFLVGLLSSSLPKLKELPVEEALMVNLGSDRFIRQMDDEDTLLPRKLQAALEQALERKNELISQDSDSDSDDECNTLNGLVSEVFIRFFVETVGHYSLFLTQSEKGERAFQREAFRKSVASKSIRRFLEVFMESQMFAGFIQDRELRKCRAKGLFEQRVEQYLEELPDTEQSGMNKFLRGLGNKMKFLHKKN

SEQ ID NO: 43429 - protein, 617 aa, Homo sapiens
MEAQHVTLCLTEAVTVADGDNLENMEGVSLQAVTLADGSTAYIQHNSKDAKLIDGQVIQLEDGSAAYVQHVPIPKSRDSLRLEDGQAVQLEDGTTAFIHHTSKDSYDQSALQAVQLEDGTTAYIHHAVQVPQSDTILAIQADGTVAGLHTGDATIDPDTISALEQYAAKVSIDGSESVAGTGMIGENEQEKKMQIVLQGHATRVTAKSQQSGEKAFRCEYDGCGKLYTTAHHLKVHERSHTGDRPYQCEHAGCGKAFATGYGLKSHVRTHTGEKPYRCSEDNCTKSFKTSGDLQKHIRTHTGERPFKCPFEGCGRSFTTSNIRKVHVRTHTGERPYYCTEPGCGRAFASATNYKNHVRIHTGEKPYVCTVPGCDKRFTEYSSLYKHHVVHTHSKPYNCNHCGKTYKQISTLAMHKRTAHNDTEPIEEEQEAFFEPPPGQGEDVLKGSQITYVTGVEGDDVVSTQVATVTQSGLSQQVTLISQDGTQHVNISQADMQAIGNTITMVTQDGTPITVPAHDAVISSAGTHSVAMVTAEGTEGEQVAIVAQDLAAFHTASSEMGHQQHSHHLVTTETRPLTLVATSNGTQIAVQLGEQPSLEEAIRIASRIQQGETPGLDD

SEQ ID NO: 43430 - protein, 1439 aa, Homo sapiens
MAFAGFVSERGPPYRSCDLFDELVAFEVERIKVEENNPVKMIKHVRELAEQLFKNENPNPHMAFQKVPRPTEGSHLRVHILPFPEINEARVQELIQENVAKNQNAPPATRIEKKCVVPAGPPVVSIMDKVTTVFNSAQRLEVVRNCISFIFENKILETEKTLPAALRALKGKAARQCLTDELGLHVQQNRAILDHQQFDYIIRMMNCTLQDCSSLEEYNIAAALLPLTSAFYRKLAPGVSQFAYTCVQDHPIWTNQQFWETTFYNAVQEQVRSLYLSAKEDNHAPHLKQKDKLPDDHYQEKTAMDLAAEQLRLWPTLSKSTQQELVQHEESTVFSQAIHFANLMVNLLVPLDTSKNKLLRTSAPGDWESGSNSIVTNSIAGSVAESYDTESGFEDSENTDIANSVVRFITRFIDKVCTESGVTQDHIKSLHCMIPGIVAMHIETLEAVHRESRRLPPIQKPKILRPALLPGEEIVCEGLRVLLDPDGREEATGGLLGGPQLLPAEGALFLTTYRILFRGTPHDQLVGEQTVVRSFPIASITKEKKITMQNQLQQNMQEGLQITSASFQLIKVAFDEEVSPEVVEIFKKQLMKFRYPQSIFSTFAFAAGQTTPQIILPKQKEKNTSFRTFSKTIVKGAKRAGKMTIGRQYLLKKKTGTIVEERVNRPGWNEDDDVSVSDESELPTSTTLKASEKSTMEQLVEKACFRDYQRLGLGTISGSSSRSRPEYFRITASNRMYSLCRSYPGLLVVPQAVQDSSLPRVARCYRHNRLPVVCWKNSRSGTLLLRSGGFHGKGVVGLFKSQNSPQAAPTSSLESSSSIEQEKYLQALLNAVSVHQKLRGNSTLTVRPAFALSPGVWASLRSSTRLISSPTSFIDVGARLAGKDHSASFSNSSYLQNQLLKRQAALYIFGEKSQLRNFKVEFALNCEFVPVEFHEIRQVKASFKKLMRACIPSTIPTDSEVTFLKALGDSEWFPQLHRIMQLAVVVSEVLENGSSVLVCLEEGWDITAQVTSLVQLLSDPFYRTLEGFQMLVEKEWLSFGHKFSQRSSLTLNCQGSGFAPVFLQFLDCVHQVHNQYPTEFEFNLYYLKFLAFHYVSNRFKTFLLDSDYERLEHGTLFDDKGEKHAKKGVCIWECIDRMHKRSPIFFNYLYSPLEIEALKPNVNVSSLKKWDYYIEETLSTGPSYDWMMLTPKHFPSEDSDLAGEAGPRSQRRTVWPCYDDVSCTQPDALTSLFSEIEKLEHKLNQAPEKWQQLWERVTVDLKEEPRTDRSQRHLSRSPGIVSTNLPSYQKRSLLHLPDSSMGEEQNSSISPSNGVERRAATLYSQYTSKNDENRSFEGTLYKRGALLKGWKPRWFVLDVTKHQLRYYDSGEDTSCKGHIDLAEVEMVIPAGPSMGAPKHTSDKAFFDLKTSKRVYNFCAQDGQSAQQWMDKIQSCISDA

SEQ ID NO: 43431 - protein, 641 aa, Homo sapiens [sequence omitted]

SEQ ID NO: 43432 - protein, 1091 aa, Homo sapiens
MTCLDTLAAYYVQQARKEKNKDNKKDLITQATLLYTMADKIIMYDQNHLLGRACFCLLEGDKMDQADAQFHFVLNQSPNNIPALLGKACISFNKKDYRGALAYYKKALRTNPGCPAEVRLGMGHCFVKLNKLEKARLAFSRALELNSKCVGALVGLAVLELNNKEADSIKNGVQLLSRAYTIDPSNPMVLNHLANHFFFKKDYSKVQHLALHAFHNTEVEAMQAESCYQLARSFHVQEDYDQAFQYYYQATQFASSSFVLPFFGLGQMYIYRGDKENASQCFEKVLKAYPNNYETMKILGSLYAASEDQEKRDIAKGHLKKVTEQYPDDVEAWIELAQILEQTDIQGALSAYGTATRILQEKVQADVPPEILNNVGALHFRLGNLGEAKKYFLASLDRAKAEAEHDEHYYNAISVTTSYNLARLYEAMCEFHEAEKLYKNILREHPNYVDCYLRLGAMARDKGNFYEASDWFKEALQINQDHPDAWSLIGNLHLAKQEWGPGQKKFERILKQPSTQSDTYSMLALGNVWLQTLHQPTRDREKEKRHQDRALAIYKQVLRNDAKNLYAANGIGAVLAHKGYFREARDVFAQVREATADISDVWLNLAHIYVEQKQYISAVQMYENCLRKFYKHQNTEVVLYLARALFKCGKLQECKQTLLKARHVAPSDTVLMFNVALVLQRLATSVLKDEKSNLKEVLNAVKELELAHRYFSYLSKVGDKMRFDLALAATEARQCSDLLSQAQYHVARARKQDEEERELRAKQEQEKELLRQKLLKEQEEKRLREKEEQKKLLEQRAQYVEKTKNILMFTGETEATKEKKRGGGGGRRSKKGGEFDEFVNDDTDDDLPISKKKKRRKGSGSEQEGEDEEGGERKKKKRRRHPKGEEGSDDDETENGPKPKKRRPPKAEKKKAPKPERLPPSMKGKIKSKAIISSSDDSSDEDKLKIADEGHPRNSNSNSDSDEDEQRKKCASSESDSDENQNKSGSEAGSPRRPRRQRSDQDSDSDQPSRKRRPSGSEQSDNESVQSGRSHSGVSENDSRPASPSAESDHESERGSDNEGSGQGSGNESEPEGSNNEASDRGSEHGSDDSD

SEQ ID NO: 43433 - protein, 596 aa, Homo sapiens
MDQYFARMCSLMLSKELPARIRFLLQDTVELREHHWVPRKAFLDNGPKTINQIRQDAVKDLGVFIPAPMAQGMRSDFFLEGPFMPPRMKMDRDPLGGLADMFGQMPGSGIGTGPGVIQDRFSPTMGRHRSNQLFNGHGGHIMPPTQSQFGEMGGKFMKSQISLRPAQSFLMNKNQVPKLQPQITMIPPSAQPPRTQTPPLGQTPQLGLKTNPPLIQEKPAKTSKKPPPSKEELLKLTETVVTEYLNSGNANEAVNGVREMRAPKHFLPEMLSKVIILSLDRSDEDKEKASSLISLLKQEGIATSDNFMQAFLNVLDQCPKLEVDIPLVKSYLAQFAARAIISELVSISELAQPLESGTHFPLFLLCLQQLAKLQDREWLTELFQQSKVNMQKMLPEIDQNKDRMLEILEGKGLSFLFPLLKLEKELLKQIKLDPSPQTIYKWIKDNISPKLHVDKGFVNILMTSFLQYISSEVNPPSDETDSSSAPSKEQLEQEKQLLLSFKPVMQKFLHDHVDLQVSALYALQVHCYNSNFPKGMLLRFFVHFYDMEIIEEEAFLAWKEDITQEFPGKGKALFQVNQWLTWLETAEEEESEEEAD

SEQ ID NO: 43434 - protein, 634 aa, Homo sapiens
MDQYFARMCSLMLSKELPARIRFLLQDTVELREHHWVPRKAFLDNGPKTINQIRQDAVKDLGVFIPAPMAQGMRSDFFLEGPFMPPRMKMDRDPLGGLADMFGQMPGSGIGTGPGVIQDRFSPTMGRHRSNQLFNGHGGHIMPPTQSQFGEMGGKFMKSQGLSQLYHNQSQGLLSQLQGQSKDMPPRFSKKGQLNADEISLRPAQSFLMNKNQVPKLQPQITMIPPSAQPPRTQTPPLGQTPQLGLKTNPPLIQEKPAKTSKKPPPSKEELLKLTETVVTEYLNSGNANEAVNGVREMRAPKHFLPEMLSKVIILSLDRSDEDKEKASSLISLLKQEGIATSDNFMQAFLNVLDQCPKLEVDIPLVKSYLAQFAARAIISELVSISELAQPLESGTHFPLFLLCLQQLAKLQDREWLTELFQQSKVNMQKMLPEIDQNKDRMLEILEGKGLSFLFPLLKLEKELLKQIKLDPSPQTIYKWIKDNISPKLHVDKGFVNILMTSFLQYISSEVNPPSDETDSSSAPSKEQLEQEKQLLLSFKPVMQKFLHDHVDLQVSALYALQVHCYNSNFPKGMLLRFFVHFYDMEIIEEEAFLAWKEDITQEFPGKGKALFQVNQWLTWLETAEEEESEEEAD

SEQ ID NO: 43435 - protein, 24 aa, Homo sapiens
MQIPGIEHTTKKFSFCVLPSHSPH

SEQ ID NO: 43436 - protein, 29 aa, Homo sapiens
MQIPGYCQIRIEHTTKKFSFCVLPSHSPH

SEQ ID NO: 43437 - protein, 411 aa, Homo sapiens
MERMSDSADKPIDNDAEGVWSPDIEQSFQEALAIYPPCGRRKIILSDEGKMYGRNELIARYIKLRTGKTRTRKQVSSHIQVLARRKSRDFHSKLKDQTAKDKALQHMAAMSSAQIVSATAIHNKLGLPGIPRPTFPGAPGFWPGMIQTGQPGSSQDVKPFVQQAYPIQPAVTAPIPGFEPASAPAPSVPAWQGRSIGTTKLRLVEFSAFLEQQRDPDSYNKHLFVHIGHANHSYSDPLLESVDIRQIYDKFPEKKGGLKELFGKGPQNAFFLVKFWADLNCNIQDDAGAFYGVTSQYESSENMTVTCSTKVCSFGKQVVEKVETEYARFENGRFVYRINRSPMCEYMINFIHKLKHLPEKYMMNSVLENFTILLVVTNRDTQETLLCMACVFEVSNSEHGAQHHIYRLVKD

SEQ ID NO: 43438 - protein, 610 aa, Homo sapiens
MSPGPTDLLSSSLGTSGVDCNRKRKGSSTDYQESMDTDKDDPHGRLEYTEHQGRIKNAREAHSQIEKRRRDKMNSFIDELASLVPTCNAMSRKLDKLTVLRMAVQHMKTLRGATNPYTEANYKPTFLSDDELKHLILRAADGFLFVVGCDRGKILFVSESVFKILNYSQNDLIGQSLFDYLHPKDIAKVKEQLSSSDTAPRERLIDAKTGLPVKTDITPGPSRLCSGARRSFFCRMKCNRPSVKVEDKDFPSTCSKKKDRKSFCTIHSTGYLKSWPPTKMGLDEDNEPDNEGCNLSCLVAIGRLHSHVVPQPVNGEIRVKSMEYVSRHAIDGKFVFVDQRATAILAYLPQELLGTSCYEYFHQDDIGHLAECHRQVLQTREKITTNCYKFKIKDGSFITLRSRWFSFMNPWTKEVEYIVSTNTVVLANVLEGGDPTFPQLTASPHSMDSMLPSGEGGPKRTHPTVPGIPGGTRAGAGKIGRMIAEEIMEIHRIRGSSPSSCGSSPLNITSTPPPDASSPGGKKILNGGTPDIPSSGLLSGQAQENPGYPYSDSSSILGENPHIGIDMIDNDQGSSSPSNDEAAMAVIMSLLEADAGLGGPVDFSDLPWPL

SEQ ID NO: 43439 - protein, 611 aa, Homo sapiens
MSPGPTDLLSSSLGTSGVDCNRKRKGSSTDYQESMDTDKDDPHGRLEYTEHQGRIKNAREAHSQIEKRRRDKMNSFIDELASLVPTCNAMSRKLDKLTVLRMAVQHMKTLRGATNPYTEANYKPTFLSDDELKHLILRAADGFLFVVGCDRGKILFVSESVFKILNYSQNDLIGQSLFDYLHPKDIAKVKEQLSSSDTAPRERLIDAKTGLPVKTDITPGPSRLCSGARRSFFCRMKCNRPSVKVEDKDFPSTCSKKKADRKSFCTIHSTGYLKSWPPTKMGLDEDNEPDNEGCNLSCLVAIGRLHSHVVPQPVNGEIRVKSMEYVSRHAIDGKFVFVDQRATAILAYLPQELLGTSCYEYFHQDDIGHLAECHRQVLQTREKITTNCYKFKIKDGSFITLRSRWFSFMNPWTKEVEYIVSTNTVVLANVLEGGDPTFPQLTASPHSMDSMLPSGEGGPKRTHPTVPGIPGGTRAGAGKIGRMIAEEIMEIHRIRGSSPSSCGSSPLNITSTPPPDASSPGGKKILNGGTPDIPSSGLLSGQAQENPGYPYSDSSSILGENPHIGIDMIDNDQGSSSPSNDEAAMAVIMSLLEADAGLGGPVDFSDLPWPL

SEQ ID NO: 43440 - protein, 609 aa, Homo sapiens
MSFLLKFTGRIWGAQWLEVRCPLGDAMINIESMDTDKDDPHGRLEYTEHQGRIKNAREAHSQIEKRRRDKMNSFIDELASLVPTCNAMSRKLDKLTVLRMAVQHMKTLRGATNPYTEANYKPTFLSDDELKHLILRAADGFLFVVGCDRGKILFVSESVFKILNYSQNDLIGQSLFDYLHPKDIAKVKEQLSSSDTAPRERLIDAKTGLPVKTDITPGPSRLCSGARRSFFCRMKCNRPSVKVEDKDFPSTCSKKKADRKSFCTIHSTGYLKSWPPTKMGLDEDNEPDNEGCNLSCLVAIGRLHSHVVPQPVNGEIRVKSMEYVSRHAIDGKFVFVDQRATAILAYLPQELLGTSCYEYFHQDDIGHLAECHRQVLQTREKITTNCYKFKIKDGSFITLRSRWFSFMNPWTKEVEYIVSTNTVVLANVLEGGDPTFPQLTASPHSMDSMLPSGEGGPKRTHPTVPGIPGGTRAGAGKIGRMIAEEIMEIHRIRGSSPSSCGSSPLNITSTPPPDASSPGGKKILNGGTPDIPSSGLLSGQAQENPGYPYSDSSSILGENPHIGIDMIDNDQGSSSPSNDEAAMAVIMSLLEADAGLGGPVDFSDLPWPL

SEQ ID NO: 43441 - protein, 284 aa, Homo sapiens
MLGRMFGSGREHNFTRPNEKGEYEVAEGIGSTVFRAILDYYKTGIIRCPDGISIPELREACDYLCISFEYSTIKCRDLSALMHELSNDGARRQFEFYLEEMILPLMVASAQSGERECHIVVLTDDDVVDWDEEYPPQMGEEYSQIIYSTKLYRFFKYIENRDVAKSVLKERGLKKIRLGIEGYPTYKEKVKKRPGGRPEVIYNYVQRPFIRMSWEKEEGKSRHVDFQCVKSKSITNLAAAAADIPQDQLVVMHPTPQVDELDILPIHPPSGNSDLDPDAQNPML

SEQ ID NO: 43442 - protein, 209 aa, Homo sapiens
MMKEHERREYLKTLNEEKRKEEESKFEEMKKKHENHPKVNHPGSKDQLKEVWEETDGLDPNDFDPKTFFKLHDVNSDGFLDEQELEALFTKELEKVYDPKNEEDDMVEMEEERLRMREHVMNETLDQQQFFTEEELKEYENIIALQENELKKKADELQKQKEELQRQHDQLEAQKLEYHQVIQQMEQKKLQQGIPPSGPAGELKFEPHI

SEQ ID NO: 43443 - protein, 239 aa, Homo sapiens
MMKEHERREYLKTLNEEKRKEEESKFEEMKKKHENHPKVNHPGSKDQLKEVWEETDGLDPNDFDPKTFFKLHDVNSDGFLDEQELEALFTKELEKVYDPKNEEDDMVEMEEERLRMREHVMNEVDTNKDRLVTLEEFLKATEKKEFLEPDSWETLDQQQFFTEEELKEYENIIALQENELKKKADELQKQKEELQRQHDQLEAQKLEYHQVIQQMEQKKLQQGIPPSGPAGELKFEPHI

SEQ ID NO: 43444 - protein, 405 aa, Homo sapiens
MENEICRVWDMSMDEDVALFLQEFNAPDIFMGVLAKSKCPRLREICVGILGNMACFQEICVSISSDKNLGQVLLHCLYDSDPPTLLETSRLLLTCLSQAEVASVWVERIQEHPAIYDSICFIMSSSTNVDLLVKVGEVVDKLFDLDEKLMLEWVRNGAAQPLDQPQEESEEQPVFRLVPCILEAAKQVRSENPEWLDVYMHILQLLTTVDDGIQAIVHCPDTGKDIWNLLFDLVCHEFCQSDDPPIILQEQKTVLASVFSVLSAIYASQTEQEYLKIEKDLPLIDSLIRVLQNMEQCQKKPENSAESNTEETKRTDLTQDDFHLKILKDILCEFLSNIFQALTKETVAQGVKEGQLSKQKCSSAFQNLLPFYSPVVEDFIKILREVDKALADDLEKNFPSLKVQT

SEQ ID NO: 43445 - protein, 406 aa, Homo sapiens
MENEICRVWDMSMDEDVALFLQEFNAPDIFMGVLAKSKCPRLREICVGILGNMACFQEICVSISSDKNLGQVLLHCLYDSDPPTLLETSRLLLTCLSQAEVASVWVERIQEHPAIYDSICFIMSSSTNVDLLVKVGEVVDKLFDLDEKLMLEWVRNGAAQPLDQPQEESEEQPVFRLVPCILEAAKQVRSENPEWLDVYMHILQLLTTVDDGIQAIVHCPDTGKDIWNLLFDLVCHEFCQSDDPPIILQEQKTVLASVFSVLSAIYASQTEQEYLKIEKVDLPLIDSLIRVLQNMEQCQKKPENSAESNTEETKRTDLTQDDFHLKILKDILCEFLSNIFQALTKETVAQGVKEGQLSKQKCSSAFQNLLPFYSPVVEDFIKILREVDKALADDLEKNFPSLKVQT

SEQ ID NO: 43446 - protein, 27 aa, Homo sapiens
MEARPPSNRGGGYCCGHWVSASSQQRL

SEQ ID NO: 43447 - protein, 212 aa, Homo sapiens
MDLQHGSLFLRTPKIVSGKDYNVTANSKLVIITAGARQQEGESRLNLVQRNVNIFKFIIPNVVKYSPNCKLLIVSNPVDILTYVAWKISGFPKNRVIGSGCNLDSARFRYLMGERLGVHPLSCHGWVLGEHGDSSVPVWSGMNVAGVSLKTLHPDLGTDKDKEQWKECRYTLGDPKGAAILKSSDVISFHCLGYNRILGGGCACCPFYLICD

SEQ ID NO: 43448 - protein, 446 aa, Homo sapiens
MTDVNGQTPLMLSAHKVIGPEPTGFLLKFNPSLNVVDKIHQNTPLHWAVAAGNVNAVDKLLEAGSSLDIQNVKGETPLDMALQNKNQLIIHMLKTEAKMRANQKFRLWRWLQKCELFLLLMLSVITMWAIGYILDFNSDSWLLKGCLLVTLFFLTSLFPRFLVGYKNLVYLPTAFLLSSVFWIFMTWFILFFPDLAGAPFYFSFIFSIVAFLYFFYKTWATDPGFTKASEEEKKVNIITLAETGSLDFRTFCTSCLIRKPLRSLHCHVCNCCVARYDQHCLWTGRCIGFGNHHYYIFFLFFLSMVCGWIIYGSFIYLSSHCATTFKEDGLWTYLNQIVACSPWVLYILMLATFHFSWSTFLLLNQLFQIAFLGLTSHERISLQKQSKHMKQTLSLRKTPYNLGFMQNLADFFQCGCFGLVKPCVVDWTSQYTMVFHPAREKVLRSV

SEQ ID NO: 43449 - protein, 2479 aa, Homo sapiens
MKSGLPKPVHSAAPILHVPPARAGPQPCYLKLGSKVEVSKTTYPSQIPLKSQVLQGLQEPAGEGLPLRKSGSVENGFDTQIYTDWANHYLAKSGHKRLIRDLQQDVTDGVLLAQIIQVVANEKIEDINGCPKNRSQMIENIDACLNFLAAKGINIQGLSAEEIRNGNLKAILGLFFSLSRYKQQQQQPQKQHLSSPLPPAVSQVAGAPSQCQAGTPQQQVPVTPQAPCQPHQPAPHQQSKAQAEMQSSASSKDSSQSKIIRFTLGQKKISRLPGPTARVSAAGSEAKTRGGSTTANNRRSQSFNNYDKSKPVTSPPPPPSSHEKEPLASSASSHPGMSDNAPASLESGSSSTPTNCSTSSAIPQPGAATKPWRSKSLSVKHSATVSMLSVKPPGPEAPRPTPEAMKPAPNNQKSMLEKLKLFNSKGGSKAGEGPGSRDTSCERLETLPSFEESEELEAASRMLTTVGPASSSPKIALKGIAQRTFSRALTNKKSSLKGNEKEKEKQQREKDKEKSKDLAKRASVTERLDLKEEPKEDPSGAAVPEMPKKSSKIASFIPKGGKLNSAKKEPMAPSHSGIPKPGMKSMPGKSPSAPAPSKEGERSRSGKLSSGLPQQKPQLDGRHSSSSSSLASSEGKGPGGTTLNHSISSQTVSGSVGTTQTTGSNTVSVQLPQPQQQYNHPNTATVAPFLYRSQTDTEGNVTAESSSTGVSVEPSHFTKTGQPALEELTGEDPEARRLRTVKNIADLRQNLEETMSSLRGTQVTHSTLETTFDTNVTTEMSGRSILSLTGRPTPLSWRLGQSSPRLQAGDAPSMGNGYPPRANASRFINTESGRYVYSAPLRRQLASRGSSVCHVDVSDKAGDEMDLEGISMDAPGYMSDGDVLSKNIRTDDITSGYMTDGGLGLYTRRLNRLPDGMAVVRETLQRNTSLGLGDADSWDDSSSVSSGISDTIDNLSTDDINTSSSISSYANTPASSRKNLDVQTDAEKHSQVERNSLWSGDDVKKSDGGSDSGIKMEPGSKWRRNPSDVSDESDKSTSGKKNPVISQTGSWRRGMTAQVGITMPRTKPSAPAGALKTPGTGKTDDAKVSEKGRLSPKASQVKRSPSDAGRSSGDESKKPLPSSSRTPTANANSFGFKKQSGSAAGLAMITASGVTVTSRSATLGKIPKSSALVSRSAGRKSSMDGAQNQDDGYLALSSRTNLQYRSLPRPSKSNSRNGAGNRSSTSSIDSNISSKSAGLPVPKLREPSKTALGSSLPGLVNQTDKEKGISSDNESVASCNSVKVNPAAQPVSSPAQTSLQPGAKYPDVASPTLRRLFGGKPTKQVPIATAENMKNSVVISNPHATMTQQGNLDSPSGSGVLSSGSSSPLYSKNVDLNQSPLASSPSSAHSAPSNSLTWGTNASSSSAVSKDGLGFQSVSSLHTSCESIDISLSSGGVPSHNSSTGLIASSKDDSLTPFVRTNSVKTTLSESPLSSPAASPKFCRSTLPRKQDSDPHLDRNTLPKKGLRYTPTSQLRTQEDAKEWLRSHSAGGLQDTAANSPFSSGSSVTSPSGTRFNFSQLASPTTVTQMSLSNPTMLRTHSLSNADGQYDPYTDSRFRNSSMSLDEKSRTMSRSGSFRDGFEEESWEKSSVDNFVSRLHSSLHFSLPLFHHARYELVHGSSLSLVSSTSSVYSTPEEKCQSEIRKLRRELDASQEKVSALTTQLTANAHLVAAFEQSLGNMTIRLQSLTMTAEQKDSELNELRKTIELLKKQNAAAQAAINGVINTPELNCKGNGTAQSADLRIRRQHSSDSVSSINSATSHSSVGSNIESDSKKKKRKNWVNELRSSFKQAFGKKKSPKSASSHSDIEEMTDSSLPSSPKLPHNGSTGSTPLLRNSHSNSLISECMDSEAETVMQLRNELRDKEMKLTDIRLEALSSAHQLDQLREAMNRMQSEIEKLKAENDRLKSESQGSGCSRAPSQVSISASPRQSMGLSQHSLNLTESTSLDMLLDDTGECSARKEGGRHVKIVVSFQEEMKWKEDSRPHLFLIGCIGVSGKTKWDVLDGVVRRLFKEYIIHVDPVSQLGLNSDSVLGYSIGEIKRSNTSETPELLPCGYLVGENTTISVTVKGLAENSLDSLVFESLIPKPILQRYVSLLIEHRRIILSGPSGTGKTYLANRLSEYIVLREGRELTDGVIATFNVDHKSSKELRQYLSNLADQCNSENNAVDMPLVIILDNLHHVSSLGEIFNGLLNCKYHKCPYIIGTMNQATSSTPNLQLHHNFRWVLCANHTEPVKGFLGRFLRRKLMETEISGRVRNMELVKIIDWIPKVWHHLNRFLEAHSSSDVTIGPRLFLSCPIDVDGSRVWFTDLWNYSIIPYLLEAVREGLQLYGRRAPWEDPAKWVMDTYPWAASPQQHEWPPLLQLRPEDVGFDGYSMPREGSTSKQMPPSDAEGDPLMNMLMRLQEAANYSSPQSYDSDSNSNSHHDDILDSSLESTL

SEQ ID NO: 43450 - protein, 26 aa, Homo sapiens
MKPAGDWGPGSSKPAGTEADAVSGRR

SEQ ID NO: 43451 - protein, 886 aa, Homo sapiens [sequence omitted]

SEQ ID NO: 43452 - protein, 227 aa, Homo sapiens [sequence omitted]

SEQ ID NO: 43453 - protein, 286 aa, Homo sapiens
MPQELIEASNWHGFFLPEKISSTLKVEPCSLTPGYTKLLQFIQNIIYEEGFDGSNPQKKQRNILRIGIQNLGSPLWGDDICCAENGGNSHSLTKFLYVLRGLLRTSLSACIITMPTHLIQNKAIIARVTTLSDVVVGLESFIGSERETNPLYKDYHGLIHIRQIPRLNNLICDESDVKDLAFKLKRKLFTIEWVQDNYLRQERNIYPPGFSYLLKQKDSAWGEGSLQHSTFLMSFLAKATAFASRLVRHSEPLKQNGSGRIRQAAGPRLWHDGRRQEAPGLLGIPP

SEQ ID NO: 43454 - protein, 235 aa, Homo sapiens [sequence omitted]

SEQ ID NO: 43455 - protein, 311 aa, Homo sapiens
MNSVVSLLLILEPDKQEALIESLCEKLVKFREGERPSLRLQLLSNLFHGMDKNTPVRYTVYCSLIKVAASCGAIQYIPTELDQVRKWISDWNLTTEKKHTLLRLLYEALVDCKKSDAASKVMVELLGSYTEDNASQARVDAHRCIVRALKDPNAFLFDHLLTLKPVKFLEGELIHDLLTIFVSAKLASYVKFYQNNKDFIDSLGLLHEQNMAKMRLLTFMGMAVENKEISFDTMQQELQIGADDVEAFVIDAVRTKMVYCKIDQTQRKVVVSHSTHRTFGKQQWQQLYDTLNAWKQNLNKVKNSLLSLSDT

SEQ ID NO: 43456 - protein, 1702 aa, Homo sapiens
MHSSAATELFATGPLPSTGTLPPSLSAYQHPTTFSNRNFATTSPLVLQDSTFNTTSNGILSHHDPLLQIKTSQGTVPTALAFERLGSSVLSNSIPPQSSTYRSAQESAPHLLQPQFSLLPSALGGSQQTPQAYSSTLFTSSTASIERALLRECSVIKHHQRPSGTQSIQAQLTGSQHSLHSYLSNSSVVNFQETTRQSSLSCSPIGDSTQVSNGGLQQKTSQVSVELAQSYSSAIPSSGYPPSTTKIKSCSTEQPLTSTKTPKPQSIIPPVQTLSYSKPLHNQSSVISGQAQIYSTAQLPSLLSVSQSQNYGLVQPHNVPSIVHSQVYRSSKVEKLPPLYKTLTFSGSSQTVTPENQTLNYSSNQQEVLSSVTNENYPAQTRDLSSVSQSQSYSSGHSQGLSPVSQTQVSYSSQSQVLSVVSLSESYASGESLTLTAPSLSYSSASRAQNLPDSSPTQNYISMHSSQNVQTQESSSPQSQKFLPAVQSSSFASSTHCQTLQNNITSPDPKSYAERKLDSDVYPSSKQEDGFPMQELQVLQPQASLESSTQRLSDGEINAQESTYKVSKADDRYSQSVIRSNSRLEDQVIGVALQASKKEESVVGSVTQLNQQIGQVNNAATLDLKNSTNLIQTPQIRLNTKDLKQQHPLILKVHESKVQEQHDQIINASSQIQIPNHALGHGHQASLPNTQVLLDSACDLQILQQSILQAGLGQVKASLQAQRVQSPQQIVHPFLQMEGHVIQSNGDHSQQQLHPQNSEVMKMDLSESSKPLQQHLTTKGHFSETNQHDSKNQFVSLGSMCFPEAVLLSDERNILSNVDDILAATAAACGVTPTDFSKSTSNETMQAVEDGDSKSHFQQSLDVRHVTSDFNSMTATVGKPQNINDTSLNGNQVTVNLSPVPALQSKMTLDQQHIETPGQNIPTKVTSAVVGPSHEVQEQSSGPFKKQSATNLESEEDSEAPVDSTLNNNRNQEFVSSSRSISGENATSESEFTLGGDDSGVSMNPARSALALLAMAQSGDAVSVKIEEENQDLMHFNLQKKRAKGKGQVKEEDNSNQKQLKRPAQGKRQNPRGTDIYLPYTPPSSESCHDGYQHQEKMRQKIKEVEEKQPEVKTGFIASFLDFLKSGPKQQFSTLAVRMPNRTRRPGTQMVRTFCPPPLPKPSSTTPTPLVSETGGNSPSDKVDNELKNLEHLSSFSSDEDDPGYSQDAYKSVSTPLTTLDATSDKKKKTEALQVATTSPTANTTGTATTSSTTVGAVKQEPLHSTSYAVNILENISSSESSKPIELDGLPSDQFAKGQDTVAIEGFTDEEDTESGGEGQYRERDEFVVKIEDIETFKEALKTGKEPPAIWKVQKALLQKFVPEIRDGQREFAATNSYLGYFGDAKSKYKRIYVKFIENANKKEYVRVCSKKPRNKPSQTIRTVQAKPSSSSKTSDPLASKTTTTKAPSVKPKVKQPKVKAEPPPKKRKKWKEEFSSSQSDSSPEIHTSSSDDEEFEPPAPFVTRFLNTRAMKETFKSYMELLVSIALDPDTMQALEKSNDELLLPHMKKIDGMLNDNRKRLLLNLHLDQSFKNALESFPELTIITRDSKAKSGGTAISKIKMNGKAYNKKTLRTSKTTTKSAQEFAVDPEKIQLYSLYHSLHHYKYHVYLICKDEISSVQKKNEDLGQEEIVQLCMKNVKWVEDLFEKFGELLNHVQQKCS

SEQ ID NO: 43457 - protein, 232 aa, Homo sapiens [sequence omitted]

SEQ ID NO: 43458 - protein, 189 aa, Homo sapiens
MAQMEKALSIGFETCRYGFIEGHVVIPRIHPNSICAANNTGVYILTSNTSQYDTYCFNASAPPEEDCTSVTDLPNAFDGPITITIVNRDGTRYVQKGEYRTNPEDIYPSNPTDDDVSSGSSSERSSTSGGYIFYTFSTVHPIPDEDSPWITDSTDRIPATSKENKSLCFPIAIPWQNVSDLPEHCTLTC

SEQ ID NO: 43459 - protein, 212 aa, Homo sapiens [sequence omitted]

SEQ ID NO: 43460 - protein, 473 aa, Homo sapiens
MEEIQGYDVEFDPPLESKYECPICLMALREAVQTPCGHRFCKACIIKSIRDAGHKCPVDNEILLENQLFPDNFAKREILSLMVKCPNEGCLHKMELRHLEDHQAHCEFALMDCPQCQRPFQKFHINIHILKDCPRRQVSCDNCAASMAFEDKEIHDQNCPLANVICEYCNTILIREQMPNHYDLDCPTAPIPCTFSTFGCHEKMQRNHLARHLQENTQSHMRMLAQAVHSLSVIPDSGYISEVRNFQETIHQLEGRLVRQDHQIRELTAKMETQSMYVSELKRTIRTLEDKVAEIEAQQCNGIYIWKIGNFGMHLKCQEEEKPVVIHSPGFYTGKPGYKLCMRLHLQLPTAQRCANYISLFVHTMQGEYDSHLPWPFQGTIRLTILDQSEAPVRQNHEEIMDAKPELLAFQRPTIPRNPKGFGYVTFMHLEALRQRTFIKDDTLLVRCEVSTRFDMGSLRREGFQPRSTDAGV

SEQ ID NO: 43461 - protein, 211 aa, Homo sapiens
MDEDQLIKDVLDKFLNCHEQTYDEEFLNTFTHLSQEDHVSKRGVFGTDSSENIFTSAKVTHKNEADDYHLRNKTIFLRTSSQCLEEQVDNFLDLEDLDMDEEIKPQMSEDLLLLPGEVEQDVSTSIPSCIPFVAQPPTCEVKPKPSVKRMDKQTEEILGDEVQLFSLDEEFDYDNVMLTSKFSPAEIENIKELCKQQKRKDTSPDLEKSCD

SEQ ID NO: 43462 - protein, 1084 aa, Homo sapiens
MNLKHPHDLVILMRQEATVNYLKELEKQLVAQKIHIEENEDRDTGLEQRHNKEDPDCIKAKVPLGDLDLYDGTYITLESKDISPEDYIDTESPVPPDPEQPDCTKILELPYSIHAFQHLRGVQERVNLSAPLLPKEDPIFTYLSKRLGRSIDDIGHLIHEGLQKNTSSWVLYNMASFYWRIKNEPYQVVECAMRALHFSSRHNKDIALVNLANVLHRAHFSADAAVVVHAALDDSDFFTSYYTLGNIYAMLGEYNHSVLCYDHALQARPGFEQAIKRKHAVLCQQKLEQKLEAQHRSLQRTLNELKEYQKQHDHYLRQQEILEKHKLIQEEQILRNIIHETQMAKEAQLGNHQICRLVNQQHSLHCQWDQPVRYHRGDIFENVDYVQFGEDSSTSSMMSVNFDVQSNQSDINDSVKSSPVAHSILWIWGRDSDAYRDKQHILWPKRADCTESYPRVPVGGELPTYFLPPENKGLRIHELSSDDYSTEEEAQTPDCSITDFRKSHTLSYLVKELEVRMDLKAKMPDDHARKILLSRINNYTIPEEEIGSFLFHAINKPNAPIWLILNEAGLYWRAVGNSTFAIACLQRALNLAPLQYQDVPLVNLANLLIHYGLHLDATKLLLQALAINSSEPLTFLSLGNAYLALKNISGALEAFRQALKLTTKCPECENSLKLIRCMQFYPFLYNITSSVCSGTVVEESNGSDEMENSDETKMSEEILALVDEFQQAWPLEGFGGALEMKGRRLDLQGIRVLKKGPQDGVARSSCYGDCRSEDDEATEWITFQVKRVKKPKGDHKKTPGKKVETGQIENGHRYQANLEITGPKVASPGPQGKKRDYQRLGWPSPDECLKLRWVELTAIVSTWLAVSSKNIDITEHIDFATPIQQPAMEPLCNGNLPTSMHTLDHLHGVSNRASLHYTGESQLTEVLQNLGKDQYPQQSLEQIGTRIAKVLEKNQTSWVLSSMAALYWRVKGQGKKAIDCLRQALHYAPHQMKDVPLISLANILHNAKLWNDAVIVATMAVEIAPHFAVNHFTLGNVYVAMEEFEKALVWYESTLKLQPEFVPAKNRIQTIQCHLMLKKGRRSP

SEQ ID NO: 43463 - protein, 899 aa, Homo sapiens [sequence omitted]

SEQ ID NO: 43464 - protein, 701 aa, Homo sapiens [sequence omitted]

SEQ ID NO: 43465 - protein, 214 aa, Homo sapiens [sequence omitted]

SEQ ID NO: 43466 - protein, 189 aa, Homo sapiens
MGAYVFIGVGAVTMLMGFLGCIGAVNEVRCLLGLLKQEMGGIVTELIRDYNSSREDSLQDAWDYVQAQVKCCGWVSFYNWTDNAELMNRPEVTYPCSCEVKGEEDNSLSVRKGFCEAPGNRTQSGNHPEDWPVYQEGCMEKVQAWLQENLGIILGVGVGVAIIELLGMVLSICLCRHVHSEDYSKVPKY

SEQ ID NO: 43467 - protein, 239 aa, Homo sapiens
MGAAKVWGEVGRWLVIALVQLAKAVLRMLLLLWFKAGLQTSPPIVPLDRETQAQPPDGDHSPGNHEQSYVGKRSNRVVRTLQNTPSLHSRHWGAPQQREGRQQQHHEELSATPTPLGLQETIAEFLYIARPLLHLLSLGLWGQRSWKPWLLAGVVDVTSLSLLSDRKGLTRRERRELRRRTILLLYYLLRSPFYDRFSEARILFLLQLLADHVPGVGLVTRPLMDYLPTWQKIYFYSWG

SEQ ID NO: 43468 - protein, 611 aa, Homo sapiens
MKQDPQNADLKKQLHELQAKITALSEKQKRVVEQLRKNLIVKQEQPDKFQIQPLPQSENKLQTAQQQPLQQLQQQQQYHHHHAQQSAAASPNLTASQKTVTTASMITTKTLPLVLKAATATMPASVVGQRPTIAMVTAINSQKAVLSTDVQNTPVNLQTSSKVTGPGAEAVQIVAKNTVTLQVQATPPQPIKVPQFIPPPRLTPRPNFLPQVRPKPVAQNNIPIAPAPPPMLAAPQLIQRPVMLTKFTPTTLPTSQNSIHPVRVVNGQTATIAKTFPMAQLTSIVIATPGTRLAGPQTVQLSKPSLEKQTVKSHTETDEKQTESRTITPPAAPKPKREENPQKLAFMVSLGLVTHDHLEEIQSKRQERKRRTTANPVYSGAVFEPERKKSAVTYLNSTMHPGTRKRANEEHWPKGDIHEDFCSVCRKSGQLLMCDTCSRVYHLDCLDPPLKTIPKGMWICPRCQDQMLKKEEAIPWPGTLAIVHSYIAYKAAKEEEKQKLLKWSSDLKQEREQLEQKVKQLSNSISKCMEMKNTILARQKEMHSSLEKVKQLIRLIHGIDLSKPVDSEATVGAISNGPDCTPPANAATSTPAPSPSSQSCTANCNQGEETK

SEQ ID NO: 43469 - protein, 657 aa, Homo sapiens
MKQDPQNADLKKQLHELQAKITALSEKQKRVVEQLRKNLIVKQEQPDKFQIQPLPQSENKLQTAQQQPLQQLQQQQQYHHHHAQQSAAASPNLTASQKTVTTASMITTKTLPLVLKAATATMPASVVGQRPTIAMVTAINSQKAVLSTDVQNTPVNLQTSSKVTGPGAEAVQIVAKNTVTLVQATPPQPIKVPQFIPPPRLTPRPNFLPQVRPKPVAQNNIPIAPAPPPMLAAPQLIQRPVMLTKFTPTTLPTSQNSIHPVRVVNGQTATIAKTFPMAQLTSIVIATPGTRLAGPQTVQLSKPSLEKQTVKSHTETDEKQTESRTITPPAAPKPKREENPQKLAFMVSLGLVTHDHLEEIQSKRQERKRRTTANPVYSGAVFEPERKKSAVTYLNSTMHPGTRKRGRPPKYNAVLGFGALTPTSPQSSHPDSPENEKTETTFTFPAPVQPVSLPSPTSTDGDIHEDFCSVCRKSGQLLMCDTCSRVYHLDCLDPPLKTIPKGMWICPRCQDQMLKKEEAIPWPGTLAIVHSYIAYKAAKEEEKQKLLKWSSDLKQEREQLEQKVKQLSNSISKCMEMKNTILARQKEMHSSLEKVKQLIRLIHGIDLSKPVDSEATVGAISNGPDCTPPANAATSTPAPSPSSQSCTANCNQGEETK

SEQ ID NO: 43470 - protein, 378 aa, Homo sapiens
MNEKCDKEIKVSYTVYNRLSLLLKSLLAITRVTPAYRLSRKQGHEYVILYRIYFGEVQLSGLGEGFQTVRVGTVGTPVGTITLSCAYRINLAFMSTRQFERTPPIMGIIIDHFVDRPYPSSSPMHPCNYRTAGEDTGVIYPSVEDSQEVCTTSFSTSPPSQLMVPGKEGGVPLAPNQPVHGTQADQERLATCTPSDRTHCAATPSSSEDTETVSNSSEGRASPHDVLETIFVRKVGAFVNKPINQVTLTSLDIPFAMFAPKNLELEDTDPMVNPPDSPETESPLQGSLHSDGSSGGSSGNTHDDFVMIDFKPAFSKDDILPMDLGTFYREFQNPPQLSSLSIDIGAQSMAEDLDSLPEKLAVHEKNVREFDAFVETLQ

SEQ ID NO: 43471 - protein, 1761 aa, Homo sapiens
MRKCSDKEFRCSDGSCIAEHWYCDGDTDCKDGSDEENCPSAVPAPPCNLEEFQCAYGRCILDIYHCDGDDDCGDWSDESDCSSHQPCRSGEFMCDSGLCINAGWRCDGDADCDDQSDERNCTTSMCTAEQFRCHSGRCVRLSWRCDGEDDCADNSDEENCENTGSPQCALDQFLCWNGRCIGQRKLCNGVNDCGDNSDESPQQNCRPRTGEENCNVNNGGCAQKCQMVRGAVQCTCHTGYRLTEDGHTCQDVNECAEEGYCSQGCTNSEGAFQCWCETGYELRPDRRSCKALGPEPVLLFANRIDIRQVLPHRSEYTLLLNNLENAIALDFHHRRELVFWSDVTLDRILRANLNGSNVEEVVSTGLESPGGLAVDWVHDKLYWTDSGTSRIEVANLDGAHRKVLLWQNLEKPRAIALHPMEGTIYWTDWGNTPRIEASSMDGSGRRIIADTHLFWPNGLTIDYAGRRMYWVDAKHHVIERANLDGSHRKAVISQGLPHPFAITVFEDSLYWTDWHTKSINSANKFTGKNQEIIRNKLHFPMDIHTLHPQRQPAGKNRCGDNNGGCTHLCLPSGQNYTCACPTGFRKISSHACAQSLDKFLLFARRMDIRRISFDTEDLSDDVIPLADVRSAVALDWDSRDDHVYWTDVSTDTISRAKWDGTGQEVVVDTSLESPAGLAIDWVTNKLYWTDAGTDRIEVANTDGSMRTVLIWENLDRPRDIVVEPMGGYMYWTDWGASPKIERAGMDASGRQVIISSNLTWPNGLAIDYGSQRLYWADAGMKTIEFAGLDGSKRKVLIGSQLPHPFGLTLYGERIYWTDWQTKSIQSADRLTGLDRETLQENLENLMDIHVFHRRRPPVSTPCAMENGGCSHLCLRSPNPSGFSCTCPTGINLLSDGKTCSPGMNSFLIFARRIDIRMVSLDIPYFADVVVPINITMKNTIAIGVDPQEGKVYWSDSTLHRISRANLDGSQHEDIITTGLQTTDGLAVDAIGRKVYWTDTGTNRIEVGNLDGSMRKVLVWQNLDSPRAIVLYHEMGFMYWTDWGENAKLERSGMDGSDRAVLINNNLGWPNGLTVDKASSQLLWADAHTERIEAADLNGANRHTLVSPVQHPYGLTLLDSYIYWTDWQTRSIHRADKGTGSNVILVRSNLPGLMDMQAVDRAQPLGFNKCGSRNGGCSHLCLPRPSGFSCACPTGIQLKGDGKTCDPSPETYLLFSSRGSIRRISLDTSDHTDVHVPVPELNNVISLDYDSVDGKVYYTDVFLDVIRRADLNGSNMETVIGRGLKTTDGLAVDWVARNLYWTDTGRNTIEASRLDGSCRKVLINNSLDEPRAIAVFPRKGYLFWTDWGHIAKIERANLDGSERKVLINTDLGWPNGLTLDYDTRRIYWVDAHLDRIESADLNGKLRQVLVSHVSHPFALTQQDRWIYWTDWQTKSIQRVDKYSGRNKETVLANVEGLMDIIVVSPQRQTGTNACGVNNGGCTHLCFARASDFVCACPDEPDSRPCSLVPGLVPPAPRATGMSEKSPVLPNTPPTTLYSSTTRTRTSLEEVEGRCSERDARLGLCARSNDAVPAAPGEGLHISYAIGGLLSILLILVVIAALMLYRHKKSKFTDPGMGNLTYSNPSYRTSTQEVKIEAIPKPAMYNQLCYKKEGGPDHNYTKEKIKIVEGICLLSGDDAEWDDLKQLRSSRGGLLRDHVCMKTDTVSIQASSGSLDDTETEQLLQEEQSECSSVHTAATPERRGSLPDTGWKHERKLSSESQV

SEQ ID NO: 43472 - protein, 110 aa, Homo sapiens
MATERDGNLGSGSRRAGALKPPRSKDAESGAPSPTGLRVSGFNSVCQGTHILFREFSFVQATPHNRVSFLRAFWRCFRTVGKNGAPHPKPGICDGLTKNEDLAADFGFFH

SEQ ID NO: 43473 - protein, 308 aa, Homo sapiens
MEDAVCQLLENREDISQYGIARFFTEYFNSVCQGTHILFREFSFVQATPHNRVSFLRAFWRCFRTVGKNGDLLTMKEYHCLLQLLCPDFPLELTQKAARIVLMDDAMDCLMSFSDFLFAFQIQFYYSEFLDSVAAIYEDLLSGKNPNTVIVPTSSSGQHRQRPALGGAGTLEGVEASLFYQCLENLCDRHKYSCPPPALVKEALSNVQRLTFYGFLMALSKHRGINQALGALPDKGDLMHDPAMDEELERLLAQVPGLVNSVTASPEASCLPSRTPPRVGSPWRPLHHSRKVDGESDGSTEETDESET

SEQ ID NO: 43474 - protein, 79 aa, Homo sapiens
MEDAVCQLLENREDISQYGIARFFTEYFNSVCQGTHILFREFSFVQATPHNRVSFLRAFWRCFRTVGKNGDFYIQGKPN

SEQ ID NO: 43475 - protein, 351 aa, Homo sapiens [sequence omitted]

SEQ ID NO: 43476 - protein, 1519 aa, Homo sapiens
MSLRDDTSFVFTLTDKDTGVTRYGICVNFYRSFQKRISKEKGEGGAGSRGKEGTHATCASEEGGTESSESGSSLQPLSADSTPDVNQSPRGKRRAKAGSRSRNSTLTSLCVLSHYPFFSTFRECLYTLKRLVDCCSERLLGKKLGIPRGVQRDTMWRIFTGSLLVEEKSSALLHDLREIEAWIYRLLRSPVPVSGQKRVDIEVLPQELQPALTFALPDPSRFTLVDFPLHLPLELLGVDACLQVLTCILLEHKVVLQSRDYNALSMSVMAFVAMIYPLEYMFPVIPLLPTCMASAEQLLLAPTPYIIGVPASFFLYKLDFKMPDDVWLVDLDSNRVIAPTNAEVLPILPEPESLELKKHLKQALASMSLNTQPILNLEKFHEGQEIPLLLGRPSNDLQSTPSTEFNPLIYGNDVDSVDVATRVAMVRFFNSANVLQGFQMHTRTLRLFPRPVVAFQAGSFLASRPRQTPFAEKLARTQAVEYFGEWILNPTNYAFQRIHNNMFDPALIGDKPKWYAHQLQPIHYRVYDSNSQLAEALSVPPERDSDSEPTDDSGSDSMDYDDSSSSYSSLGDFVSEMMKCDINGDTPNVDPLTHAALGDASEVEIDELQNQKEAEEPGPDSENSQENPPLRSSSSTTASSSPSTVIHGANSEPADSTEMDDKAAVGVSKPLPSVPPSIGKSNVDRRQAEIGEGSVRRRIYDNPYFEPQYGFPPEEDEDEQGESYTPRFSQHVSGNRAQKLLRPNSLRLASDSDAESDSRASSPNSTVSNTSTEGFGGIMSFASSLYRNHSTSFSLSNLTLPTKGAREKATPFPSLKGNRRALVDQKSSVIKHSPTVKREPPSPQGRSSNSSENQQFLKEVVHSVLDGQGVGWLNMKKVRRLLESEQLRVFVLSKLNRMVQSEDDARQDIIPDVEISRKVYKGMLDLLKCTVLSLEQSYAHAGLGGMASIFGLLEIAQTHYYSKEPDKRKRSPTESVNTPVGKDPGLAGRGDPKAMAQLRVPQLGPRAPSATGKGPKELDTRSLKEENFIASIGPEVIKPVFDLGETEEKKSQISADSGVSLTSSSQRTDQDSVIGVSPAVMIRSSSQDSEVSTVSNSSGETLGADSDLSSNAGDGPGGEGSVHLASSRGTLSDSEIETNSATSTIFGKAHSLKPSIKEKLAGSPIRTSEDVSQRVYLYEGLLGKERSTLWDQMQFWEDAFLDAVMLEREGMGMDQGPQEMIDRYLSLGEHDRKRLEDDEDRLLATLLHNLISYMLLMKVNKNDIRKKVRRLMGKSHIGLVYSQQINEVLDQLANLNGRDLSIWSSGSRHMKKQTFVVHAGTDTNGDIFFMEVCDDCVVLRSNIGTVYERWWYEKLINMTYCPKTKVLCLWRRNGSETQLNKFYTKKCRELYYCVKDSMERAAARQQSIKPGPELGGEFPVQDLKTGEGGLLQVTLEGINLKFMHNQVFIELNHIKKCNTVRGVFVLEEFVPEIKEVVSHKYKTPMAHEICYSVLCLFSYVAAVHSSEEDLRTPPRPVSS

SEQ ID NO: 43477 - protein, 154 aa, Homo sapiens
MFLDSKEEGTSQAPNKDPTAAAAALNGGHCLAQPAAEPGLGAVVRSIKVSGYLNLLANTIDNFTHGLAVAASFLVSKKVRGLGPVGLWRFQWQPCGFHLCLESLLLAPPLPAPSSKALIPHPPCCCPGRHCSLILSPWSVPVPSTPCWVPLSSC

SEQ ID NO: 43478 - protein, 404 aa, Homo sapiens
MSTEEIIQRTRLLDSEIKIMKSEVLRVTHELQAMKDKIKENSEKIKVNKTLPYLVSNVIELLDVDPNDQEEDGANIDLDSQRKGKCAVIKTSTRQTYFLPVIGLVDAEKLKPGDLVGVNKDSYLILETLPTEYDSRVKAMEVDERPTEQYSDIGGLDKQIQELVEAIVLPMNHKEKFENLGIQPPKGVLMYGPPGTGKTLLARACAAQTKATFLKLAGPQLVQMFIGDGAKLVRDAFALAKEKAPSIIFIDELDAIGTKRFDSEKAGDREVQRTMLELLNQLDGFQPNTQVKVIAATNRVDILDPALLRSGRLDRKIEFPMPNEEARARIMQIHSRKMNVSPDVNYEELARCTDDFNGAQCKAVCVEAGMIALRRGATELTHEDYMEGILEVQAKKKANLQYYA

SEQ ID NO: 43479 - protein, 502 aa, Homo sapiens
MVDHCSLNSSPVSKKMNGTLDHPDQPDLDAIKMFVGQVPRTWSEKDLRELFEQYGAVYEINVLRDRSQNPPQSKGCCFVTFYTRKAALEAQNALHNMKVLPGMHHPIQMKPADSEKNNAVEDRKLFIGMISKKCTENDIRVMFSSFGQIEECRILRGPDGLSRGCAFVTFTTRAMAQTAIKAMHQAQTMEGCSSPMVVKFADTQKDKEQKRMAQQLQQQMQQISAASVWGNLAGLNTLGPQYLALYLQLLQQTASSGNLNTLSSLHPMGGLNAMQLQNLAALAAAASAAQNTPSGTNALTTSSSPLSVLTSSAGSSPSSSSSNSVNPIASLGALQTLAGATAGLNVGSLAGMAALNGGLGSSGLSNGTGSTMEALTQAYSGIQQYAAAALPTLYNQNLLTQQSIGAAGSQKEGPEGANLFIYHLPQEFGDQDLLQMFMPFGNVVSAKVFIDKQTNLSKCFGFVSYDNPVSAQAAIQSMNGFQIGMKRLKVQLKRSKNDSKPY

SEQ ID NO: 43480 - protein, 1402 aa, Homo sapiens
MAAAGALERSFVELSGAERERPRHFREFTVCSIGTANAVAGAVKYSESAGGFYYVESGKLFSVTRNRFIHWKTSGDTLELMEESLDINLLNNAIRLKFQNCSVLPGGVYVSETQNRVIILMLTNQTVHRLLLPHPSRMYRSELVVDSQMQSIFTDIGKVDFTDPCNYQLIPAVPGISPNSTASTAWLSSDGEALFALPCASGGIFVLKLPPYDIPGMVSVVELKQSSVMQRLLTGWMPTAIRGDQSPSDRPLSLAVHCVEHDAFIFALCQDHKLRMWSYKEQMCLMVADMLEYVPVKKDLRLTAGTGHKLRLAYSPTMGLYLGIYMHAPKRGQFCIFQLVSTESNRYSLDHISSLFTSQETLIDFALTSTDIWALWHDAENQTVVKYINFEHNVAGQWNPVFMQPLPEEEIVIRDDQDPREMYLQSLFTPGQFTNEALCKALQIFCRGTERNLDLSWSELKKEVTLAVENELQGSVTEYEFSQEEFRNLQQEFWCKFYACCLQYQEALSHPLALHLNPHTNMVCLLKKGYLSFLIPSSLVDHLYLLPYENLLTEDETTISDDVDIARDVICLIKCLRLIEESVTVDMSVIMEMSCYNLQSPEKAAEQILEDMITIDVENVMEDICSKLQEIRNPIHAIGLLIREMDYETEVEMEKGFNPAQPLNIRMNLTQLYGSNTAGYIVCRGVHKIASTRFLICRDLLILQQLLMRLGDAVIWGTGQLFQAQQDLLHRTAPLLLSYYLIKWGSECLATDVPLDTLESNLQHLSVLELTDSGALMANRFVSSPQTIVELFFQEVARKHIISHLFSQPKAPLSQTGLNWPEMITAITSYLLQLLWPSNPGCLFLECLMGNCQYVQLQDYIQLLHPWCQVNVGSCRFMLGRCYLVTGEGQKALECFCQAASEVGKEEFLDRLIRSEDGEIVSTPRLQYYDKVLRLLDVIGLPELVIQLATSAITEAGDDWKSQATLRTCIFKHHLDLGHNSQAYEALTQIPDSSRQLDCLRQLVVVLCERSQLQDLVEFPYVNLHNEVVGIIESRARAVDLMTHNYYELLYAFHIYRHNYRKAGTVMFEYGMRLGREVRTLRGLEKQGNCYLAALNCLRLIRPEYAWIVQPVSGAVYDRPGASPKRNHDGECTAAPTNRQIEILELEDLEKECSLARIRLTLAQHDPSAVAVAGSSSAEEMVTLLVQAGLFDTAISLCQTFKLPLTPVFEGLAFKCIKLQFGGEAAQAEAWAWLAANQLSSVITTKESSATDEAWRLLSTYLERYKVQNNLYHHCVINKLLSHGVPLPNWLINSYKKVDAAELLRLYLNYDLLEEAVDLVSEYVDAVLGKGHQYFGIEFPLSATAPMVWLPYSSIDQLLQALGENSANSHNIALSQKILDKLEDYQQKVDKATRDLLYRRTL

SEQ ID NO: 43481 - protein, 1392 aa, Homo sapiens
MSPGKPGAGGAGTRRTGWRRRRRRRRQEAATTVPGLGRTAGPDSRVRGTFQGARGMKPAAREARLPPRSPGLRWALPLLLLLLRLGQILCAGGTPSPIPDPSVATVATGENGITQISSTAESFHKQNGTGTPQVETNTSEDGESSGANDSLRTPEQGSNGTDGASQKTPSSTGPSPVFDIKAVSISPTNVILTWKSNDTAASEYKYVVKHKMENEKTITVVHQPWCNITGLRPATSYVFSITPGIGNETWGDPRVIKVITEPIPVSDLRVALTGVRKAALSWSNGNGTASCRVLLESIGSHEELTQDSRLQVNISGLKPGVQYNINPYLLQSNKTKGDPLGTEGGLDASNTERSRAGSPTAPVHDESLVGPVDPSSGQQSRDTEVLLVGLEPGTRYNATVYSQAANGTEGQPQAIEFRTNAIQVFDVTAVNISATSLTLIWKVSDNESSSNYTYKIHVAGETDSSNLNVSEPRAVIPGLRSSTFYNITVCPVLGDIEGTPGFLQVHTPPVPVSDFRVTVVSTTEIGLAWSSHDAESFQMHITQEGAGNSRVEITTNQSIIIGGLFPGTKYCFEIVPKGPNGTEGASRTVCNRTVPSAVFDIHVVYVTTTEMWLDWKSPDGASEYVYHLVIESKHGSNHTSTYDKAITLQGLIPGTLYNITISPEVDHVWGDPNSTAQYTRPSNVSNIDVSTNTTAATLSWQNFDDASPTYSYCLLIEKAGNSSNATQVVTDIGITDATVTELIPGSSYTVEIFAQVGDGIKSLEPGRKSFCTDPASMASFDCEVVPKEPALVLKWTCPPGANAGFELEVSSGAWNNATHLESCSSENGTEYRTEVTYLNFSTSYNISITTVSCGKMAAPTRNTCTTGITDPPPPDGSPNITSVSHNSVKVKFSGFEASHGPIKAYAVILTTGEAGHPSADVLKYTYEDFKKGASDTYVTYLIRTEEKGRSQSLSEVLKYEIDVGNESTTLGYYNGKLEPLGSYRACVAGFTNITFHPQNKGLIDGAESYVSFSRYSDAVSLPQDPGVICGAVFGCIFGALVIVTVGGFIFWRKKRKDAKNNEVSFSQIKPKKSKLIRVENFEAYFKKQQADSNCGFAEEYEDLKLVGISQPKYAAELAENRGKNRYNNVLPYDISRVKLSVQTHSTDDYINANYMPGYHSKKDFIATQGPLPNTLKDFWRMVWEKNVYAIIMLTKCVEQGRTKCEEYWPSKQAQDYGDITVAMTSEIVLPEWTIRDFTVKNIQTSESHPLRQFHFTSWPDHGVPDTTDLLINFRYLVRDYMKQSPPESPILVHCSAGVGRTGTFIAIDRLIYQIENENTVDVYGIVYDLRMHRPLMVQTEDQYVFLNQCVLDIVRSQKDSKVDLIYQNTTAMTIYENLAPVTTFGKTNGYIA

SEQ ID NO: 43482 - protein, 412 aa, Homo sapiens
MNNFMTFPTGYIFDRFKTTVARLIAIFFYTTATLIIAFTSAGSAVLLFLAMPMLTIGGILFLITNLQIGNLFGQHRSTIITLYNGAFDSSSAVFLIIKLLYEKGISLRASFIFISVCSTWHVARTFLLMPRGHIPYPLPPNYSYGLCPGNGTTKEEKETAEHENRELQSKEFLSAKEETPGAGQKQELRSFWSYAFSRRFAWHLVWLSVIQLWHYLFIGTLNSLLTNMAGGDMARVSTYTNAFAFTQFGVLCAPWNGLLMDRLKQKYQKEARKTGSSTLAVALCSTVPSLALTSLLCLGFALCASVPILPLQYLTFILQVISRSFLYGSNAAFLTLAFPSEHFGKLFGLVMALSAVVSLLQFPIFTLIKGSLQNDPFYVNVMFMLAILLTFFHPFLVYRECRTWKESPSAIA

SEQ ID NO: 43483 - protein, 73 aa, Homo sapiens
MADMYNRMTSACHRKCVPPHYKEAELSKGESVCLDRCVSKYLDIHERMGKKLTELSMQDEELMKRVQQSSGPA

SEQ ID NO: 43484 - protein, 149 aa, Homo sapiens [sequence omitted]

SEQ ID NO: 43485 - protein, 855 aa, Homo sapiens
MANGTLTRRHQDHSHLLYSTIPRMQEPGQIVETYTEEDPEGAMSVVSVETSDDGTTRRTETTVKKVVKTVTTRTVQPVAMGPDGLPVDASSVSNNYIQTLGRDFRKNGNGGPGPYVGQAGTATLPRNFHYPPDGYSRHYEDGYPGGSDNYGSLSRVTRIEERYRPSMEGYRAPSRQDVYGPQPQVRVGGSSVDLHRFHPEPYGLEDDQRSMGYDDLDYGMMSDYGTARRTGTPSDPRRRLRSYEDMIGEEVPSDQYYWAPLAQHERGSLASLDSLRKGGPPPPNWRQPELPEVIAMLGFRLDAVKSNAAAYLQHLCYRNDKVKTDVRKLKGIPVLVGLLDHPKKEVHLGACGALKNISFGRDQDNKIAIKNCDGVPALVRLLRKARDMDLTEVITGTLWNLSSHDSIKMEIVDHALHALTDEVIIPHSGWEREPNEDCKPRHIEWESVLTNTAGCLRNVSSERSEARRKLRECDGLVDALIFIVQAEIGQKDSDSKLVENCVCLLRNLSYQVHREIPQAERYQEAAPNVANNTGPHAASCFGAKKGKGKKPIEDPANDTVDFPKRTSPARGYELLFQPEVVRIYISLLKESKTPAILEASAGAIQNLCAGRWTYGRYIRSALRQEKALSAIADLLTNEHERVVKAASGALRNLAVDARNKELIGKHAIPNLVKNLPGGQQNSSWNFSEDTVISILNTINEVIAENLEAAKKLRETQGIEKLVLINKSGNRSEKEVRAAALVLQTIWGYKELRKPLEKEGWKKSDFQVNLNNASRSQSSHSYDDSTLPLIDRNQKSDKKPDREEIQMSNMGSNTKSLDNNYSTPNERGDHNRTLDRSGDLGDMEPLKGTTPLMQKI

SEQ ID NO: 43486 - protein, 834 aa, Homo sapiens
MANGTLTRRHQDHSHLLYSTIPRMQEPGQIVETYTEEDPEGAMSVVSVETSDDGTTRRTETTVKKVVKTVTTRTVQPVAMGPDGLPVDASSVSNNYIQTLGRDFRKNGNGGPGPYVGQAGTATLPRNFHYPPDGYSRHYEDGYPGGSDNYGSLSRVTRIEERYRPSMEGYRAPSRQDVYGPQPQVRVGGSSVDLHRFHPEPYGLEDDQRSMGYDDLDYGMMSDYGTARRTGTPSDPRRRLRSYEDMIGEEVPSDQYYWAPLAQHERGSLASLDSLRKGGPPPPNWRQPELPEVIAMLGFRLDAVKSNAAAYLQHLCYRNDKVKTDVRKLKGIPVLVGLLDHPKKEVHLGACGALKNISFGRDQDNKIAIKNCDGVPALVRLLRKARDMDLTEVITGTLWNLSSHDSIKMEIVDHALHALTDEVIIPHSGWEREPNEDCKPRHIEWESVLTNTAGCLRNVSSERSEARRKLRECDGLVDALIFIVQAEIGQKDSDSKLVENCVCLLRNLSYQVHREIPQAERYQEAAPNVANNTGPHAASCFGAKKGKGKKPIEDPANDTVDFPKRTSPARGYELLFQPEVVRIYISLLKESKTPAILEASAGAIQNLCAGRWTYGRYIRSALRQEKALSAIADLLTNEHERVVKAASGALRNLAVDARNKELIGKHAIPNLVKNLPGGQQNSSWNFSEDTVISILNTINEVIAENLEAAKKLRETQGIEKLVLINKSGNRSEKEVRAAALVLQTIWGYKELRKPLEKEGWKKSDFQVNLNNASRSQSSHSYDDSTLPLIDRNQKSDNNYSTPNERGDHNRTLDRSGDLGDMEPLKGTTPLMQKI

SEQ ID NO: 43487 - protein, 837 aa, Homo sapiens
MQEPGQIVETYTEEDPEGAMSVVSVETSDDGTTRRTETTVKKVVKTVTTRTVQPVAMGPDGLPVDASSVSNNYIQTLGRDFRKNGNGGPGPYVGQAGTATLPRNFHYPPDGYSRHYEDGYPGGSDNYGSLSRVTRIEERYRPSMEGYRAPSRQDVYGPQPQVRVGGSSVDLHRFHPEPYGLEDDQRSMGYDDLDYGMMSDYGTARRTGTPSDPRRRLRSYEDMIGEEVPSDQYYWAPLAQHERGSLASLDSLRKGGPPPPNWRQPELPEVIAMLGFRLDAVKSNAAAYLQHLCYRNDKVKTDVRKLKGIPVLVGLLDHPKKEVHLGACGALKNISFGRDQDNKIAIKNCDGVPALVRLLRKARDMDLTEVITGTLWNLSSHDSIKMEIVDHALHALTDEVIIPHSGWEREPNEDCKPRHIEWESVLTNTAGCLRNVSSERSEARRKLRECDGLVDALIFIVQAEIGQKDSDSKLVENCVCLLRNLSYQVHREIPQAERYQEAAPNVANNTGPHAASCFGAKKGKDEWFSRGKKPIEDPANDTVDFPKRTSPARGYELLFQPEVVRIYISLLKESKTPAILEASAGAIQNLCAGRWTYGRYIRSALRQEKALSAIADLLTNEHERVVKAASGALRNLAVDARNKELIGKHAIPNLVKNLPGGQQNSSWNFSEDTVISILNTINEVIAENLEAAKKLRETQGIEKLVLINKSGNRSEKEVRAAALVLQTIWGYKELRKPLEKEGWKKSDFQVNLNNASRSQSSHSYDDSTLPLIDRNQKSDKKPDREEIQMSNMGSNTKSLDNNYSTPNERGDHNRTLDRSGDLGDMEPLKGTTPLMKI

SEQ ID NO: 43488 - protein, 284 aa, Homo sapiens
MQAKVAVRADAGKKHLPDKQDHKASLDSMLGGLEQELQDLGIATVPKGHCASCQKPIAGKVIHALGQSWHPEHFVCTHCKEEIGSSPFFERSGLAYCPNDYHQLFSPRCAYCAAPILDKVLTAMNQTWHPEHFFCSHCGEVFGAEGFHEKDKKPYCRKDFLAMFSPKCGGCNRPVLENYLSAMDTVWHPECFVCGDCFTSFSTGSFFELDGRPFCELHYHHRRGTLCHGCGQPITGRCISAMGYKFHPEHFVCAFCLTQLSKGIFREQNDKTYCQPCFNKLFPL

SEQ ID NO: 43489 - protein, 31 aa, Homo sapiens
MSPSLLWTTLQASEATSATCQTSYRSKGLYL

SEQ ID NO: 43490 - protein, 152 aa, Homo sapiens [sequence omitted]

SEQ ID NO: 43491 - protein, 682 aa, Homo sapiens [sequence omitted]

SEQ ID NO: 43492 - protein, 335 aa, Homo sapiens
MRQTVVTTWVLHLALSDLLASASLPFFTYFLAVGHSWELGTTFCKLHSSIFFLNMFASGFLLSAISLDRCLQVVRPVWAQNHRTVAAAHKVCLVLWALAVLNTVPYFVFRDTISRLDGRIMCYYNVLLLNPGPDRDATCNSRQVALAVSKFLLAFLVPLAIIASSHAAVSLRLQHRGRRRPGRFVRLVAAVVAAFALCWGPYHVFSLLEARAHANPGLRPLVWRGLPFVTSLAFFNSVANPVLYVLTCPDMLRKLRRSLRTVLESVLVDDSELGGAGSSRRRRTSSTARSASPLALCSRPEEPRGPARLLGWLLGSCAASPQTGPLNRALSSTSS

SEQ ID NO: 43493 - protein, 895 aa, Homo sapiens
MGGGHCTLPLCSFGCGSGICIAPNVCSCQDGEQGATCPETHGPCGEYGCDLTCNHGGCQEVARVCPVGFSMTETAVGIRCTDIDECVTSSCEGHCVNTEGGFVCECGPGMQLSADRHSCQDTDECLGTPCQQRCKNSIGSYKCSCRTGFHLHGNRHSCVDVNECRRPLERRVCHHSCHNTVGSFLCTCRPGFRLRADRVSCEAFPKAVLAPSAILQPRQHPSKMLLLLPEAGRPALSPGHSPPSGAPGPPAGVRTTRLPSPTPRLPTSSPSAPVWLLSTLLATPVPTASLLGNLRPPSLLQGEVMGTPSSPRGPESPRLAAGPSPCWHLGAMHESRSRWTEPGCSQCWCEDGKVTCEKVRCEAACSHPIPSRDGGCCPSCTGCFHSGVVRAEGDVFSPPNENCTVCVCLAGNVSCISPECPSGPCQTPPQTDCCTCVPVRCYFHGRWYADGAVFSGGGDECTTCVCQNGEVECSFMPCPELACPREEWRLGPGQCCFTCQEPTPSTGCSLDDNGVEFPIGQIWSPGDPCELCICQADGSVSCKRTDCVDSCPHPIRIPGQCCPDCSAGCTYTGRIFYNNETFPSVLDPCLSCICLLGSVACSPVDCPITCTYPFHPDGECCPVCRDCNYEGRKVANGQVFTLDDEPCTRCTCQLGEVSCEKVPCQRACADPALLPGDCCSSCPDSLSPLEEKQGLSPHGNVAFSKAGRSLHGDTEAPVNCSSCPGPPTASPSRPVLHLLQLLLRTNLMKTQTLPTSPAGAHGPHSLALGLTATFPGEPGASPRLSPGPSTPPGAPTLPLASPGAPQPPPVTPERSFSASGAQIVSRWPPLPGTLLTEASALSMMDPSPSKTPITLLGPRVLSPTTSRLSTALAATTHPGPQQPPVGASRGEESTM

SEQ ID NO: 43494 - protein, 87 aa, Homo sapiens
MLLLYLGIEVIRLFFGTKGNLCQRKMPLSISVALTFPSAMMASYYLLLQTYVLRLEAIMNGILLFFCGSELLLEVLTLAAFSSMDRI

SEQ ID NO: 43495 - protein, 905 aa, Homo sapiens
MVVCNWVVILSVCITVLCVFDPTGRTFVKLRATKRRQRNLRTYNLRHRLEEGQATSWSRRLKVFLCCTRTKDSQSDAYSEIAYLFAEFFRDLDIVPSDIIAGLVLLRQRQRAKRNAVLDEANNDILAFLSGMPVTRNTKYLDLKNSQEMLRYKEVCYYMLFALAAYGWPMYLMRKPACGLCQLARSCSCCLCPARPRFAPGVTIEEDNCCGCNAIAIRRHFLDENMTAVDIVYTSCHDAVYETPFYVAVDHDKKKVVISIRGTLSPKDALTDLTGDAERLPVEGHHGTWLGHKGMVLSAEYIKKKLEQEMVLSQAFGRDLGRGTKHYGLIVVGHSLGAGTAAILSFLLRPQYPTLKCFAYSPPGGLLSEDAMEYSKEFVTAVVLGKDLVPRIGLSQLEGFRRQLLDVLQRSTKPKWRIIVGATKCIPKSELPEEVEVTTLASTRLWTHPSDLTIALSASTPLYPPGRIIHVVHNHPAEQCCCCEQEEPTYFAIWGDNKAFNEVIISPAMLHEHLPYVVMEGLNKVLENYNKGKTALLSAAKVMVSPTEVDLTPELIFQQQPLPTGPPMPTGLALELPTADHRNSSVRSKSQSEMSLEGFSEGRLLSPVVAAAARQDPVELLLLSTQERLAAELQARRAPLATMESLSDTESLYSFDSRRSSGFRSIRGSPSLHAVLERDEGHLFYIDPAIPEENPSLSSRTELLAADSLSKHSQDTQPLEAALGSGGVTPERPPSAAANDEEEEVGGGGGGPASRGELALHNGRLGDSPSPQVLEFAEFIDSLFNLDSKSSSFQDLYCMVVPESPTSDYAEGPKSPSQQEILLRAQFEPNLVPKPPRLFAGSADPSSGISLSPSFPLSSSGELMDLTPTGLSSQECLAADKIRTSTPTGHGASPAKQDELVISAR

SEQ ID NO: 43496 - protein, 322 aa, Homo sapiens [sequence omitted]

SEQ ID NO: 43497 - protein, 314 aa, Homo sapiens
MEIREKGSEFLKEELHRAQKELKLKDEECERLSKVREQLEQELEELTASLFEEAHKMVREANMKQAASEKQLKEARGKIDMLQAEVTALKTLVITSTPASPNRELHPQLLSPTKAGPRKGHSRHKSTSSTLCPAVCPAAGHTLTPDREGKEVDTILFAEFQAWRESPTLDKTCPFLERVYREDVGPCLDFTMQELSVLVRAAVEDNTLTIEPVASQTLPTVKVAEVDCSSTNTCALSGLTRTCRHRIRLGDSKSHYYISPSSRARITAVCNFFTYIRYIQQGLVRQDAEPMFWEIMRLRKEMSLAKLGFFPQEA

SEQ ID NO: 43498 - protein, 788 aa, Homo sapiens
MDKDKGVFAIVEMGDVGAREAVLSQSQHSLGGHRLRVRPREQKEFQSPASKSPKGAAPDSHQLAKALAEAADVGAQMIKLVGLRELSEAERQLRSLVVALMQEVFTEFFPGCVVHPFGSSINSFDVHGCDLDLFLDLGDLEEPQPVPKAPESPSLDSALASPLDPQALACTPASPPDSQPPASPQDSEALDFETPSSSLAPQTPDSALASETLASPQSLPPASPLLEDREEGDLGKASELAETPKEEKAEGAAMLELVGSILRGCVPGVYRVQTVPSARRPVVKFCHRPSGLHGDVSLSNRLALHNSRFLSLCSELDGRVRPLVYTLRCWAQGRGLSGSGPLLSNYALTLLVIYFLQTRDPPVLPTVSQLTQKAGEGEQVEVDGWDCSFPRDASRLEPSINVEPLSSLLAQFFSCVSCWDLRGSLLSLREGQALPVAGGLPSNLWEGLRLGPLNLQDPFDLSHNVAANVTSRVAGRLQNCCRAAANYCRSLQYQRRSSRGRDWGLLPLLQPSSPSSLLSATPIPLPLAPFTQLTAALVQVFREALGCHIEQATKRTRSEGGGTGESSQGGTSKRLKVDGQKNCCEEGKEEQQGCAGDGGEDRVEEMVIEVGEMVQDWAMQSPGQPGDLPLTTGKHGAPGEEGQPSHAALAERGPKGHEAAQEWSQGEAGKGASLPSSASWRCALWHRVWQGRRRARRRLQQQTKEGAGGGAGTRAGWLATEAQVTQELKGLSGGEERPETEPLLSFVASVSPADRMLTVTPLQDPQGLFPDLHHFLQVFLPQAIRHLK

SEQ ID NO: 43499 - protein, 868 aa, Homo sapiens
MGQLSSTYSGQHQRVPHATGALNELLQLWMGCRATRTLMDIYVQCLSALIGSCPDACVDALLDTSVQHSPHFDWVVAHIGSSFPGTIISRVLSCGLKDFCVHGGAGGGAGSSGGSSSQTPSTDPFPGSPAIPAEKRVPKIASVVGILGHLASRHGDSIRRELLRMFHDSLAGGSGGRSGDPSLQATVPFLLQLAVMSPALLGTVSGELVDCLKPPAVLSQLQQHLQGFPREELDNMLNLAVHLVSQASGAGAYRLLQFLVDTAMPASVITTQGLAVPDTVREACDRLIQLLLLHLQKLVHHRGGSPGEGVLGPPPPPRLVPFLDALKNHVGELCGETLRLERKRFLWQHQLLGLLSVYTRPSCGPEALGHLLSRARSPEELSLATQLYAGLVVSLSGLLPLAFRSCLARVHAGTLQPPFTARFLRNLALLVGWEQQGGEGPAALGAHFGESASAHLSDLAPLLLHPEEEVAEAAASLLAICPFPSEALSPSQLLGLVRAGVHRFFASLRLHGPPGVASACQLLTRLSQTSPAGLKAVLQLLVEGALHRGNTELFGGQVDGDNETLSVVSASLASASLLDTNRRHTAAVPGPGGIWSVFHAGVIGRGLKPPKFVQSRNQQEVIYNTQSLLSLLVHCCSAPGGTECGECWGAPILSPEAAKAVAVTLVESVCPDAAGAELAWPPEEHARATVERDLRIGRRFREQPLLFELLKLVAAAPPALCYCSVLLRGLLAALLGHWEASRHPDTTHSPWHLEASCTLVAVMAEGSLLPPALGNMHEVFSQLAPFEVRLLLLSVWGFLREHGPLPQKFIFQSERGRFIRDFSREGGGEGGPHLAVLHSVLHRNIDRLGLFSGRFQAPSPSTLLRQGT

SEQ ID NO: 43500 - protein, 156 aa, Homo sapiens
MLVGFLRTQHVWKPPTTVPSGTQQAPVFVEVALWNIPISCLLIALRELKKKLFKRRRVLNRERRLRHRVVGAVIDQGLITRHHLKKRASSARANITLSGKKRRKLLQQIRLAQKEKTAMEVEAPSKPARTSEPQLKRQKKTKAPQDVEMKDLEDES

SEQ ID NO: 43501 - protein, 187 aa, Homo sapiens
MYGQPYRVTLELELPESPVNQDLGMFLVTISCYTRGGRIISTSSRSVMLHYRSDLLQMLDTLVFSSLLLFGFAEQKQLLEVELYADYRENSYVPTTGAIIEIHSKRIQLYGAYLRIHAHFTGLRLTSEKETIPGRKSNEGSLLISQGLKARRSQLRNQMLQRMVRALKIPQGQRVSCPRRRNQISSP

SEQ ID NO: 43502 - protein, 25 aa, Homo sapiens
MTLFFKWLYPPSSSRDPPFSISRKM

SEQ ID NO: 43503 - protein, 559 aa, Homo sapiens
MSDAQDGPRVRYNPYTTRPNRRGDTWHDRDRIHVTVRRDRAPPERGGAGTSQDGTSKNWFKITIPYGRKYDKAWLLSMIQSKCSVPFTPIEFHYENTRAQFFVEDASTASALKAVNYKILDRENRRISIIINSSAPPHTILNELKPEQVEQLKLIMSKRYDGSQQALDLKGLRSDPDLVAQNIDVVLNRRSCMAATLRIIEENIPELLSLNLSNNRLYRLDDMSSIVQKAPNLKILNLSGNELKSERELDKIKGLKLEELWLDGNSLCDTFRDQSTYISAIRERFPKLLRLDGHELPPPIAFDVEAPTTLPPCKGSYFGTENLKSLVLHFLQQYYAIYDSGDRQGLLDAYHDGACCSLSIPFIPQNPARSSLAEYFKDSRNVKKLKDPTLRFRLLKHTRLNVVAFLNELPKTQHDVNSFVVDISAQTSTLLCFSVNGVFKEVDGKSRDSLRAFTRTFIAVPASNSGLCIVNDELFVRNASSEEIQRAFAMPAPTPSSSPVPTLSPEQQEMLQAFSTQSGMNLEWSQKCLQDNNWDYTRSAQAFTHLKAKGEIPEVAFMK

SEQ ID NO: 43504 - protein, 296 aa, Homo sapiens [sequence omitted]

SEQ ID NO: 43505 - protein, 153 aa, Homo sapiens
MTLTPGGNSVIVGNTHGQLAEIDLRQGRLLGCLKGLAGSVRGLQCHPSKPLLASCGLDRVLRIHRIQNPRGLEHKVYLKSQLNCLLLSGRDNWEDEPQEPQEPNKVPLEDTETDELWASLEAAAKRKLSGLEQPQGALQTRRRKKKRPGSTSP

SEQ ID NO: 43506 - protein, 47 aa, Homo sapiens
MFSPQELTGEGMGQDPSLCKASVTVMFQVFLMTVCLYLTEQLVAIYH

SEQ ID NO: 43507 - protein, 51 aa, Homo sapiens [sequence omitted]

SEQ ID NO: 43508 - protein, 112 aa, Homo sapiens
MSALTDKAIVKKELLYDVAGSDKYQVNNKHDDKYSPLPCSKIIQRAEELVGQEVLYKLTSENCEHFVNELRYGVARSDQVRDVIIAASVAGMGLAAMSLIGVMFSRNKRQKQ

SEQ ID NO: 43509 - protein, 552 aa, Homo sapiens
MVCGSSLATLKLSTIKRHIRQKHPYSLHWSPREKEVISNSWDAHLGLGACGEAEGLGVQGAEEEEEEEEEEEEEGAGVPACPPKGPGKAPAGGGCRRQRRGGPVAPRARRLRLSASRRAGGSRGLGARRLERRLKESLQNWFRAECLMDYDPRGNRLVCMACGRALPSLHLDDIRAHVLEVHPGSLGLSGPQRSALLQAWGGQPEALSELTQSPPGDDLAPQDLTGKSRDSASAAGAPSSQDLSPPDVKEEAGWVPERPGPAEEEEELEEGEGERAGVPGRSPRGRAHRRHPQERWRLEYLMELDGGRRGLVCGVCGGALASLKMSTIERHIRRRHPGSTRLGGPVQALIAREWSEKAAHLLALGPPRPESPQGPIPPGTAAASDEGGGDEEEEPEEEEEEWGDVPLSPGAPLERPAEEEEDEEDGQEPGGLALPPPPPPPPPPPPRSREQRRNYQPRWRGEYLMDYDGSRRGLVCMVCGGALATLKVSTIKRHILQVHPFSMDFTPEERQTILEAYEEAALRCYGHEGFGPPAPAPRDGGADLKSGAVCRA

SEQ ID NO: 43510 - protein, 686 aa, Homo sapiens
MIRGRNSATSADEQPHIGNYRLLKTIGKGNFAKVKLARHILTGKEVAVKIIDKTQLNSSSLQKLFREVRIMKVLNHPNIVKLFEVIETEKTLYLVMEYASGGEVFDYLVAHGRMKEKEARAKFRQIVSAVQYCHQKFIVHRDLKAENLLLDADMNIKIADFGFSNEFTFGNKLDTFCGSPPYAAPELFQGKKYDGPEVDVWSLGVILYTLVSGSLPFDGQNLKELRERVLRGKYRIPFYMSTDCENLLKKFLILNPSKRGTLEQIMKDRWMNVGHEDDELKPYVEPLPDYKDPRRTELMVSMGYTREEIQDSLVGQRYNEVMATYLLLGYKSSELEGDTITLKPRPSADLTNSSAPSPSHKVQRSVSANPKQRRFSDQAAGPAIPTSNSYSKKTQSNNAENKRPEEDRESGRKASSTAKVPASPLPGLERKKTTPTPSTNSVLSTSTNRSRNSPLLERASLGQASIQNGKDSTAPQRVPVASPSAHNISSSGGAPDRTNFPRGVSSRSTFHAGQLRQVRDQQNLPYGVTPASPSGHSQGRRGASGSIFSKFTSKFVRRNLSFRFARRPHVVGSGGNDKEKEEFREAKPRSLRFTWSMKTTSSMEPNEMMREIRKVLDANSCQSELHEKYMLLCMHGTPGHEDFVQWEMEVCKLPRLSLNGVRFKRISGTSMAFKNIASKIANELKL

SEQ ID NO: 43511 - protein, 479 aa, Homo sapiens
MIRVGTNYQAVIPECKPESPARYSNKELKGMLVWSPNHCVSDAKLDKYIAMAKEKHGYNIEQALGMLLWHKHDVEKSLADLANFTPFPDEWTVEDKVLFEQAFGFHGKCFQRIQQMLPDKLIPSLVKYYYSWKKTRSRTSVMDRQARRLGGRKDKEDSDELEEGRGGVSEGEPDPADPKREPLPSRPLNARPGPGKKEVQVSQYRHHPLRTRRRPPKGMYLSPEGLTAVSGSPDLANLTLRGLDSQLISLKRQVQSMKQTNSSLRQALEGGIDPLRPPEANTKFNSRWTTDEQLLAVQAIRRYGKDFGAIAEVIGNKTLTQVKTFFVSYRRRFNLEEVLQEWEAEQDGAPGAPVPMEEARRGAPLPAPALEEDDEVQITSVSTSVPRSVPPAPPPPPPPTSLSQPPPLLRPPLPTAPTLLRQPPPLQQGRFLQPRLAPNQPPPPLIRPALAAPRHSARPGPQPPPTLIGTPLEPPAPSL

SEQ ID NO: 43512 - protein, 243 aa, Homo sapiens [sequence omitted]

SEQ ID NO: 43513 - protein, 106 aa, Homo sapiens
MAAKVDLSTSTDWKEAKSFLKGLSDKQREEHYFCKDFVRLKKIPTWKEMAKGVAVKVEEPRYKKDKQLNEKISLLRSDITKLEVDAIVNADSHSQEDPVPAWNPRE

SEQ ID NO: 43514 - protein, 56 aa, Homo sapiens
MEALGLWRSGVATAPTPRGRRTTKGWGRSPAPFGAARARRPPTSGQHSAMAASSGG

SEQ ID NO: 43515 - protein, 284 aa, Homo sapiens
MNLYFAQVVFKAKVKRRPEMSRGLLAVRGAFVGASLLFLLVNVLCAVLSHRRRAQPWALLLVRVLVSDSLFVICALSLAACLCLVARRAPSTSIYLEAKGTSVCQAAAMGGAMVLLYASRACYNLTALALAPQSRLDTFDYDWYNVSDQADLVNDLGNKGYLVFGLILFVWELLPTTLLVGFFRVHRPPQDLSTSHILNGQVFASRSYFFDRAGHCEDEGCSWEHSRGESTSMSGSLGSGSWYGAIGREPGWYGGSQTKTTPLLFSQVPGPGGHHHSLYSTPQT

SEQ ID NO: 43516 - protein, 279 aa, Homo sapiens
MLKEGVRLDRVRGGRQKYKRRPEVDPLPFPGPFPAGPLAVAGGPRKTAPVNALVSHLLVVEPEKLYAMPDPAGPDGHLPAVATLCDLFDREIVVTISWAKSIPGFSSLSLSDQMSVLQSVWMEVLVLGVAQRSLPLQDELAFAEDLVLDEEGARAAGLGELGAALLQLVRRLQALRLEREEYVLLKALALANSDSVHIEDAEAVEQLREALHEALLEYEAGRAGPGGGAERRRAGRLLLTLPLLRQTAGKVLAHFYGVKLEGKVPMHKLFLEMLEAMMD

SEQ ID NO: 43517 - protein, 1784 aa, Homo sapiens
MFAQTIETVLRRIKVTFLDTVVRVEHSPGDGERGVAVEVRVQRLEYCDEAVRDPSQAPPVDVHQPPAFLHKLLQLAGVRLHYEELPAQEEPPEPPLQIGSCSGYMELMVKLKQNEAFPGPKLEVAGQLGSLHLLLTPRQLQQLQELLSAVSLTDHEGLADKLNKSRPLGAEDLWLIEQDLNQQLQAGAVAEPLSPDPLTNPLLNLDNTDLFFSMAGLTSSVASALSELSLSDVDLASSVRSDMASRRLSAQAHPAGKMAPNPLLDTMRPDSLLKMTLGGVTLTLLQTSAPSSGPPDLATHFFTEFDATKDGPFGSRDFHHLRPRFQRACPCSHVRLTGTAVQLSWELRTGSRGRRTTSMEVHFGQLEVLECLWPRGTSEPEYTEILTFPGTLGSQASARPCAHLRHTQILRRVPKSRPRRSVACHCHSELALDLANFQADVELGALDRLAALLRLATVPAEPPAGLLTEPLPAMEQQTVFRLSAPRATLRLRFPIADLRPEPDPWAGQAVRAEQLRLELSEPQFRSELSSGPGPPVPTHLELTCSDLHGIYEDGGKPPVPCLRVSKALDPKSTGRKYFLPQVVVTVNPQSSSTQWEVAPEKGEELELSVESPCELREPEPSPFSSKRTMYETEEMVIPGDPEEMRTFQSRTLALSRCSLEVILPSVHIFLPSKEVYESIYNRINNDLLMWEPADLLPTPDPAAQPSGFPGPSGFWHDSFKMCKSAFKLANCFDLTPDSDSDDEDAHFFSVGASGGPQAAAPEAPSLHLQSTFSTLVTVLKGRITALCETKDEGGKRLEAVHGELVLDMEHGTLFSVSQYCGQPGLGYFCLEAEKATLYHRAAVDDYPLPSHLDLPSFAPPAQLAPTIYPSEEGVTERGASGRKGQGRGPHMLSTAVRIHLDPHKNVKEFLVTLRLHKATLRHYMALPEQSWHSQLLEFLDVLDDPVLGYLPPTVITILHTHLFSCSVDYRPLYLPVRVLITAETFTLSSNIIMDTSTFLLRFILDDSALYLSDKCEVETLDLRRDYVCVLDVDLLELVIKTWKGSTEGKLSQPLFELRCSNNVVHVHSCADSCALLVNLLQYVMSTGDLHPPPRPPSPTEIAGQKLSESPASLPSCPPVETALINQRDLADALLDTERSLRELAQPSGGHLPQASPISVYLFPGERSGAPPPSPPVGGPAGSLGSCSEEKEDEREEEGDGDTLDSDEFCILDAPGLGIPPRDGEPVVTQLHPGPIVVRDGYFSRPIGSTDLLRAPAHFPVPSTRVVLREVSLVWHLYGGRDFGPHPGHRARTGLSGPRSSPSRCSGPNRPQNSWRTQGGSGRQHHVLMEIQLSKVSFQHEVYPAEPATGPAAPSQELEERPLSRQVFIVQELEVRDRLASSQINKFLYLHTSERMPRRAHSNMLTIKALHVAPTTNLGGPECCLRVSLMPLRLNVDQDALFFLKDFFTSLVAGINPVVPGETSAEARPETRAQPSSPLEGQAEGVETTGSQEAPGGGHSPSPPDQQPIYFREFRFTSEVPIWLDYHGKHVTMDQVGTFAGLLIGLAQLNCSELKLKRLCCRHGLLGVDKVLGYALNEWLQDIRKNQLPGLLGGVGPMHSVVQLFQGFRDLLWLPIEQYRKDGRLMRGLQRGAASFGSSTASAALELSNRLVQAIQATAETVYDILSPAAPVSRSLQDKRSARRLRRGQQPADLREGVAKAYDTVREGILDTAQTICDVASRGHEQKGLTGAVGGVIRQLPPTVVKPLILATEATSSLLGGMRNQIVPDAHKDHALKWRSDSAQD

SEQ ID NO: 43518 - protein, 290 aa, Homo sapiens [sequence omitted]

SEQ ID NO: 43519 - protein, 574 aa, Homo sapiens
MAVLYIQAFVLVFLLGKVMGKVFFGQLRAAEMEHLLERSWYAVTETCLAFTVFRDDFSPRFVALFTLLLFLKCFHWLAEDRVDFMERSPNISWLFHCRIVSLMFLLGILDFLFVSHAYHSILTRGASVQLVFGFEYAILMTMVLTIFIKYVLHSVDLQSENPWDNKAVYMLYTELFTGFIKVLLYMAFMTIMIKVHTFPLFAIRPMYLAMRQFKKAVTDAIMSRRAIRNMNTLYPDATPEELQAMDNVCIICREEMVTGAKRLPCNHIFHTSCLRSWFQRQQTCPTCRMDVLRASLPAQSPPPPEPADQGPPPAPHPPPLLPQPPNFPQGLLPPFPPGMFPLWPPMGPFPPVPPPPSSGEAVAPPSTSAALSRPSGAATTTAAGTSATAASATASGPGSGSAPEAGPAPGFPFPPPWMGMPLPPPFAFPPMPVPPAGFAGLTPEELRALEGHERQHLEARLQSLRNIHTLLDAAMLQINQYLTVLASLGPPRPATSVNSTEETATTVVAAASSTSIPSSEATTPTPGASPPAPEMERPPAPESVGTEEMPEDGEPDAAELRRRRLQKLESPVAH

SEQ ID NO: 43520 - protein, 575 aa, Homo sapiens
MAVLYIQAFVLVFLLGKVMGKVFFGQLRAAEMEHLLERSWYAVTETCLAFTVFRDDFSPRFVALFTLLLFLKCFHWLAEDRVDFMERSPNISWLFHCRIVSLMFLLGILDFLFVSHAYHSILTRGASVQLVFGFEYAILMTMVLTIFIKYVLHSVDLQSENPWDNKAVYMLYTELFTGFIKVLLYMAFMTIMIKVHTFPLFAIRPMYLAMRQFKKAVTDAIMSRRAIRNMNTLYPDATPEELQAMDNVCIICREEMVTGAKRLPCNHIFHTSCLRSWFQRQQTCPTCRMDVLRASLPAQSPPPPEPADQGPPPAPHPPPLLPQPPNFPQGLLPPFPPGMFPLWPPMGPFPPVPPPPSSGEAVAPPSTSAAALSRPSGAATTTAAGTSATAASATASGPGSGSAPEAGPAPGFPFPPPWMGMPLPPPFAFPPMPVPPAGFAGLTPEELRALEGHERQHLEARLQSLRNIHTLLDAAMLQINQYLTVLASLGPPRPATSVNSTEETATTVVAAASSTSIPSSEATTPTPGASPPAPEMERPPAPESVGTEEMPEDGEPDAAELRRRRLQKLESPVAH

SEQ ID NO: 43521 - protein, 295 aa, Homo sapiens
MEGINTTGRKLVATKLYEGVPLPFYQPTEEDADFEQSMVLVACGPYTTSDSITYDPLLDLIAVINHDRPDVCILFGPFLDAKHEQVENCLLTSPFEDIFKQCLRTIIEGTRSSGSHLVFVPSLRDVHHEPVYPQPPFSYSDLSREDKKQVQFVSEPCSLSINGVIFGLTSTDLLFHLGAEEISSSSGTSDRFSRILKHILTQRSYYPLYPPQEDMAIDYESFYVYAQLPVTPDVLIIPSELRYFVKDVLGCVCVNPGRLTKGQVGGTFARLYLRRPAADGAERQSPCIAVQVVRI

SEQ ID NO: 43522 - protein, 278 aa, Homo sapiens
MEGINTTGRKLVATKLYEGVPLPFYQPTEEDADFEQSMVLVACGPYTTSDSITYDPLLDLIAVINHDRPDVCILFGPFLDAKHEQVENCLLTSPFEDIFKQCLRTIIEGTRSSGSHLVFVPSLRDVHHEPVYPQPPFSYSDLSREDKKQVQFVSEPCSLSINGVIFGLTSTDLLFHLGAEEISSSSGTSDRFSRILKHILTQRSYYPLYPPQEDMAIDYESFYVYAQLPVTPDVLIIPSELRYFVKDRILHRPVPMQLHNMHMCQSREAAPQPWTGDK

SEQ ID NO: 43523 - protein, 1289 aa, Homo sapiens
MRGAGAAGLLALLLLLLLLLLGLGGRVEGGPAGERGAGGGGALARERFKVVFAPVICKRTCLKGQCRDSCQQGSNMTLIGENGHSTDTLTGSGFRVVVCPLPCMNGGQCSSRNQCLCPPDFTGRFCQVPAGGAGGGTGGSGPGLSRTGALSTGALPPLAPEGDSVASKHAIYAVQVIADPPGPGEGPPAQHAAFLVPLGPGQISAEVQAPPPVVNVRVHHPPEASVQVHRIESSNAESAAPSQHLLPHPKPSHPRPPTQKPLGRCFQDTLPKQPCGSNPLPGLTKQEDCCGSIGTAWGQSKCHKCPQLQYTGVQKPGPVRGEVGADCPQGYKRLNSTHCQDINECAMPGVCRHGDCLNNPGSYRCVCPPGHSLGPSRTQCIADKPEEKSLCFRLVSPEHQCQHPLTTRLTRQLCCCSVGKAWGARCQRCPTDGTAAFKEICPAGKGYHILTSHQTLTIQGESDFSLFLHPDGPPKPQQLPESPSQAPPPEDTEEERGVTTDSPVSEERSVQQSHPTATTTPARPYPELISRPSPPTMRWFLPDLPPSRSAVEIAPTQVTETDECRLNQNICGHGECVPGPPDYSCHCNPGYRSHPQHRYCVDVNECEAEPCGPGRGICMNTGGSYNCHCNRGYRLHVGAGGRSCVDLNECAKPHLCGDGGFCINFPGHYKCNCYPGYRLKASRPPVCEDIDECRDPSSCPDGKCENKPGSFKCIACQPGYRSQGGGACRDVNECAEGSPCSPGWCENLPGSFRCTCAQGYAPAPDGRSCLDVDECEAGDVCDNGICSNTPGSFQCQCLSGYHLSRDRSHCEDIDECDFPAACIGGDCINTNGSYRCLCPQGHRLVGGRKCQDIDECSQDPSLCLPHGACKNLQGSYVCVCDEGFTPTQDQHGCEEVEQPHHKKECYLNFDDTVFCDSVLATNVTQQECCCSLGAGWGDHCEIYPCPVYSSAEFHSLCPDGKGYTQDNNIVNYGIPAHRDIDECMLFGSEICKEGKCVNTQPGYECYCKQGFYYDGNLLECVDVDECLDESNCRNGVCENTRGGYRCACTPPAEYSPAQRQCLSPEEMDVDECQDPAACRPGRCVNLPGSYRCECRPPWVPGPSGRDCQLPESPAERAPERRDVCWSQRGEDGMCAGPLAGPALTFDDCCCRQGRGWGAQCRPCPPRGAGSHCPTSQSESNSFWDTSPLLLGKPPRDEDSSEEDSDECRCVSGRCVPRPGGAVCECPGGFQLDASRARCVDIDECRELNQRGLLCKSERCVNTSGSFRCVCKAGFARSRPHGACVPQRRR

SEQ ID NO: 43524 - protein, 1242 aa, Homo sapiens
MRGAGAAGLLALLLLLLLLLLGLGGRVEGGPAGERGAGGGGALARERFKVVFAPVICKRTCLKGQCRDSCQQGSNMTLIGENGHSTDTLTGSGFRVVVCPLPCMNGGQCSSRNQCLCPPDFTGRFCQVPAGGAGGGTGGSGPGLSRTGALSTGALPPLAPEGDSVASKHAIYAVQVIADPPGPGEGPPAQHAAFLVPLGPGQISAEVQAPPPVVNVRVHHPPEASVQVHRIESSNAESAAPSQHLLPHPKPSHPRPPTQKPLGRCFQDTLPKQPCGSNPLPGLTKQEDCCGSIGTAWGQSKCHKCPQLQYTGVQKPGPVRGEVGADCPQGYKRLNSTHCQDINECAMPGVCRHGDCLNNPGSYRCVCPPGHSLGPSRTQCIADKPEEKSLCFRLVSPEHQCQHPLTTRLTRQLCCCSVGKAWGARCQRCPTDGTAAFKEICPAGKGYHILTSHQTLTIQGESDFSLFLHPDGPPKPQQLPESPSQAPPPEDTEEERGVTTDSPVSEERSVQQSHPTATTTPARPYPELISRPSPPTMRWFLPDLPPSRSAVEIAPTQVTETDECRLNQNICGHGECVPGPPDYSCHCNPGYRSHPQHRYCVDVNECEAEPCGPGRGICMNTGGSYNCHCNRGYRLHVGAGGRSCVDLNECAKPHLCGDGGFCINFPGHYKCNCYPGYRLKASRPPVCEDIDECRDPSSCPDGKCENKPGSFKCIACQPGYRSQGGGACRDVNECAEGSPCSPGWCENLPGSFRCTCAQGYAPAPDGRSCLDVDECEAGDVCDNGICSNTPGSFQCQCLSGYHLSRDRSHCEDIDECDFPAACIGGDCINTNGSYRCLCPQGHRLVGGRKCQDIDECSQDPSLCLPHGACKNLQGSYVCVCDEGFTPTQDQHGCEEVEQPHHKKECYLNFDDTVFCDSVLATNVTQQECCCSLGAGWGDHCEIYPCPVYSSAEFHSLCPDGKGYTQDNNIVNYGIPAHRDIDECMLFGSEICKEGKCVNTQPGYECYCKQGFYYDGNLLECVDVDECLDESNCRNGVCENTRGGYRCACTPPAEYSPAQRQCLSPEEMERAPERRDVCWSQRGEDGMCAGPLAGPALTFDDCCCRQGRGWGAQCRPCPPRGAGSHCPTSQSESNSFWDTSPLLLGKPPRDEDSSEEDSDECRCVSGRCVPRPGGAVCECPGGFQLDASRARCVDIDECRELNQRGLLCKSERCVNTSGSFRCVCKAGFARSRPHGACVPQRRR

SEQ ID NO: 43525 - protein, 33 aa, Homo sapiens
MRPSPRRVRPTEHAHVGRRCGEPSAGHGPCVHR

SEQ ID NO: 43526 - protein, 809 aa, Homo sapiens
MDESLGPVAVSLRREEKEGSGGGTLHSYRVIVRTTQLRTLRGTISEDALPPGPPRGLSPRKLLEHVAPQLSPSCLRLGSASPKVPRTLLTLDEQVLSFQRKVGILYCRAGQGSEEEMYNNQEAGPAFMQFLTLLGDVVRLKGFESYRAQLDTKTDSTGTHSLYTTYQDHEIMFHVSTMLPYTPNNQQQLLRKRHIGNDIVTIVFQEPGSKPFCPTTIRSHFQHVFLVVRAHTPCTPHTTYRVAVSRTQDTPAFGPALPAGGGPFAANADFRAFLLAKALNGEQAAGHARQFHAMATRTRQQYLQDLATNEVTTTSLDSASRFGLPSLGGRRRAAPRGPGAELQAAGSLVWGVRAAPGARVAAGAQASGPEGIEVPCLLGISAEALVLVAPRDGRVVFNCACRDVLAWTFSEQQLDLYHGRGEAITLRFDGSPGQAVGEVVARLQLVSRGCETRELALPRDGQGRLGFEVDAEGFVTHVERFTFAETAGLRPGARLLRVCGQTLPSLRPEAAAQLLRSAPKVCVTVLPPDESGRPRRSFSELYTLSLQEPSRRGAPDPVQDEVQGVTLLPTTKQLLHLCLQDGGSPPGPGDLAEERTEFLHSQNSLSPRSSLSDEAPVLPNTTPDLLLATTAKPSVPSADSETPLTQDRPGSPSGSEDKGNPAPELRASFLPRTLSLRNSISRIMSEAGSGTLEDEWQAISEIASTCNTILESLSREGQPIPESGDPKGTPKSDAEPEPGNLSEKVSHLESMLRKLQEDLQKEKADRAALEEEVRSLRHNNRRLQAESESAATRLLLASKQLGSPTADLA

SEQ ID NO: 43527 - protein, 498 aa, Homo sapiens
MSGPLYFGQINGYTGPGTVRISLVTKDPPHRPHPHELVGKDCRDGFYEAELCPDRCIHSFQNLGIQCVKKRDLEQAISQRIQTNNNPFQVPIEEQRGDYDLNAVRLCFQVTVRDPSGRPLRLPPVLSHPIFDNRAPNTAELKICRVNRNSGSCLGGDEIFLLCDKVQKEDIEVYFTGPGWEARGSFSQADVHRQVAIVFRTPPYADPSLQAPVRVSMQLRRPSDRELSEPMEFQYLPDTDDRHRIEEKRKRTYETFKSIMKKSPFSGPTDPRPPPRRIAVPSRSSASVPKPAPQPYPFTSSLSTINYDEFPTMVFPSGQISQASALAPAPPQVLPQAPAPAPAPAMVSALAQAPAPVPVLAPGPPQAVAPPAPKPTQAGEGTLSEALLQLQFDDEDLGALLGNSTDPAVFTDLASVDNSEFQQLLNQGIPVAPHTTEPMLMEYPEAITRLVTGAQRPPDPAPAPLGAPGLPNGLLSGDEDFSSIADMDFSALLSQISS

SEQ ID NO: 43528 - protein, 235 aa, Homo sapiens [sequence omitted]

SEQ ID NO: 43529 - protein, 151 aa, Homo sapiens
MPGSEPPLLWRRFSPEVLGLCASTALVWVVMEVLALLLGLYLATVRSDLSTFHLLAYSGYKYVGMILSVLTGLLFGSDGYYVALAWTSSALMYFIVSLVHPPIPLPSLEGKPPPPGQASVLLSSRCALCGQQPWAPTAWGAPSPGSVSSST

SEQ ID NO: 43530 - protein, 392 aa, Homo sapiens
MLQLLYLSLLSGLHGQEEQDQYFEFFPPSPRSVDQVKAQLRTALASGGVLDASGDYRVYRGLLKTTMDPNDVILATHASVDNLLHLSGLLERWEGPLSVSVFAATKEEAQLATVLAYALSSHCPDMRARVAMHLVCPSRYEAAVPDPREPGEFALLRSCQEVFDKLARVAQPGINYALGTNVSYPNNLLRNLAREGANYALVIDVDMVPSEGLWRGLREMLDQSNQWGGTALVVPAFEIRRARRMPMNKNELVQLYQVGEVRPFYYGLCTPCQAPTNYSRWVNLPEESLLRPAYVVPWQDPWEPFYVAGGKVPTFDERFRQYGFNRISQACELHVAGFDFEVLNEGFLVHKGFKEALKFHPQKEAENQHNKILYRQFKQELKAKYPNSPRRC

SEQ ID NO: 43531 - protein, 326 aa, Homo sapiens
MASVCFINSFSAVLQGSLFGQLGTMPSTYSTLFLSGQGLAGIFAALAMLLSMASGVDAETSALGYFITPCVGILMSIVCYLSLPHLKFARYYLANKSSQAQAQELETKAELLQSDENGIPSSPQKVALTLDLDLEKEPESEPDEPQKPGKPSVFTVFQKIWLTALCLVLVFTVTLSVFPAITAMVTSSTSPGKWSQFFNPICCFLLFNIMDWLGRSLTSYFLWPDEDSRLLPLLVCLRFLFVPLFMLCHVPQRSRLPILFPQDAYFITFMLLFAVSNGYLVSLTMCLAPRQVLPHEREVAGALMTFFLALGLSCGASLSFLFKALL

SEQ ID NO: 43532 - protein, 163 aa, Homo sapiens [sequence omitted]

SEQ ID NO: 43533 - protein, 1138 aa, Homo sapiens [sequence omitted]

SEQ ID NO: 43534 - protein, 176 aa, Homo sapiens
MVFADGAFPESYTPTVFERYMVNLQVKGKPVHLHIWDTAGQDDYDRLRPLFYPDASVLLLCFDVTSPNSFDNIFNRWYPEVNHFCKKVPIIVVGCKTDLRKDKSLVNKLRRNGLEPVTYHRGQEMARSVGAVAYLECSARLHDNVHAVFQEAAEVALSSRGRNFWRRITQGFCVVT

SEQ ID NO: 43535 - protein, 79 aa, Homo sapiens [sequence omitted]

SEQ ID NO: 43536 - protein, 28 aa, Homo sapiens
MGRKRLITDSYPGRSPSPATRRKRSWSC

SEQ ID NO: 43537 - protein, 271 aa, Homo sapiens
MELIIGKKFKLPVWETIVCTMREGEIAQFLCDIKHVVLYPLVAKSLRNIAVGKDPLEGQRHCCGVAQMREHSSLGHADLDALQQNPQPLIFHMEMLKVESPGTYQQDPWAMTDEEKAKAVPLIHQEGNRLYREGHVKEAAAKYYDAIACLKNLQMKEQPGSPEWIQLDQQITPLLLNYCQCKLVVEEYYEVLDHCSSILNKYDDNVKAYFKRGKAHAAVWNAQEAQADFAKVLELDPALAPVVSRELRALEARIRQKDEEDKARFRGIFSH

SEQ ID NO: 43538 - protein, 814 aa, Homo sapiens
MSAKELCENDDLATSLVLDPYLGFQTHKMNTSAFPSRSSRHFSKSDSFSHNNPVRFRPIKGRQEELKEVIERFKKDEHLEKAFKCLTSGEWARHYFLNKNKMQEKLFKEHVFIYLRMFATDSGFEILPCNRYSSEQNGAKIVATKEWKRNDKIELLVGCIAELSEIEENMLLRHGENDFSVMYSTRKNCAQLWLGPAAFINHDCRPNCKFVSTGRDTACVKALRDIEPGEEISCYYGDGFFGENNEFCECYTCERRGTGAFKSRVGLPAPAPVINSKYGLRETDKRLNRLKKLGDSSKNSDSQSVSSNTDADTTQEKNNATSNRKSSVGVKKNSKSRTLTRQSMSRIPASSNSTSSKLTHINNSRVPKKLKKPAKPLLSKIKLRNHCKRLEQKNASRKLEMGNLVLKEPKVVLYKNLPIKKDKEPEGPAQAAVASGCLTRHAAREHRQNPVRGAHSQGESSPCTYITRRSVRTRTNLKEASDIKLEPNTLNGYKSSVTEPCPDSGEQLQPAPVLQEEELAHETAQKGEAKCHKSDTGMSKKKSRQGKLVKQFAKIEESTPVHDSPGKDDAVPDLMGPHSDQGEHSGTVGVPVSYTDCAPSPVGCSVVTSDSFKTKDSFRTAKSKKKRRITRYDAQLILENNSGIPKLTLRRRHDSSSKTNDQENDGMNSSKISIKLSKDHDNDNNLYVAKLNNGFNSGSGSSSTKLKIQLKRDEENRGSYTEGLHENGVCCSDPLSLLESRMEVDDYSQYEEESTDDSSSSEGDEEEDDYDDDFEDDFIPLPPAKRLRLIVGKDSIDIDISSRRREDQSLRLNA

SEQ ID NO: 43539 - protein, 304 aa, Homo sapiens
MLPPPAVMNYIFLLLCLCGLVGNGLVLWFFGFSIKRNPFSIYFLHLASADVGYLFSKAVFSILNTGGFLGTFADYIRSVCRVLGLCMFLTGVSLLPAVSAERCASVIFPAWYWRRRPKRLSAVVCALLWVLSLLVTCLHNYFCVFLGRGAPGAACRHMDIFLGILLFLLCCPLMVLPCLALILHVECRARRRQRSAKLNHVILAMVSVFLVSSIYLGIDWFLFWVFQIPAPFPEYVTDLCICINSSAKPIVYFLAGRDKSQRLWEPLRVVFQRALRDGAELGEAGGSTPNTVTMEMQCPPGNAS

SEQ ID NO: 43540 - protein, 628 aa, Homo sapiens
MWLYRRYYSNVCQRTLSFTIFLILFLAFIETPSSLTSTADVRYRAAPWEPPCGLTESVEVLCLLVFAADLSVKGYLFGWAHFQKNLWLLGYLVVLVVSLVDWTVSLSLVCHEPLRIRRLLRPFFLLQNSSMMKKTLKCIRWSLPEMASVGLLLAIHLCLFTMFGMLLFAGGKQDDGQDRERLTYFQNLPESLTSLLVLLTTANNPDVMIPAYSKNRAYAIFFIVFTVIGSLFLMNLLTAIIYSQFRGYLMKSLQTSLFRRRLGTRAAFEVLSSMVGEGGAFPQAVGVKPQNLLQVLQKVQLDSSHKQAMMEKVRSYGSVLLSAEEFQKLFNELDRSVVKEHPPRPEYQSPFLQSAQFLFGHYYFDYLGNLIALANLVSICVFLVLDADVLPAERDDFILGILNCVFIVYYLLEMLLKVFALGLRGYLSYPSNVFDGLLTVVLLVLEISTLAVYRLPHPGWRPEMVGLLSLWDMTRMLNMLIVFRFLRIIPSMKLMAVVASTVLGLVQNMRAFGGILVVVYYVFAIIGINLFRGVIVALPGNSSLAPANGSAPCGSFEQLEYWANNFDDFAAALVTLWNLMVVNNWQVFLDAYRRYSGPDPGGSHVESPEQHQLLTMLLTVVDRLSMPR

SEQ ID NO: 43541 - protein, 1160 aa, Homo sapiens
MLEERDRLLDTLRETQETLALTQGKLHEVGHERDSLQRQLNTALPQEFAALTKELNVCREQLLEREEEIAELKAERNNTRLLLEHLECLVSRHERSLRMTVVKRQAQSPAGVSSEVEVLKALKSLFEHHKALDEKVRERLRVALERCSLLEEELGATHKELMILKEQNNQKKTLTDGVLDINHEQENTPSTSGKRSSDGSLSHEEDLAKVIELQEIISKQSREQSQMKERLASLSSHVTELEEDLDTARKDLIKSEEMNTKLQRDVREAMAQKEDMEERITTLEKRYLAAQREATSVHDLNDKLENEIANKDSMHRQTEDKNRQLQERLELAEQKLQQTLRKAETLPEVEAELAQRVAALSKAEERHGNIEERLRQMEAQLEEKNQELQRARQREKMNEEHNKRLSDTVDKLLSESNERLQLHLKERMAALEDKNSLLREVESAKKQLEETQHDKDQLVLNIEALRAELDHMRLRGASLHHGRPHLGSVPDFRFPMADGHTDSYSTSAVLRRPQKGRLAALRDEPSKVQTLNEQDWERAQQASVLANVAQAFESDADVSDGEDDRDTLLSSVDLLSPSGQADAHTLAMMLQEQLDAINKEIRLIQEEKENTEQRAEEIESRVGSGSLDNLGRFRSMSSIPPYPASSLASSSPPGSGRSTPRRIPHSPAREVDRLGVMTLLPPSREEVRDDKTTIKCETSPPSSPRALRLDRLHKGALHTVSHEDIRDIRNSTGSQDGPVSNPSSSNSSQDSLHKAPKKKGIKSSIGRLFGKKEKGRPGQTGKEALGQAGVSETDNSSQDALGLSKLGGQAEKNRKLQKKHELLEEARRQGLPFAQWDGPTVVVWLELWVGMPAWYVAACRANVKSGAIMSALSDTEIQREIGISNPLHRLKLRLAIQEIMSLTSPSAPPTSRTTLAYGDMNHEWIGNEWLPSLGLPQYRSYFMECLVDARMLDHLTKKDLRGQLKMVDSFHRNSFQCGIMCLRRLNYDRKELERKREESQSEIKDVLVWSNDRVIRWILSIGLKEYANNLIESGVHGALLALDETFDFSALALLLQIPTQNTQARAVLEREFNNLLVMGTDRRFDEDDDKSFRRAPSWRKKFRPKDIRGLAAGSAETLPANFRVTSSMSSPSMQPKKMQMDGNVSGTQRLDSATVRTYSC

SEQ ID NO: 43542 - protein, 456 aa, Homo sapiens [sequence omitted]

SEQ ID NO: 43543 - protein, 419 aa, Homo sapiens
MDKSAVGHEYQSKLSKHCSQVDSVRGFGGKFGVQMDRVDQSAVGFEYQGKTEKHASQKDYSSGFGGKYGVQADRVDKSAVGFDYQGKTEKHESQRDYSKGFGGKYGIDKDKVDKSAVGFEYQGKTEKHESQKDYVKGFGGKFGVQTDRQDKCALGWDHQEKLQLHESQKDYSKGFGGKYGVQKDRMDKNASTFEDVTQVSSAYQKTVPVEAVTSKTSNIRANFENLAKEKEQEDRRKAEAERAQRMAKERQEQEEARRKLEEQARAKTQTPPVSPAPQPTEERLPSSPVYEDAASFKAELSYRGPVSGTEPEPVYSMEAADYREASSQQGLAYATEAVYESAEAPGHYPAEDSTYDEYENDLGITAVALYDYQAAGDDEISFDPDDIITNIEMIDDGWWRGVCKGRYGLFPANYVELRQ

SEQ ID NO: 43544 - protein, 1838 aa, Homo sapiens
MAQSFSDYSVGSESDSSKEETIYDTIRATAEKPGGARTEESQGNTLVIRVVIHDLQQTKCIRFNPDATVWVAKQRILCTLTQSLKDVLNYGLFQPASNGRDGKFLDEERLLREYPQPVGEGVPSLEFRYKKRVYKQASLDEKQLAKLHTKTNLKKCMDHIQHRLVEKITKMLDRGLDPNFHDPETGETPLTLAAQLDDSVEVIKALKNGGAHLDFRAKDGMTALHKAARARNQVALKTLLELGASPDYKDSYGLTPLYHTAIVGGDPYCCELLLHEHATVCCKDENGWHEIHQACRYGHVQHLEHLLFYGADMSAQNASGNTALHICALYNQDSCARVLLFRGGNKELKNYNSQTPFQVAIIAGNFELAEYIKNHKETDIVPFREAPAYSNRRRRPPNTLAAPRVLLRSNSDNNLNASAPDWAVCSTATSHRSLSPQLLQQMPSKPEGAAKTIGSYVPGPRSRSPSLNRLGGAGEDGKRPQPLWHVGSPFALGANKDSLSAFEYPGPKRKLYSAVPGRLFVAVKPYQPQVDGEIPLHRGDRVKVLSIGEGGFWEGSARGHIGWFPAECVEEVQCKPRDSQAETRADRSKKLFRHYTVGSYDSFDTSSDCIIEEKTVVLQKKDNEGFGFVLRGAKADTPIEEFTPTPAFPALQYLESVDEGGVAWQAGLRTGDFLIEVNNENVVKVGHRQVVNMIRQGGNHLVLKVVTVTRNLDPDDTARKKAPPPPKRAPTTALTLRSKSMTSELEELVDKASVRKKKDKPEEIVPASKPSRAAENMAVEPRVATIKQRPSSRCFPAGSDMNSVYERQGIAVMTPTVPGSPKAPFLGIPRGTMRRQKSIDSRIFLSGITEEERQFLAPPMLKFTRSLSMPDTSEDIPPPPQSVPPSPPPPSPTTYNCPKSPTPRVYGTIKPAFNQNSAAKVSPATRSDTVATMMREKGMYFRRELDRYSLDSEDLYSRNAGPQANFRNKRGQMPENPYSEVGKIASKAVYVPAKPARRKGMLVKQSNVEDSPEKTCSIPIPTIIVKEPSTSSSGKSSQGSSMEIDPQAPEPPSQLRPDESLTVSSPFAAAIAGAVRDREKRLEARRNSPAFLSTDLGDEDVGLGPPAPRTRPSMFPEEGDFADEDSAEQLSSPMPSATPREPENHFVGGAEASAPGEAGRPLNSTSKAQGPESSPAVPSASSGTAGPGNYVHPLTGRLLDPSSPLALALSARDRAMKESQQGPKGEAPKADLNKPLYIDTKMRPSLDAGFPTVTRQNTRGPLRRQETENKYETDLGRDRKGDDKKNMLIDIMDTSQQKSAGLLMVHTVDATKLDNALQEEDEKAEVEMKPDSSPSEVPEGVSETEGALQISAAPEPTTVPGRTIVAVGSMEEAVILPFRIPPPPLASVDLDEDFIFTEPLPPPLEFANSFDIPDDRAASVPALSDLVKQKKSDTPQSPSLNSSQPTNSADSKKPASLSNCLPASFLPPPESFDAVADSGIEEVDSRSSSDHHLETTSTISTVSSISTLSSEGGENVDTCTVYADGQAFMVDKPPVPPKPKMKPIIHKSNALYQDALVEEDVDSFVIPPPAPPPPPGSAQPGMAKVLQPRTSKLWGDVTEIKSPILSGPKANVISELNSILQQMNREKLAKPGEGLDSPMGAKSASLAPRSPEIMSTISGTRSTTVTFTVRPGTSQPITLQSRPPDYESRTSGTRRAPSPVVSPTEMNKETLPAPLSAATASPSPALSDVFSLPSQPPSGDLFGLNPAGRSRSPSPSILQQPISNKPFTTKPVHLWTKPDVADWLESLNLGEHKEAFMDNEIDGSHLPNLQKEDLIDLGVTRVGHRMNIERALKQLLDR

SEQ ID NO: 43545 - protein, 236 aa, Homo sapiens
MGIEFNPRIGKWFDFKLFFNGRPGIVAWTLINLSFAAKQRELHSHVTNAMVLVNVLQAIYVIDFFWNETWYLKTIDICHDHFGWYLGWGDCVWLPYLYTLQKRTRRQGVCQRQSWGLTPGRWAPEPTLLSSPWAKHRLTPSPSPPRVCTWCTTPCSCPPRTPWASCCWAWWATTSSGWPTTRRTCSAARMGAASSGAGSPRSSSAPTHPPMGRGTTASCWCRASGAWPATSTTSAT

SEQ ID NO: 43546 - protein, 118 aa, Homo sapiens
MSPRPPRLLSQSSSDPPFYGDPCWLAQIVQNHLPSQGLSPHHPCSASAFFWIGGSIEQNKSFIIMSLITSILHRFFKRSSRKRVLSWVPALCGWWCTILSSAPQGFAFISKIKKQSGE

SEQ ID NO: 43547 - protein, 702 aa, Homo sapiens
MRTFSQKKAAIEREYAQGMQKLASQYLKRDWPGVKADDRNDYRSMYPVWKSFLEGTMQVAQSRMNICENYKNFISEPARTVRSLKEQQLKRCVDQLTKIQTELQETVKDLAKGKKKYFETEQMAHAVREKADIEAKSKLSLFQSRISLQKASVKLKARRSECNSKATHARNDYLLTLAAANAHQDRYYQTDLVNIMKALDGNVYDHLKDYLIAFSRTELETCQAVQNTFQFLLENSSKVVRDYNLQLFLQENAVFHKPQPFQFQPCDSDTSRQLESETGTTEEHSLNKEARKWATRVAREHKNIVHQQRVLNDLECHGAAVSEQSRAELEQKIDEARENIRKAEIIKLKAEARLDLLKQIGVSVDTWLKSAMNQVMEELENERWARPPAVTSNGTLHSLNADTEREEGEEFEDNMDVFDDSSSSPSGTLRNYPLTCKVVYSYKASQPDELTIEEHEVLEVIEDGDMEDWVKARNKVGQVGYVPEKYLQFPTSNSLLSMLQSLAALDSRSHTSSNSTEAELVSGSLNGDASVCFVKALYDYEGQTDDELSFPEGAIIRILNKENQDDDGFWEGEFNGRIGVFPSVLVEELSASENGDTPWMREIQISPSPKPHASLPPLPLYDQPPSSPYPSPDKRSSLYFPRSPSANEKSLHAESPGFSQASRHTPETSYGKLRPVRAAPPPPTQNHRRPAEKIEDVEITLV

SEQ ID NO: 43548 - protein, 450 aa, Homo sapiens [sequence omitted]

SEQ ID NO: 43549 - protein, 432 aa, Homo sapiens
MKKDVDRTEVVFSSYPGFSTSEIAKEDAVLPVALFPSLCEFVFHNNPLVAHTRGVPPLLKSFLQERLGIHLIRRKIVKPKHHVLMSRKESWKVKSEIPKVPKQPLVLHHPRMTTTKSPSKDMLEPEAELAEDLPTTKSTSVESEMPTENLEGHSPSCRTFVPLPPICSNSTVHSEETLSHLSDTTVRLSPERPSDEDSKSTESIFLTQVSELPSSVIHKDDLELKEKDQKKPPTAPREVKGTRRKLPTAFLPSKYHGYEELLTAKPDPAFIEPKGIQKNAQALQQMLKHPLLCHSSKPKLDTLQKPYVHKEKRAQRIPIPPPKKTRAQLLDDIFIRLRDPRNITEAPLGAVLHQWTERRLVNHKQYLEAKRLLKEFQARYRQLVSGSLRTVFGTTPLPMACPALSESQPKFGHFLEFMDEFCQEPTASDSQG

SEQ ID NO: 43550 - protein, 18 aa, Homo sapiens
MALPPCRPIWPSQNRRHL

SEQ ID NO: 43551 - protein, 76 aa, Homo sapiens [sequence omitted]

SEQ ID NO: 43552 - protein, 117 aa, Homo sapiens
MESGAKGCEVVVSGKLRGQRAKSMKFVDGLMIHSGDPVNYYVDTAVRHVLLRQGVLGIKVKIMLPWDPTGKIGPKKPLPDHVSIVEPKDEILPTTPISEQKGGKPEPPAMPQPVPTA

SEQ ID NO: 43553 - protein, 1220 aa, Homo sapiens
MPRLVPQTAFTVTANAVANAAIQHNASLPVPAETGSKEVVCYSYTSTTSTPTSTPVPSGSIATVKSPRPASPASNVVVLPSGSTVYVKSVSCSDEDEKPRKRRRTNSSSSSPVVLKEVPKAVVPVSKTITVPVSGSPKMSNIMQSIANSLPPHMSPVKITFTKPSTQTTNTTTQKVIIVTTSPSSTFVPNILSKSHNYAAVTKLVPTSVIASTTQKPPVVITASQSSLVSNSSSGSSSSTPSPIPNTVAVTAVVSSTPSVVMSTVAQGVSTSAIKMASTRLPSPKSLVSAPTQILAQFPKQHQQSPKQQLYQVQQQTQQQVAQPSPVSHQQQPQQSPLPPGIKPTIQIKQESGVKIITQQVQPSKILPKPVTATLPTSSNSPIMVVSSNGAIMTTKLVTTPTGTQATYTRPTVSPSIGRMAATPGAATYVKTTSGSIITVVPKSLATLGGKIISSNIVSGTTTKITTIPMTSKPNVIVVQKTTGKGTTIQGLPGKNVVTTLLNAGGEKTIQTVPTGAKPAILTATRPITKMIVTQPKGIGSTVQPAAKIIPTKIVYGQQGKTQVLIKPKPVTFQATVVSEQTRQLVTETLQQASRVAEAGNSSIQEGKEEPQNYTDSSSSSTESSQSSQDSQPVVHVIASRRQDWSEHEIAMETSPTIIYQDVSSESQSATSTIKALLELQQTTVKEKLESKPRQPTIDLSQMAVPIQMTQEKRHSPESPSIAVVESELVAEYITTERTDEGTEVAFPLLVSHRSQPQQPSQPQRTLLQHVAQSQTATQTSVVVKSIPASSPGAITHIMQQALSSHTAFTKHSEELGTEEGEVEEMDTLDPQTGLFYRSALTQSQSAKQQKLSQPPLEQTQLQVKTLQCFQTKQKQTIHLQADQLQHKLPQMPQLSIRHQKLTPLQQEQAQPKPDVQHTQHPMVAKDRQLPTLMAQPPQTVVQVLAVKTTQQLPKLQQAPNQPKIYVQPQTPQSQMSLPASSEKQTASQVEQPIITQGSSVTKITFEGRQPPTVTKITGGSSVPKLTSPVTSISPIQASEKTAVSDILKMSLMEAQIDTNVEHMIVDPPKKALATSMLTGEAGSLPSTHMVVAGMANSTPQQQKCRESCSSPSTVGSSLTTRKIDPPAVPATGQFMRIQNVGQKKAEESPAEIIIQAIPQYAIPCHSSSNVVVEPSGLLELNNFTSQQLDDEETAMEQDIDSSTEDGTEPSPSQSSAERS

SEQ ID NO: 43554 - protein, 635 aa, Homo sapiens [sequence omitted]

SEQ ID NO: 43555 - protein, 19 aa, Homo sapiens
MNWILIVTLLFSPCVTLEP

SEQ ID NO: 43556 - protein, 302 aa, Homo sapiens
MPVPIPLDTAHLDLSSNRLEMVNESVLAGPGYTTLAGLDLSHNLLTSISPTAFSRLRYLESLDLSHNGLTALPAESFTSSPLSDVNLSHNQLREVSVSAFTTHSQGRALHVDLSHNLIHRLVPHPTRAGLPAPTIQSLNLAWNRLHAVPNLRDLPLRYLSLDGNPLAVIGPGAFAGLGGLTHLSLASLQRLPELAPSGFRELPGLQVLDLSGNPKLNWAGAEVFSGLSSLQELDLSGTNLVPLPEALLLHLPALQSVSVGQDVRCRRLVREGTYPRRPGSSPKVALHCVDTRDSAARGPTIL

SEQ ID NO: 43557 - protein, 447 aa, Homo sapiens
MPEQWARLLQTSNITKSEQKKNPQAVLDVLEFYNSKKTSNSQKYMSFTDKSAEDYNSSNALNVKAVSETPAVPPVSEDEDDDDDDATPPPVIAPRPEHTKSVYTRSVIEPLPVTPTRDVATSPISPTENNTTPPDALTRNTEKQKKKPKMSDEEILEKLRSIVSVGDPKKKYTRFEKIGQGASGTVYTAMDVATGQEVAIKQMNLQQQPKKELIINEILVMRENKNPNIVNYLDSYLVGDELWVVMEYLAGGSLTDVVTETCMDEGQIAAVCRECLQALEFLHSNQVIHRDIKSDNILLGMDGSVKLTDFGFCAQITPEQSKRSTMVGTPYWMAPEVVTRKAYGPKVDIWSLGIMAIEMIEGEPPYLNENPLRALYLIATNGTPELQNPEKLSAIFRDFLNRCLEMDVEKRGSAKELLQHQFLKIAKPLSSLTPLIAAAKEATKNNH

SEQ ID NO: 43558 - protein, 1367 aa, Homo sapiens [sequence omitted]

SEQ ID NO: 43559 - protein, 201 aa, Homo sapiens
MEDYDFLFKIVLIGNAGVGKTCLVRRFTQGLFPPGQGATIGVDFMIKTVEINGEKVKLQIWDTAGQERFRSITQSYYRSANALILTYDITCEESFRCLPEWLREIEQYASNKVITVLVGNKIDLAERREVSQQRAEEFSEAQDMYYLETSAKESDNVEKLFLDLACRLISEARQNTLVNNVSSPLPGEGKSISYLTCCNFN

SEQ ID NO: 43560 - protein, 414 aa, Homo sapiens
MNGANLTAQDDRGCTPLHLAATHGHSFTLQIMLRSGVDPSVTDKREWRPVHYAAFHGRLGCLQLLVKWGCSIEDVDYNGNLPVHLAAMEGHLHCFKFLVSRMSSATQVLKAFNDNGENVLDLAQRFFKQNILQFIQGAEYEGKDLEDQETLAFPGHVAAFKGDLGMLKKLVEDGVININERADNGSTPMHKAAGQGHIECLQWLIKMGADSNITNKAGERPSDVAKRFAHLAAVKLLEELQKYDIDDENEIDENDVKYFIRHGVEGSTDAKDDLCLSDLDKTDARMRAYKKIVELRHLLEIAESNYKHLGGITEEDLKQKKEQLESEKTIKELQGQLEYERLRREKLECQLDEYRAEVDQLRETLEKIQVPNFVAMVGVLFNTFIFLKKYIQEWPRVQALGWGSLDLNPGYSLF

SEQ ID NO: 43561 - protein, 1983 aa, Homo sapiens
MIYKSTDLNKDDNQSFPRQRTDSLKARGAPRGILKRNSSSSSTDSETLRYNHNFEPKSKIVSPGLTIHERISEKEHSLEDNSSPNSLEPLKHVRFSAVKDELPQSPGLIHGREVGEFSVLESDRLKNGMEDAGDTEEFQSDPKPSQYRKPSLFHQSTSSPYVSKSETHQPMTSGSFPINGLHSHSEVLTARPQSMENSPTINEPKDKSSELTRLESVLPRSPADELSHCVEPEPSQVPGGSSRDRQQGKPPPLPALKAKTSSRSGPYATEIKKSTDDSIFKVLDWFNRSSYSDDNKSFLQHPRGIESKEKTDSKSQVAVDLVTDDTTLRENGSKTLSPSKIELKPVRSDSPFQAEGDMLVSESCQDNNVNIKSKFMNLSQKGTPKEGPGILQPFESYGTPSQGSKNMDYSQDSKSPGKGNGASPSNSNYSYSVLKESDAENQVPCNTNNIGNLGEEEPKFHAHEENRGHSEVNFDSSTVVKEPGLKDNMNAERKSKVGNTYILKASLEPENIKSTPGVANNGSPWKKPEVQFQQEAGEVPKNQVQREKYKRVSDRISFWEGEKAGAKITHEKPTSSCSQEQPSAKAYQPVKKSQGVSSMDSLSTDQSEYNQAIPKRVVLDEDDQASQLSNSYSSNKSKETKPQIAGPSRYYLSAEQSDKVSLFQNKKNEPIKRSQVADSLPSRRNITLPALQPPSNVGSERHAPLEKDRPLVRESNANFKVMSLKERMDEPNAEQVYNPSQFENLRKFWDLEANSNSKDNDKNITTTSQKNSAPFNRQKHKEFSDIKLSGKNTHEAEVLLSPKKVMAREEMEKLNSKGILQVLPDEITFPLSPLRKYTYQLPGNESSKENVEKNTEGIVTPVFKEEKDYSEQEIQESIIKTNVLSKDCKDTFNDSLQKLLSETSTPAIQPSGGKVHGKQVLEPSVSENRTWPQKTDFADTEEEVKGPEKIINEHVDKTVVHPKVKRNSLTASLDKLLKEATGTSPSPLQAKLAPVITGTNSKLEEGRFFGKGIEQSHNTSADKREILAPFPVRDETFGNTALLKKAESGECQLSTQNLIQMAAEDSHPLDPTSQLSRKGSFGDVASPPQDMLFPQDAHLVPQARVHPSQTEISETVEKVILPPRPVLNDVSAALQKLCGEVWLSYPAGREVGPGEVNPEFPEAVQPVCSPLNPPGVISPWATMDTIVPDRKDFYSSNVVPDKTHEVGSYLAAQMSPSDQTLSSFASIVAQYGKGLPQEVEEIVRETIVQPKSEFLEFSAGLEKLLKEETETFPSKYESDTGNLSPSKLIGSTEEPRRATSECHPEELKETVEKAEAPLITESAFDAGFEKLLKEITEAPPYQPQVSVREETHEKESSQSEQTRFLGTVPHFYRAASQTSEMKDKSNGLESQVNQCDKMLGGDALVTDLLVDFCGSRSGVEIPRTPQLYVAHEIGTIKTVTPPEDRDSESGVAGGQGTLQEPGFGEASEAISVSRNRQPIPLLMNKENSTKTSKVELTLASPYMKQEKEEEKEGFSESDFSDGNTSSNAESWRNPSSSEEEPSPVLKTLERSAARKMPSKSLEDISSDSSNQAKVDNQPEELVRSAEDVSTVPTQPDNPFSHPDKLKRMSKSVPAFLQDESDDRETDTASESSYQLSRHKKSPSSLTNLSSSSGMTSLSSVSGSVMSVYSGDFGNLEVKGNIQFAIEYVESLKELHVFVAQCKDLAAADVKKQRSDPYVKAYLLPDKGKMGKKKTLVVKKTLNPVYNEILRYKIEKQILKTQKLNLSIWHRDTFKRNSFLGEVELDLETWDWDNKQNKQLRWYPLKRKTAPVALEAENRGEMKLALQYVPEPVPGKKLPTTGEVHIWVKECLDLPLLRGSHLNSFVKCTILPDTSRKSRQKTRAVGKTTNPIFNHTMVYDGFRPEDLMEACVELTVWDHYKLTNQFLGGLRIGFGTGKSYGTEVDWMDSTSEEVALWEKMVNSPNTWIEATLPLRMLLIAKISK

SEQ ID NO: 43562 - protein, 598 aa, Homo sapiens
MGPKKKHLDYLIQCTNEMNVNIPQLADSLFERTTNSSWVVVFKSLITTHHLMVYGNERFIQYLASRNTLFNLSNFLDKSGLQGYDMSTFIRRYSRYLNEKAVSYRQVAFDFTKVKRGADGVMRTMNTEKLLKTVPIIQNQMDALLDFNVNSNELTNGVINAAFMLLFKDAIRLFAAYNEGIINLLEKYFDMKKNQCKEGLDIYKKFLTRMTRISEFLKVAEQVGIDRGDIPDLSQAPSSLLDALEQHLASLEGKKIKDSTAASRATTLSNAVSSLASTGLSLTKVDEREKQAALEEEQARLKALKEQRLKELAKKPHTSLTTAASPVSTSAGGIMTAPAIDIFSTPSSSNSTSKLPNDLLDLQQPTFHPSVHPMSTASQVASTWGDPFSATVDAVDDAIPSLNPFLTKSSGDVHLSISSDVSTFTTRTPTHEMFVGFTPSPVAQPHPSAGLNVDFESVFGNKSTNVIVDSGGFDELGGLLKPTVASQNQNLPVAKLPPSKLVSDDLDSSLANLVGNLGIGNGTTKNDVNWSQPGEKKLTGGSNWQPKVAPTTAWNAATMPPQMGSVPVMTQPTLIYSQPVMRPPNPFGPVSGAQIQFM

SEQ ID NO: 43563 - protein, 618 aa, Homo sapiens
MGPKKKHLDYLIQCTNEMNVNIPQLADSLFERTTNSSWVVVFKSLITTHHLMVYGNERFIQYLASRNTLFNLSNFLDKSGLQGYDMSTFIRRYSRYLNEKAVSYRQVAFDFTKVKRGADGVMRTMNTEKLLKTVPIIQNQMDALLDFNVNSNELTNGVINAAFMLLFKDAIRLFAAYNEGIINLLEKYFDMKKNQCKEGLDIYKKFLTRMTRISEFLKVAEQVGIDRGDIPDLSQAPSSLLDALEQHLASLEGKKIKDSTAASRATTLSNAVSSLASTGLSLTKVDEREKQAALEEEQARLKALKEQRLKELAKKPHTSLTTAASPVSTSAGGIMTAPAIDIFSTPSSSNSTSKLPNDLLDLQQPTFHPSVHPMSTASQVASTWGDPFSATVDAVDDAIPSLNPFLTKSSGDVHLSISSDVSTFTTRTPTHEMFVGFTPSPVAQPHPSAGLNVDFESVFGNKSTNVIVDSGGFDELGGLLKPTVASQNQNLPVAKLPPSKLVSDDLDSSLANLVGNLGIGNGTTKNDVNWSQPGEKKLTGGSNWQPKVAPTTAWNAATMAPPVMAYPATTPTGMIGYGIPPQMGSVPVMTQPTLIYSQPVMRPPNPFGPVSGAQIQFM

SEQ ID NO: 43564 - protein, 576 aa, Homo sapiens
MGPKKKHLDYLIQCTNEMNVNIPQLADSLFERTTNSSWVVVFKSLITTHHLMVYGNERFIQYLASRNTLFNLSNFLDKSGLQGYDMSTFIRRYSRYLNEKAVSYRQVAFDFTKVKRGADGVMRTMNTEKLLKTVPIIQNQMDALLDFNVNSNELTNGVINAAFMLLFKDAIRLFAAYNEGIINLLEKYFDMKKNQCKEGLDIYKKFLTRMTRISEFLKVAEQVGIDRGDIPDLSQAPSSLLDALEQHLASLEGKKIKDSTAASRATTLSNAVSSLASTGLSLTKVDEREKQAALEEEQARLKALKEQRLKELAKKPHTSLTTAASPVSTSAGGIMTAPAIDIFSTPSSSNSTSKLPNDLLDLQQPTFHPSVHPMSTASQVASTWGGFTPSPVAQPHPSAGLNVDFESVFGNKSTNVIVDSGGFDELGGLLKPTVASQNQNLPVAKLPPSKLVSDDLDSSLANLVGNLGIGNGTTKNDVNWSQPGEKKLTGGSNWQPKVAPTTAWNAATMNGMHFPQYAPPVMAYPATTPTGMIGYGIPPQMGSVPVMTQPTLIYSQPVMRPPNPFGPVSGAQIQFM

SEQ ID NO: 43565 - protein, 376 aa, Homo sapiens [sequence omitted]

SEQ ID NO: 43566 - protein, 354 aa, Homo sapiens
MAFFCILRKILGKFYSWTPGFGAALPASYVAILIERKSRRGLLTIYMANLVLLFCITAAMYMFFFRCKDGLKGFTFSALRFIVGKEEIPTHSFSPEAAYAKVEQKREQHEEKPGRMNMIGLVRKFVDSICKHGPRHRCCKHYEDNCISYCIKGFIRMFSVGYLIQCCLRIPSAFRHLFTQPSRLLSLFYNKENFQLGAFLGSFVSIYKGTSCFLRWIRNLDDELHAIIAGFLAGISMMFYKSTTISMYLASKLVETMYFKGIEAGKVPYFPHADTIIYSISTAICFQAAVMEVQTLRPSYWKFLLRLTKGKFAVMNRKVLDVFGTGASKHFQDFIPRLDPRYTTVTPELPTEFS

SEQ ID NO: 43567 - protein, 439 aa, Homo sapiens [sequence omitted]

SEQ ID NO: 43568 - protein, 841 aa, Homo sapiens
MNLLAIQHQATGSAGPAHPTNNFSSTENLTQEDPQMVYQSARQEPQGQEHQVDNTVMEKQVRSTQPQQNNEELPTYEEAKAQSQFFRGQQQQQQQQGAVGHGYYMAGGTSQKSRTEGRPTVNRANSGQAHKDEALKELKQGHVRSLSERIMQLSLERNGAKQHLPGSGNGKGFKVGGGPSPAQPAGKVLDPRGPPPEYPFKTKQMMSPVSKTQEHGLFYGDQHPGMLHEMVKPYPAPQPVRTDVAVLRYQPPPEYGVTSRPCQLPFPSTMQQHSPMSSQTSSASGPLHSVSLPLPLPMALGAPQPPPAASPSQQLGPDAFAIVERAQQMVEILTEENRVLHQELQGYYDNADKLHKFEKELQRISEAYESLVKSTTKRESLDKAMRNKLEGEIRRLHDFNRDLRDRLETANRQLSSREYEGHEDKAAEGHYASQNKEFLKEKEKLEMELAAVRTASEDHRRHIEILDQALSNAQARVIKLEEELREKQAYVEKVEKLQQALTQLQSACEKREQMERRLRTWLERELDALRTQQKHGNGQPANMPEYNAPALLELVREKEERILALEADMTKWEQKYLEESTIRHFAMNAAATAAAERDTTIINHSRNGSYGESSLEAHIWQEEEEVVQANRRCQDMEYTIKNLHAKIIEKDAMIKVLQQRSRKDAGKTDSSSLRPARSVPSIAAATGTHSRQTSLTSSQLAEEKKEEKTWKGSIGLLLGKEHHEHASAPLLPPPPTSALSSIASTTAASSAHAKTGSKDSSTQTDKSAELFWPSMASLPSRGRLSTTPAHSPVLKHPAAKGTAEKLENSPGHGKSPDHRGRVSSLLHKPEFPDGEMMEVLI

SEQ ID NO: 43569 - protein, 6 aa, Homo sapiens
MEKYIK

SEQ ID NO: 43570 - protein, 172 aa, Homo sapiens
MLTSLHYLDNRFVQPRLESLVSRSRWKEQYKERVENYSNVSIHLKNPENCSCQACGLHRYCKYSVHLSGELYNTRTMQIDNFMSHDKQVFTVGRICASRTRIYHKLKHFKFKLYQECCTIAMTEEVEDEQVKETVERIFRRSKENGWIKEKYGQLEEYLNFADYFQEEKFEL

SEQ ID NO: 43571 - protein, 898 aa, Homo sapiens
MDSELGEDGCPQAPLPCYGYYPCFRGSDNRLAHRRQTVLREKGRRLANRGPAYMFSDRSTSLSIEEERFLDAAEYGNIPVVRKMLEECHSLNVNCVDYMGQNALQLAVANEHLEITELLLKKENLSRVGDALLLAISKGYVRIVEAILSHPAFAEGKRLATSPSQSELQQDDFYAYDEDGTRFSHDVTPIILAAHCQEYEIVHTLLRKGARIERPHDYFCKCNDCNQKQKHDSFSHSRSRINAYKGLASPAYLSLSSEDPVMTALELSNELAVLANIEKEFKNDYKKLSMQCKDFVVGLLDLCRNTEEVEAILNGDVETLQSGDHGRPNLSRLKLAIKYEVKKFVAHPNCQQQLLSIWYENLSGLRQQTMAVKFLVVLAVAIGLPFLALIYWFAPCSKMGKIMRGPFMKFVAHAASFTIFLGLLVMNAADRFEGTKLLPNETSTDNAKQLFRMKTSCFSWMEMLIISWVIGMIWAECKEIWTQGPKEYLFELWNMLDFGMLAIFAASFIARFMAFWHASKAQSIIDANDTLKDLTKVTLGDNVKYYNLARIKWDPSDPQIISEGLYAIAVVLSFSRIAYILPANESFGPLQISLGRTVKDIFKFMVIFIMVFVAFMIGMFNLYSYYIGAKQNEAFTTVEESFKTLFWAIFGLSEVKSVVINYNHKFIENIGYVLYGVYNVTMVIVLLNMLIAMINSSFQEIEDDADVEWKFARAKLWFSYFEEGRTLPVPFNLVPSPKSLFYLLLKLKKWISELFQGHKKGFQEDAEMNKINEEKKLGILGSHEDLSKLSLDKKQVGHNKQPSIRSSEDFHLNSFNNPPRQYQKIMKRLIKRYVLQAQIDKESDEVNEGELKEIKQDISSLRYELLEEKSQNTEDLAELIRELGEKLSMEPNQEETNR

SEQ ID NO: 43572 - protein, 918 aa, Homo sapiens
MNENMRATLATSKNVFQLKLEETQKLLEDQHLSNLQKFCDEVNQITNSETLSSIDSLEATEHEEIYLTLNKEHSTSIQRNTISLKPANMQSTNLSCFDEDKLAFSKTQHINNWLTNLDASNTQNVTAFSDILSKSNVLPSWEYFNSKEQNPSPLNGTVERATNTANNSVPFVSSPPMFVLDKKCEKTSETSTMRTTDSTSGAFKRERPLVTESPTFKFSKSQSTSDSLTQEVATFPDQEKYSELNQENGTTSIPTSCVPVATPLVLPSNIQSARPSAKNSIHIKEIDAVQCSDKLDELKDGKEEEIKYFNCNKEELPLFSDSFQDAYIPHNPDSKDEKQKLAETSSLSNVTSNYDFVGQHKKMKYNIHERNGVRFLKSILKKESKYEHGYLKALIINQSFKFGNQKAAAIRDSIELTKEKGAEIPKTIKKLRWFDETSNIENNAENSHSLKNKTGTTQQHSQQFHIQSGAGSNIISVSTCAVNSADTKKSREDSISENVTTLGGSGADHMPLNCFIPSGYNFAKHAWPASKKEESKIPVHDDSKTKQGKPQRGRAKIIRKPGSAKVQSGFICTNRKGAVIQPQSASKVNIFTQAQGKLIIPCPPPQSTSNIRSGKNIQVSQCQPVTPENPQNIITHNSFNSKHVLPTEHSLNQWNQESSSPLSNACSDLVTVIPSLPSYCSSECQTFAKINHSNGTQAVARQDATLYCTQRSPVCEESYPSVTLRTAEEESVPLWKRGPNVLHQNKRATGSTVMRRKRIAETKRRNILEQKRQNPGSVGQKYSEQINNFGQSVLLSSSEPKQTTRGTSYIEEVSDSTSEFLMAENLVKASVPEDEILTVLNSKQIQKSNLPLNKTQQFNICTLSAEEQKILESLNDLSERLHYIQESICKNPSIKNTLQIIPLLEKREDRTSSCRDKR

SEQ ID NO: 43573 - protein, 229 aa, Homo sapiens
MLGRIKAQAFGFDQTFQSYRKDDFVMAFFKDPNVIPNLKLLSDSSGQWIILGTEVKKIEAINVPCTQLSMSFFHRLYDEDIVRDSGHIVKCLDSFCDPFLISDELRRVLLVEDSEKYEIFSQPDREEFLFCLFKHLCLGGALCQYEDVISPYLETTKLIYKDLVSVRKNPQTKKIQITSSVFKVSAYDSAGMCYPSAKNHEQTFSYFIVDPIRRHLHVLYHCYGVGDMS

SEQ ID NO: 43574 - protein, 432 aa, Homo sapiens [sequence omitted]

SEQ ID NO: 43575 - protein, 398 aa, Homo sapiens
MNPKTANVPQTVPMRLRKLPDSFFKPPEPKSHSRQASTDAGTAGALTPQHVRAHSSPASLQLGAVSPGTLTPTGVVSGPAATPTAQHLRQSSFEIPDDVPLPAGWEMAKTSSGQRYFLNHIDQTTTWQDPRKAMLSQMNVTAPTSPPVQQNMMNSASAMNQRISQSAPVKQPPPLAPQSPQGGVMGGSNSNQQQQMRLQQLQMEKERLRLKQQELLRQVRPQAMRNINPSTANSPKCQELALRSQLPTLEQDGGTQNPVSSPGMSQELRTMTTNSSDPFLNSGTYHSRDESTDSGLSMSSYSVPRTPDDFLNSVDEMDTGDTINQSTLPSQQNRFPDYLEAIPGTNVDLGTLEGDGMNIEGEELMPSLQEALSSDILNDMESVLAATKLDKESFLTWL

SEQ ID NO: 43576 - protein, 378 aa, Homo sapiens
MNPKTANVPQTVPMRLRKLPDSFFKPPEPKSHSRQASTDAGTAGALTPQHVRAHSSPASLQLGAVSPGTLTPTGVVSGPAATPTAQHLRQSSFEIPDDVPLPAGWEMAKTSSGQRYFLNHIDQTTTWQDPRKAMLSQMNVTAPTSPPVQQNMMNSASAMNQRISQSAPVKQPPPLAPQSPQGGVMGGSNSNQQQQMRLQQLQMEKERLRLKQQELLRQELALRSQLPTLEQDGGTQNPVSSPGMSQELRTMTTNSSDPFLNSGTYHSRDESTDSGLSMSSYSVPRTPDDFLNSVDEMDTGDTINQSTLPSQQNRFPDYLEAIPGTNVDLGTLEGDGMNIEGEELMPSLQEALSSDILNDMESVLAATKLDKESFLTWL

SEQ ID NO: 43577 - protein, 416 aa, Homo sapiens
MNPKTANVPQTVPMRLRKLPDSFFKPPEPKSHSRQASTDAGTAGALTPQHVRAHSSPASLQLGAVSPGTLTPTGVVSGPAATPTAQHLRQSSFEIPDDVPLPAGWEMAKTSSGQRYFLNHIDQTTTWQDPRKAMLSQMNVTAPTSPPVQQNMMNSASGPLPDGWEQAMTQDGEIYYINHKNKTTSWLDPRLDPRFAMNQRISQSAPVKQPPPLAPQSPQGGVMGGSNSNQQQQMRLQQLQMEKERLRLKQQELLRQELALRSQLPTLEQDGGTQNPVSSPGMSQELRTMTTNSSDPFLNSGTYHSRDESTDSGLSMSSYSVPRTPDDFLNSVDEMDTGDTINQSTLPSQQNRFPDYLEAIPGTNVDLGTLEGDGMNIEGEELMPSLQEALSSDILNDMESVLAATKLDKESFLTWL

SEQ ID NO: 43578 - protein, 420 aa, Homo sapiens
MNPKTANVPQTVPMRLRKLPDSFFKPPEPKSHSRQASTDAGTAGALTPQHVRAHSSPASLQLGAVSPGTLTPTGVVSGPAATPTAQHLRQSSFEIPDDVPLPAGWEMAKTSSGQRYFLNHIDQTTTWQDPRKAMLSQMNVTAPTSPPVQQNMMNSASGPLPDGWEQAMTQDGEIYYINHKNKTTSWLDPRLDPRFAMNQRISQSAPVKQPPPLAPQSPQGGVMGGSNSNQQQQMRLQQLQMEKERLRLKQQELLRQVRPQELALRSQLPTLEQDGGTQNPVSSPGMSQELRTMTTNSSDPFLNSGTYHSRDESTDSGLSMSSYSVPRTPDDFLNSVDEMDTGDTINQSTLPSQQNRFPDYLEAIPGTNVDLGTLEGDGMNIEGEELMPSLQEALSSDILNDMESVLAATKLDKESFLTWL

SEQ ID NO: 43579 - protein, 436 aa, Homo sapiens
MNPKTANVPQTVPMRLRKLPDSFFKPPEPKSHSRQASTDAGTAGALTPQHVRAHSSPASLQLGAVSPGTLTPTGVVSGPAATPTAQHLRQSSFEIPDDVPLPAGWEMAKTSSGQRYFLNHIDQTTTWQDPRKAMLSQMNVTAPTSPPVQQNMMNSASGPLPDGWEQAMTQDGEIYYINHKNKTTSWLDPRLDPRFAMNQRISQSAPVKQPPPLAPQSPQGGVMGGSNSNQQQQMRLQQLQMEKERLRLKQQELLRQVRPQAMRNINPSTANSPKCQELALRSQLPTLEQDGGTQNPVSSPGMSQELRTMTTNSSDPFLNSGTYHSRDESTDSGLSMSSYSVPRTPDDFLNSVDEMDTGDTINQSTLPSQQNRFPDYLEAIPGTNVDLGTLEGDGMNIEGEELMPSLQEALSSDILNDMESVLAATKLDKESFLTWL

SEQ ID NO: 43580 - protein, 382 aa, Homo sapiens
MNPKTANVPQTVPMRLRKLPDSFFKPPEPKSHSRQASTDAGTAGALTPQHVRAHSSPASLQLGAVSPGTLTPTGVVSGPAATPTAQHLRQSSFEIPDDVPLPAGWEMAKTSSGQRYFLNHIDQTTTWQDPRKAMLSQMNVTAPTSPPVQQNMMNSASAMNQRISQSAPVKQPPPLAPQSPQGGVMGGSNSNQQQQMRLQQLQMEKERLRLKQQELLRQVRPQELALRSQLPTLEQDGGTQNPVSSPGMSQELRTMTTNSSDPFLNSGTYHSRDESTDSGLSMSSYSVPRTPDDFLNSVDEMDTGDTINQSTLPSQQNRFPDYLEAIPGTNVDLGTLEGDGMNIEGEELMPSLQEALSSDILNDMESVLAATKLDKESFLTWL

SEQ ID NO: 43581 - protein, 447 aa, Homo sapiens [sequence omitted]

SEQ ID NO: 43582 - protein, 168 aa, Homo sapiens
MEKFCEDIGVEPENIIMLVLAWKLEAESMGFFTKEEWLKGMTSLQCDCTEKLQNKFDFLRSQLNDISSFKNIYRYAFDFARDKDQRSLDIDTAKSMLALLLGRTWPLFSVFYQYLEQSKYRVMNKDQWYNVLEFSRTVHADLSNYDEDGAWPVLLDEFVEWQKVRQTS

SEQ ID NO: 43583 - protein, 68 aa, Homo sapiens
MPVKKKRKSPGVAAAVAEDGGLKKCKISRYHLPPPFKLPSSLLCWTTGGKGVGPGLPGWGWRQIPTPC

SEQ ID NO: 43584 - protein, 354 aa, Homo sapiens
MDKTRALIDSVIPKGAQACQICITYICEEDSYLAGTLGLSADQTSGNYLNMQDSQGVLSSFPAPQAVQDNPAMPTSSGSEGNVKLCSLEEAQRIWKQKSAEIYPIMDKSSRTRLALIICNEEFDSIPRRTGAEVDITGMTMLLQNLGYSVDVKKNLTASDMTTELEAFAHRPEHKTSDSTFLVFMSHGIREGICGKKHSEQVPDILQLNAIFNMLNTKNCPSLKDKPKVIIIQACRGDSPGVVWFKDSVGVSGNLSLPTTEEFEDDAIKKAHIEKDFIAFCSSTPDNVSWRHPTMGSVFIGRLIEHMQEYACSCDVEEIFRKVRFSFEQPDGRAQMPTTERVTLTRCFYLFPGH

SEQ ID NO: 43585 - protein, 300 aa, Homo sapiens [sequence omitted]

SEQ ID NO: 43586 - protein, 431 aa, Homo sapiens
MKNLPQGTSQVPADLRISINTFCRAFPFHLMFDPSMSVLQLGEGLRKQLRCDTHKVLKFEDCFEIVSPKVNATFERVLLRLSTPFVIRTKPEASGSENKDKVMEVKGQMIHVPESNSILFLGSPCVDKLDELMGRGLHLSDIPIHDATRDVILVGEQAKAQDGLKKRMDKLKATLERTHQALEEEKKKTVDLLYSIFPGDVAQQLWQGQQVQARKFDDVTMLFSDIVGFTAICAQCTPMQVISMLNELYTRFDHQCGFLDIYKVETIGDAYCVAAGLHRKSLCHAKPIALMALKMMELSEEVLTPDGRPIQMRIGIHSGSVLAGVVGVRMPRYCLFGNNVTLASKFESGSHPRRINVSPTTYQLLKREESFTFIPRSREELPDNFPKEIPGICYFLEVRTGPKPPKPSLSSSRIKKVSYNIGTMFLRETSL

SEQ ID NO: 43587 - protein, 650 aa, Homo sapiens
MQEIVTDDGENLRPIVIDGSNVAMSHGNKEVFSCRGIKLAVDWFLERGHKDITVFVPAWRKEQSRPDALITDQEILRKLEKEKILVFTPSRRVQGRRVVCYDDRFIVKLAFESDGIIVSNDNYRDLANEKPEWKKFIDERLLMYSFVNDKFMPPDDPLGRHGPSLDNFLRKKPIVPEHKKQPCPYGKKCTYGHKCKYYHPERGSQPQRSVADELRAMSRNTAAKTANEGGLVKSNSVPCSTKADSTSDVKRGAPKRQSDPSIRTQVYQDLEEKLPTKNKLETRSVPSLVSIPATSTAKPQSTTSLSNGLPSGVHFPPQDQRPQGQYPSMMMATKNHGTPMPYEQYPKCDSPVDIGYYSMLNAYSNLSLSGPRSPERRFSLDTDYRISSVASDCSSEGSMSCGSSDSYVGYNDRSYVSSPDPQLEENLKCQHMHPHSRLNPQPFLQNFHDPLTRGQSYSHEEPKFHHKPPLPHLALHLPHSAVGARSSCPGDYPSPPSSAHSKAPHLGRSLVATRIDSISDSRLYDSSPSRQRKPYSRQEGLGSWERPGYGIDAYGYRQTYSLPDNSTQPCYEQFTFQSLPEQQEPAWRIPYCGMPQDPPRYQDNREKIYINLCNIFPPDLVRIVMKRNPHMTDAQQLAAAILVEKSQLGY

SEQ ID NO: 43588 - protein, 56 aa, Homo sapiens [sequence omitted]

SEQ ID NO: 43589 - protein, 439 aa, Homo sapiens
MLAFLVLSTGMFCSSSAFLPSSFCMYTTLIAMTGWYMDKTSIAVLGVAAGAILGWPFSAALGLPIAFDLLVMKHRWKSFFHWSLMALILFLVPVVVIDSYYYGKLVIAPLNIVLYNVFTPHGPDLYGTEPWYFYLINGFLNFNVAFALALLVLPLTSLMEYLLQRFHVQNLGHPYWLTLAPMYIWFIIFFIQPHKEERFLFPVYPLICLCGAVALSALQKCYHFVFQRYRLEHYTVTSNWLALGTVFLFGLLSFSRSVALFRGYHGPLDLYPEFYRIATDPTIHTVPEGRPVNVCVGKEWYRFPSSFLLPDNWQLQFIPSEFRGQLPKPFAEGPLATRIVPTDMNDQNLEEPSRYIDISKCHYLVDLDTMRETPREPKYSSNKEEWISLAYRPFLDASRSSKLLRAFYVPFLSDQYTVYVNYTILKPRKAKQIRKKSGG

SEQ ID NO: 43590 - protein, 446 aa, Homo sapiens
MLAFLVLSTGMFCSSSAFLPSSFCMYTTLIAMTGWYMDKTSIAVLGVAAGAILGWPFSAALGLPIAFDLLVMKHRWKSFFHWSLMALILFLVPVVVIDSYYYGKLVIAPLNIVLYNVFTPHGPDLYGTEPWYFYLINGFLNFNVAFALALLVLPLTSLMEYLLQRFHVQNLGHPYWLTLAPMYIWFIIFFIQPHKEERFLFPVYPLICLCGAVALSALQHSFLYFQKCYHFVFQRYRLEHYTVTSNWLALGTVFLFGLLSFSRSVALFRGYHGPLDLYPEFYRIATDPTIHTVPEGRPVNVCVGKEWYRFPSSFLLPDNWQLQFIPSEFRGQLPKPFAEGPLATRIVPTDMNDQNLEEPSRYIDISKCHYLVDLDTMRETPREPKYSSNKEEWISLAYRPFLDASRSSKLLRAFYVPFLSDQYTVYVNYTILKPRKAKQIRKKSGG

SEQ ID NO: 43591 - protein, 29 aa, Homo sapiens
MTSHWPAQTCLCLSFLSSVSTGSFTRLHI

SEQ ID NO: 43592 - protein, 75 aa, Homo sapiens [sequence omitted]

SEQ ID NO: 43593 - protein, 666 aa, Homo sapiens
MIQLQNPSHPTGLLCKANQMRLAGTLCDVVIMVDSQEFHAHRTVLACTSKMFEILFHRNSQHYTLDFLSPKTFQQILEYAYTATLQAKAEDLDDLLYAAEILEIEYLEEQCLKMLETIQASDDNDTEATMADGGAEEEEDRKARYLKNIFISKHSSEESGYASVAGQSLPGPMVDQSPSVSTSFGLSAMSPTKAAVDSLMTIGQSLLQGTLQPPAGPEEPTLAGGGRHPGVAEVKTEMMQVDEVPSQDSPGAAESSISGGMGDKVEERGKEGPGTPTRSSVITSARELHYGREESAEQVPPPAEAGQAPTGRPEHPAPPPEKHLGIYSVLPNHKADAVLSMPSSVTSGLHVQPALAVSMDFSTYGGLLPQGFIQRELFSKLGELAVGMKSESRTIGEQCSVCGVELPDNEAVEQHRKLHSGMKTYGCELCGKRFLDSLRLRMHLLAHSAGAKAFVCDQCGAQFSKEDALETHRQTHTGTDMAVFCLLCGKRFQAQSALQQHMEVHAGVRSYICSECNRTFPSHTALKRHLRSHTGDHPYECEFCGSCFRDESTLKSHKRIHTGEKPYECNGCGKKFSLKHQLETHYRVHTGEKPFECKLCHQRSRDYSAMIKHLRTHNGASPYQCTICTEYCPSLSSMQKHMKGHKPEEIPPDWRIEKTYLYLCYV

SEQ ID NO: 43594 - protein, 199 aa, Homo sapiens
MAQRMVWVDLEMTGLDIEKDQIIEMACLITDSDLNILAEGPNLIIKQPDELLDSMSDWCKEHHGKSGLTKAVKESTITLQQAEYEFLSFVRQQTPPGLCPLAGNSVHEDKKFLDKYMPQFMKHLHYRIIDVSTVKELCRRWYPEEYEFAPKKAASHRALDDISESIKELQFYRNNIFKKKIDEKKRKIIENGENEKTVS

SEQ ID NO: 43595 - protein, 789 aa, Homo sapiens
MQHLNQALGSSLAPVHVPLGGLAPLRGLVDTPPSALRGSQSVSLGSSVESGRQLGELMLPSQGLKTSAYTKGLLGSIYEDKTALSLLGLGEETNEEDEEESDNQSVHSSSEPLRNLHLDIGALGGDFEYEESLRTSQPEEKKDVSLDSDAAGPPTPCKPSSPGADSSLSSAVGKGRQGSGARPGLPEKEENEKSEPKICRNLVTPKADPTGSEPAKASEKEAPEDTVDAGEEGSRREEAAKEPKKKASALEEGSSDASQELEISEHMKEPQLSDSIASDPKSFHGLDFGFRSRISEHLLDVDVLSPVLGGACRQAQQPLGIEDKDDSQSSQDELQSKQSKGLEERYHRLSPPLPHEERAQSPPRSLATEEEPPQGPEGQPEWKEAEELGEDSAASLSLQLSLQRRSTEPVAPPEQLSEAALKAMEEAVAQVLEQDQRHLLESKQEKMQQLREKLCQEEEEEILRLHQQKEQSLSSLRERLQKAIEEEEARMREEESQRLSWLRAQVQSSTQADEDQIRAEQEASLQKLREELESQQKAERASLEQKNRQMLEQLKEEIEASEKSEQAALNAAKEKALQQLREQLEGERKEAVATLEKEHSAELERLCSSLEAKHREVVSSLQKKIQEAQQKEEAQLQKCLGQVEHRVHQKSYHVAGYEHELSSLLREKRQEVEGEHERRLDKMKEEHQQVMAKAREQYEAEERKQRAELLGHLTGELERLQRAHERELETVRQEQHKRLEDLRRRHREQERKLQDLELDLETRAKDVKARLALLEVQVRDLQESLTSES

SEQ ID NO: 43596 - protein, 1302 aa, Homo sapiens [sequence omitted]

SEQ ID NO: 43597 - protein, 1314 aa, Homo sapiens
MAAPQLGPGQTTQLPLSESSVPGAPHGPPPGLRPDAPGGGGGGGGVPGKPPSQFVYVFTTHLANTAAEAVLQGRADSILAYHQQNVPRAKLDQAPKVPPTPEPLPLSTPSAGTPQSQPPPLPPPPPPAPGSAPPALPPEGPPEDSSQDLAPNSVGAASTGGGTGGTHPNTPTATTANNPLPPGGDPSSAPGPALLGEAAAPGNGQRSLVGSEGLSKEQLEHRERSLQTLRDIERLLLRSGETEPFLKGPPGGAGEGGPPAQAPPPPQQPPTAPPSGLKKYEEPLQSMISQTQSLGGPPLEHEVPGHPPGGDMGQQMNMMIQRLGQDSLTPEQVAWRKLQEEYYEEKRRKEEQIGLHGSRPLQDMMGMGGMMVRGPPPPYHSKPGDQWPPGMGAQLRGPMDVQDPMQLRGGPPFPGPRFPGNQIQRVPGFGGMQSMPMEVPMNAMQRPVRPGMGWTEDLPPMGGPSNFAQNTMPYPGGQGEAERFMTPRVREELLRHQLLEKRSMGMQRPLGMAGSGMGQSMEMERMMQAHRQMDPAMFPGQMAGGEGLAGTPMGMEFGGGRGLLSPPMGQSGLREVDPPMGPGNLNMNMNVNMNMNMNLNVQMTPQQQMLMSQKMRGPGDLMGPQGLSPEEMARVRAQNSSGVMGGPQKMLMPSQFPNQGQQGFSGGQGPYQAMSQDMGNTQDMFSPDQSSMPMSNVGTTRLSHMPLPPASNPPGTVHSAPNRGLGRRPSDLTISINQMGSPGMGHLKSPTLSQVHSPLVTSPSANLKSPQTPSQMVPLPSANPPGPLKSPQVLGSSLSVRSPTGSPSRLKSPSMAVPSPGWVASPKTAMPSPGVSQNKQPPLNMNSSTTLSNMEQGTLPPSGPRSSSSAPPANPPSGLMNPSLPFTSSPDPTPSQNPLSLMMTQMSKYAMPSSTPLYHNAIKTIATSDDELLPDRPLLPPPPPPQGSGPGISNSQPSQMHLNSAAAQSPMGMNLPGQQPLSHEPPPAMLPSPTPLGSNIPLHPNAQGTGGPPQNSMMMAPGGPDSLNAPCGPVPSSSQMMPFPPRLQQPHGAMAPTGGGGGGPGLQQHYPSGMALPPEDLPNQPPGPMPPQQHLMGKAMAGRMGDAYPPGVLPGVASVLNDPELSEVIRPTPTGIPEFDLSRIIPSEKPSSTLQYFPKSENQPPKAQPPNLHLMNLQNMMAEQTPSRPPNLPGQQGVQRGLNMSMCHPGQMSLLGRTGVPPQQGMVPHGLHQGVMSPPQGLMTQQNFMLMKQRGVGGEVYSQPPHMLSPQGSLMGPPPQQNLMVSHPLRQRSVSLDSQMGYLPAPGGMANLPF

SEQ ID NO: 43598 - protein, 413 aa, Homo sapiens
MFGGYSLYYFNRKTFSFVMPSLVEEIPLDKDDLGFITSSQSAAYAISKFVSGVLSDQMSARWLFSSGLLLVGLVNIFFAWSSTVPVFAALWFLNGLAQGLGWPPCGKVLRKWFEPSQFGTWWAILSTSMNLAGGLGPILATILAQSYSWRSTLALSGALWVVVSFLCLLLIHNEPADVGLRNLDPMPSEGKKGSLKEESTLQELLLSPYLWVLSTGYLVVFGVKTCCTDWGQFFLIQEKGQSALVGSSYMSALEVGGLVGSIAAGYLSDRAMAKAGLSNYGNPRHGLLLFMMAGMTVSMYLFRVTVTSDSPKLWILVLGAVFGFSSYGPIALFGVIANESAPPNLCGTSHAIVGLMANVGGFLAGLPFSTIAKHYSWSTAFWVAEVICAASTAAFFLLRNIRTKMGRVSKKAE

SEQ ID NO: 43599 - protein, 696 aa, Homo sapiens
MLPQASILVTTRPSAIGRIPSKYVGRYGEICGFSDTNLQKLYFQLRLNQPYCGYAVGGSGVSATPAQRDHLVQMLSRNLEGHHQIAAACFLPSYCWLVCATLHFLHAPTPAGQTLTSIYTSFLRLNFSGETLDSTDPSNLSLMAYAARTMGKLAYEGVSSRKTYFSEEDVCGCLEAGIRTEEEFQLLHIFRRDALRFFLAPCVEPGRAGTFVFTVPAMQEYLAALYIVLGLRKTTLQKVGKEVAELVGRVGEDVSLVLGIMAKLLPLRALPLLFNLIKVVPRVFGRMVGKSREAVAQAMVLEMFREEDYYNDDVLDQMGASILGVEGPRRHPDEPPEDEVFELFPMFMGGLLSAHNRAVLAQLGCPIKNLDALENAQAIKKKLGKLGRQVLPPSELLDHLFFHYEFQNQRFSAEVLSSLRQLNLAGVRMTPVKCTVVAAVLGSGRHALDEVNLASCQLDPAGLRTLLPVFLRARKLGLQLNSLGPEACKDLRDLLLHDQCQITTLRLSNNPLTAAGVAVLMEGLAGNTSVTHLSLLHTGLGDEGLELLAAQLDRNRQLQELNVAYNGAGDTAALALARAAREHPSLELLHLYFNELSSEGRQVLRDLGGAAEGGARVVVSLTEGTAVSEYWSVILSEVQRNLNSWDRARVQRHLELLLRDLEDSRGATLNPWRKAQLLRVEGEVRALLEQLGSSGS

SEQ ID NO: 43600 - protein, 878 aa, Homo sapiens
MKDAFQPHHHHHHHLSPHPPGTVDKKMVEKCWKLMDKVVRLCQNPKLALKNSPPYILDLLPDTYQHLRTILSRYEGKMETLGENEYFRVFMENLMKKTKQTISLFKEGKERMYEENSQPRRNLTKLSLIFSHMLAELKGIFPSGLFQGDTFRITKADAAEFWRKAFGEKTIVPWKSFRQALHEVHPISSGLEAMALKSTIDLTCNDYISVFEFDIFTRLFQPWSSLLRNWNSLAVTHPGYMAFLTYDEVKARLQKFIHKPGSYIFRLSCTRLGQWAIGYVTADGNILQTIPHNKPLFQALIDGFREGFYLFPDGRNQNPDLTGLCEPTPQDHIKVTQEQYELYCEMGSTFQLCKICAENDKDVKIEPCGHLMCTSCLTSWQESEGQGCPFCRCEIKGTEPIVVDPFDPRGSGSLLRQGAEGAPSPNYDDDDDERADDTLFMMKELAGAKVERPPSPFSMAPQASLPPVPPRLDLLPQRVCVPSSASALGTASKAASGSLHKDKPLPVPPTLRDLPPPPPPDRPYSVGAESRPQRRPLPCTPGDCPSRDKLPPVPSSRLGDSWLPRPIPKVPVSAPSSSDPWTGRELTNRHSLPFSLPSQMEPRPDVPRLGSTFSLDTSMSMNSSPLVGPECDHPKIKPSSSANAIYSLAARPLPVPKLPPGEQCEGEEDTEYMTPSSRPLRPLDTSQSSRACDCDQQIDSCTYEAMYNIQSQAPSITESSTFGEGNLAAAHANTGPEESENEDDGYDVPKPPVPAVLARRTLSDISNASSSFGWLSLDGDPTTNVTEGSQVPERPPKPFPRRINSERKAGSCQQGSGPAASAATASPQLSSEIENLMSQGYSYQDIQKALVIAQNNIEMAKNILREFVSISSPAHVAT

SEQ ID NO: 43601 - protein, 586 aa, Homo sapiens
MNPTNTVFDAKRLIGRRFDDAVVQSDMKHWPFMVVNDAGRPKVQVEYKGETKSFYPEEVSSMVLTKMKEIAEAYLGKTVTNAVVTVPAYFNDSQRQATKDAGTIAGLNVLRIINEPTAAAIAYGLDKKVGAERNVLIFDLGGGTFDVSILTIEDGIFEVKSTAGDTHLGGEDFDNRMVNHFIAEFKRKHKKDISENKRAVRRLRTACERAKRTLSSSTQASIEIDSLYEGIDFYTSITRARFEELNADLFRGTLDPVEKALRDAKLDKSQIHDIVLVGGSTRIPKIQKLLQDFFNGKELNKSINPDEAVAYGAAVQAAILSGDKSENVQDLLLLDVTPLSLGIETAGGVMTVLIKRNTTIPTKQTQTFTTYSDNQPGVLIQVYEGERAMTKDNNLLGKFELTGIPPAPRGVPQIEVTFDIDANGILNVSAVDKSTGKENKITITNDKGRLSKEDIERMVQEAEKYKAEDEKQRDKVSSKNSLESYAFNMKATVEDEKLQGKINDEDKQKILDKCNEIINWLDKNQTAEKEEFEHQQKELEKVCNPIITKLYQSAGGMPGGMPGGFPGGGAPPSGGASSGPTIEEVD

SEQ ID NO: 43602 - protein, 141 aa, Homo sapiens [sequence omitted]

SEQ ID NO: 43603 - protein, 27 aa, Homo sapiens
MSYSGLYQCTAGNEAGKESCVVRVTVQ

SEQ ID NO: 43604 - protein, 706 aa, Homo sapiens
MKARTNYEKAISQGHQAFLLEGDSSSRDVFSCNVGNLQPGSKAAVTLKYVQELPLEADGALRFVLPAVLNPRYQFSGSSKDSCLNVKTPIVPVEDLPYTLSMVATIDSQHGIEKVQSNCPLSPTEYLGEDKTSAQVSLAAGHKFDRDVELLIYYNEVHTPSVVLEMGMPNMKPGHLMGDPSAMVSFYPNIPEDQPSNTCGEFIFLMDRSGSMQSPMSSQDTSQLRIQAAKETLILLLKSLPIGCYFNIYGFGSSYEACFPESVKYTQQTMEEALGRVKLMQADLGGTEILAPLQNIYRGPSIPGHPLQLFVFTDGEVTDTFSVIKEVRINRQKHRCFSFGIGEGTSTSLIKGIARASGGTSEFITGKDRMQSKALRTLKRSLQPVVEDVSLSWHLPPGLSAKMLSPEQTVIFRGQRLISYAQLTGRMPAAETTGEVCLKYTLQGKTFEDKVTFPLQPKPDVNLTIHRLAAKSLLQTKDMGLRETPASDKKDALNLSLESGVISSFTAFIAINKELNKPVQGPLAHRDVPRPILLGASAPLKIKCQSGFRKALHSDRPPSASQPRGELMCYKAKTFQMDDYSLCGLISHKDQHSPGFGENHLVQLIYHQNANGSWDLNEDLAKILGMSLEEIMAAQPAELVDSSGWATILAVIWLHSNGKDLKCEWELLERKAVAWMRAHAGSTMPSVVKAAITFLKSSVDPAIFAF

SEQ ID NO: 43605 - protein, 540 aa, Homo sapiens
MEVLSPASPGGLSDGNPSLSDPSTPRGASPLGPGSAAGSGAAASGGLGLGLGGRSAASSSVSFSPGGGGGGAAAAAAAACRGMSWTPAETNALIAVWGNERLVEARYQQLEGAGTVFGSKAPGPAMYERVSRALAELGYERTPSQCRERIKTLRRCYSRVKEHGVGKRKSSYTFEQLEQVFGQGGWDAQPCQPVLINSSGLYQELESDGSTMEDYSQEDWGNHSQDLHGYPTDQELDEIPVTKRTLKIKQESSEEAQKRDIMQNIVQILESVQLKWELFQSWTDFSRLHLSNKLAIFGIGYNTRWKEDIRYHYAEISSQVPLGKRLREYFNSEKPEGRIIMTRVQKMNWKNVYYKFLEITISEARCLELHMEIDWIPIAHSKPTGGNVVQYLLPGGIPKSPGLYAIGYEECIERPLSPHMEQSSLDPGKEGRVDLETLSAQASLQVEIEPTRIIYCYLGIAEVRTLQQCLFLHFQANTKTFSKDWVGINGFLSQNCIVDPGVSPKSIYIKFVEVERDFLSAGSLVECLEKAIGYPLKFNN

SEQ ID NO: 43606 - protein, 120 aa, Homo sapiens
MQNSPDPEEEEEVLEEEDGGETSSQADSVLLQEMQALTQTFNNNWSYEGEGPGRWAGRGGSTCSGPGSGLCALYMANRTLTASEQSLADLGGQQYLSYSASGEKFAFLRKEQGSRAKFKC

SEQ ID NO: 43607 - protein, 276 aa, Homo sapiens
MLAGELPWDQPSDSCQEYSDWKEKKTYLNPWKKIDSAPLALLHKILVENPSARITIPDIKKDRWYNKPLKKGAKRPRVTSGGVSESPSGFSKHIQSNLDFSPVNSASSEENVKYSSSQPEPRTGLSLWDTSPSYIDKLVQGISFSQPTCPDHMLLNSQLLGTPGSSQNPWQRLVKRMTRFFTKLDADKSYQCLKETCEKLGYQWKKSCMNQVTISTTDRRNNKLIFKVNLLEMDDKILVDFRLSKGDGLEFKRHFLKIKGKLIDIVSSQKIWLPAT

SEQ ID NO: 43608 - protein, 280 aa, Homo sapiens [sequence omitted]

SEQ ID NO: 43609 - protein, 974 aa, Homo sapiens
MAGNKSGDVKYVTYMVNVLEHASISKGLQDQIVSLGATVHFTCDVHGNPAPNCTWFHNAQPIHPSARHLTAGNGLKISGVTVEDVGMYQCVADNGIGFMHSTGRLEIENDGGFKPVIITAPVSAKVADGDFVTLSCNASGLPVPVIRWYDSHGLITSHPSQVLRSKSRKSQLSRPEGLNLEPVYFVLSQAGASSLHIQAVTQEHAGKYICEAANEHGTTQAEASLMVVPFETNTKAETVTLPDAAQNDDRSKRDGSETGLLSSFPVKVHPSAVESAPEKNASGISVPDAPIILSPPQTHTPDTYNLVWRAGKDGGLPINAYFVKYRKLDDGVGMLGSWHTVRVPGSENELHLAELEPSSLYEVLMVARSAAGEGQPAMLTFRTSKEKTASSKNTQASSPPVGIPKYPVVSEAANNNFGVVLTDSSRHSGVPEAPDRPTISTASETSVYVTWIPRANGGSPITAFKVEYKRMRTSNWLVAAEDIPPSKLSVEVRSLEPGSTYKFRVIAINHYGESFRSSASRPYQVVGFPNRFSSRPITGPHIAYTEAVSDTQIMLKWTYIPSSNNNTPIQGFYIYYRPTDSDNDSDYKRDVVEGSKQWHMIGHLQPETSYDIKMQCFNEGGESEFSNVMICETKVKRVPGASEYPVKDLSTPPNSLGSGGNVGPATSPARSSDMLYLIVGCVLGVMVLILMVFIAMCLWKNRQQNTIQKYDPPGYLYQGSDMNGQMVDYTTLSGASQINGNVHGGFLTNGGLSSGYSHLHHKVPNAVNGIVNGSLNGGLYSGHSNSLTRTHVDFEHPHHLVNGGGMYTAVPQIDPLECVNCRNCRNNNRCFTKTNSTFSSSPPPVVPVVAPYPQDGLEMKPLSHVKVPVCLTSAVPDCGQLPEESVKDNVEPVPTQRTCCQDIVNDVSSDGSEDPAEFSRGDSCAHSETEINIVSWNALILPPVPEGCAEKTMWSPPGIPLDSPTEVLQQPRET

SEQ ID NO: 43610 - protein, 160 aa, Homo sapiens
MAGNKSGDVKYVTYMVNVLEHASISKGLQDQIVSLGATVHFTCDVHGNPAPNCTWFHNAQPIHPSARHLTAGNGLKISGVTVEDVGMYQCVADNGIGFMHSTGRLEIENGRLLGRASHKNFYFTDGLLLWSKMKLFLLKENNPSTVQERCSFSMVLASDR

SEQ ID NO: 43611 - protein, 665 aa, Homo sapiens
MIAAIHSSSADATSSSNYHSFVTASSTSVDDALPLPLPVPQPKHASQKTVYSSFARPDVTTEPFGPDNCLHFNMTPNCQYRPQSVPPHHNKLEQHQVYGARSEPPASMGLRYNTYVAPGRNASGHHSKPCSRVEYVSSLSSSVRNTCYPEDIPPYPTIRRVQSLHAPPSSMIRSVPISRTEVPPDDEPAYCPRPLYQYKPYQSSQARSDYHVTQLQPYFENGRVHYRYSPYSSSSSSYYSPDGALCDVDAYGTVQLRPLHRLPNRDFAFYNPRLQGKSLYSYAGLAPRPRANVTGYFSPNDHNVVSMPPAADVKHTYTSWDLEDMEKYRMQSIRRESRARQKVKGPVMSQYDNMTPAVQDDLGGIYVIHLRSKSDPGKTGLLSVAEGKESRHAAKAISPEGEDRFYRRHPEAEMDRAHHHGGHGSTQPEKPSLPQKQSSLRSRKLPDMGCSLPEHRAHQEASHRQFCESKNGPPYPQGAGQLDYGSKGIPDTSEPVSYHNSGVKYAASGQESLRLNHKEVRLSKEMERPWVRQPSAPEKHSRDCYKEEEHLTQSIVPPPKPERSHSLKLHHTQNVERDPSVLYQYQPHGKRQSSVTVVSQYDNLEDYHSLPQHQRGVFGGGGMGTYVPPGFPHPQSRTYATALGQGAFLPAELSLQHPETQIHAE

SEQ ID NO: 43612 - protein, 600 aa, Homo sapiens
MLGKLNMLRNDGHFCDITIRVQDKIFRAHKVVLAACSDFFRTKLVGQAEDENKNVLDLHHVTVTGFIPLLEYAYTATLSINTENIIDVLAAASYMQMFSVASTCSEFMKSSILWNTPNSQPEKGLDAGQENNSNCNFTSRDGSISPVSSECSVVERTIPVCRESRRKRKSYIVMSPESPVKCGTQTSSPQVLNSSASYSENRNQPVDSSLAFPWTFPFGIDRRIQPEKVKQAENTRTLELPGPSETGRRMADYVTCESTKTTLPLGTEEDVRVKVERLSDEEVHEEVSQPVSASQSSLSDQQTVPGSEQVQEDLLISPQSSSIGSVDEGVSEGLPTLQSTSSTNAPPDDDDRLENVQYPYQLYIAPSTSSTERPSPNGPDRPFQCPTCGVRFTRIQNLKQHMLIHSGIKPFQCDRCGKKFTRAYSLKMHRLKHEGKRCFRCQICSATFTSFGEYKHHMRVSRHIIRKPRIYECKTCGAMFTNSGNLIVHLRSLNHEASELANYFQSSDFLVPDYLNQEQEETLVQYDLGEHGFESNSSVQMPVISQVSSTQNCESTFPLGSLGGLAEKEEEVPEQPKSSACAEATRDDPPKSELSSITIE

SEQ ID NO: 43613 - protein, 377 aa, Homo sapiens [sequence omitted]

SEQ ID NO: 43614 - protein, 1608 aa, Homo sapiens
MTRVRLDFLDQLAKFWELQGSTLKIPVVERKILDLYALSKIVASKGGFEMVTKEKKWSKVGSRLGYLPGKGTGSLLKSHYERILYPYELFQSGVSLMGVQMPNLDLKEKVEPEVLSTDTQTSPEPGTRMNILPKRTRRVKTQSESGDVSRNTELKKLQIFGAGPKVVGLAMGTKDKEDEVTRRRKVTNRSDAFNMQMRQRKGTLSVNFVDLYVCMFCGRGNNEDKLLLCDGCDDSYHTFCLIPPLPDVPKGDWRCPKCVAEECSKPREAFGFEQAVREYTLQSFGEMADNFKSDYFNMPVHMVPTELVEKEFWRLVSSIEEDVIVEYGADISSKDFGSGFPVKDGRRKILPEEEEYALSGWNLNNMPVLEQSVLAHINVDISGMKVPWLYVGMCFSSFCWHIEDHWSYSINYLHWGEPKTWYGVPSHAAEQLEEVMRELAPELFESQPDLLHQLVTIMNPNVLMEHGVPVYRTNQCAGEFVVTFPRAYHSGFNQGYNFAEAVNFCTADWLPIGRQCVNHYRRLRRHCVFSHEELIFKMAADPECLDVGLAAMVCKELTLMTEEETRLRESVVQMGVLMSEEEVFELVPDDERQCSACRTTCFLSALTCSCNPERLVCLYHPTDLCPCPMQKKCLRYRYPLEDLPSLLYGVKVRAQSYDTWVSRVTEALSANFNHKKDLIELRVMLEDAEDRKYPENDLFRKLRDAVKEAETCASVAQLLLSKKQKHRQSPDSGRTRTKLTVEELKAFVQQLFSLPCVISQARQVKNLLDDVEEFHERAQEAMMDETPDSSKLQMLIDMGSSLYVELPELPRLKQELQQARWLDEVRLTLSDPQQVTLDVMKKLIDSGVGLAPHHAVEKAMAELQELLTVSERWEEKAKVCLQARPRHSVASLESIVNEAKNIPAFLPNVLSLKEALQKAREWTAKVEAIQSGSNYAYLEQLESLSAKGRPIPVRLEALPQVESQVAAARAWRERTGRTFLKKNSSHTLLQVLSPRTDIGVYGSGKNRRKKVKELIEKEKEKDLDLEPLSDLEEGLEETRDTAMVVAVFKEREQKEIEAMHSLRAANLAKMTMVDRIEEVKFCICRKTASGFMLQCELCKDWFHNSCVPLPKSSSQKKGSSWQAKEVKFLCPLCMRSRRPRLETILSLLVSLQKLPVRLPEGEALQCLTERAMSWQDRARQALATDELSSALAKLSVLSQRMVEQAAREKTEKIISAELQKAAANPDLQGHLPSFQQSAFNRVVSSVSSSPRQTMDYDDEETDSDEDIRETYGYDMKDTASVKSSSSLEPNLFCDEEIPIKSEEVVTHMWTAPSFCAEHAYSSASKSCSQGSSTPRKQPRKSPLVPRSLEPPVLELSPGAKAQLEELMMVGDLLEVSLDETQHIWRILQATHPPSEDRFLHIMEDDSMEEKPLKVKGKDSSEKKRKRKLEKVEQLFGEGKQKSKELKKMDKPRKKKLKLGADKSKELNKLAKKLAKEEERKKKKEKAAAAKVELVKESTEKKREKKVLDIPSKYDWSGAEESDDENAVCAAQNCQRPCKDKVDWVQCDGGCDEWFHQVCVGVSPEMAENEDYICINCAKKQGPVSPGPAPPPSFIMSYKLPMEDLKETS

SEQ ID NO: 43615 - protein, 207 aa, Homo sapiens
MALGHPQLQQVTSPSRPSHAVIPADQDCSSRSLSSSAVESEATHQRKLRQKQLQQQFRERMEKQQVRVSTPSAEKSEAAPPAPPVTHSTPVTVSEPLLEKDFLAGVTQELIKTLEDNSEKWAVTPDAGDGVVKPSSRADPAQTSDTLALNNQMVTQNRTPHSVCHQKPQAKSGSWDLQTYSADQRTTGNWESHRKSQDMKKRKYDPS

SEQ ID NO: 43616 - protein, 404 aa, Homo sapiens
MIFGYLDVRDKGRAAQVCTAWRDAAYHKSVWRGVEAKLHLRRANPSLFPSLQARGIRRVQILSLRRSLSYVIQGMANIESLNLSGCYNLTDNGLGHAFVQEIGSLRALNLSLCKQITDSSLGRIAQYLKGLEVLELGGCSNITNTGLLLIAWGLQRLKSLNLRSCRHLSDVGIGHLAGMTRSAAEGCLGLEQLTLQDCQKLTDLSLKHISRGLTGLRLLNLSFCGGISDAGLLHLSHMGSLRSLNLRSCDNISDTGIMHLAMGSLRLSGLDVSFCDKVGDQSLAYIAQGLDGLKSLSLCSCHISDDGINRMVRQMHGLRTLNIGQCVRITDKGLELIAEHLSQLTGIDLYGCTRITKRGLERITQLPCLKVLNLGLWQMTDSEKEARGDFSPLFTVRTRGSSRR

SEQ ID NO: 43617 - protein, 543 aa, Homo sapiens
MNRLSMENRTEPITKDLDFQLQDPFLLYRNARLSIYGIWFYDKEECQRIAELMKNLTQYEQLKAHQGTGAGISPVILNSGEGKEVDILRMLIKAKDEYTKCKTCSEPKKITSSSAIYDNPNLIKPIPVKPSENQQQRIPQPNQTLDPEPQHLSLTALFGKQDKATCQETVEPPQTLHQQQQQQQQQQEKLPIRQGVVRSLSYEEPRRHSPPIEKQLCPAIQKLMVRSADLHPLSELPENRPCENGSTHSAGEFFTGPVQPGSPHNIGTSRGVQNASRTQNLFEKLQSTPGAANKCDPSTPAPASSAALNRSRAPTSVTPVAPGKGLAQPPQAYFNGSLPPQTVGHQAHGREQSTLPRQTLPISGSQTGSSGVISPQELLKKLQIVQQEQQLHASNRPALAAKFPVLAQSSGTGKPLESWINKTPNTEQQTPLFQVISPQRIPATAAPSLLMSPMVFAQPTSVPPKERESGLLPVGGQEPPAAATSLLLPIQSPEPSVITSSPLTKLQLQEALLYLIQNDDNFLNIIYEAYLFSMTQAAMKKTM

SEQ ID NO: 43618 - protein, 2179 aa, Homo sapiens
MYIPEENHQGSNYGSPRPAHANMNANAAAGLAPEHIPTPGAALSWQAAIDAARQAKLMGSAGNATISTVSSTQRKRQQYGKPKKQGSTTATRPPRALLCLTLKNPIRRACISIVEWKPFEIIILLTIFANCVALAIYIPFPEDDSNATNSNLERVEYLFLIIFTVEAFLKVIAYGLLFHPNAYLRNGWNLLDFIIVVVGLFSAILEQATKADGANALGGKGAGFDVKALRAFRVLRPLRLVSGVPSLQVVLNSIIKAMVPLLHIALLVLFVIIIYAIIGLELFMGKMHKTCYNQEGIADVPAEDDPSPCALETGHGRQCQNGTVCKPGWDGPKHGITNFDNFAFAMLTVFQCITMEGWTDVLYWVNDAVGRDWPWIYFVTLIIIGSFFVLNLVLGVLSGEFSKEREKAKARGDFQKLREKQQLEEDLKGYLDWITQAEDIDPENEDEGMDEEKPRNMSMPTSETESVNTENVAGGDIEGENCGARLAHRISKSKFSRYWRRWNRFCRRKCRAAVKSNVFYWLVIFLVFLNTLTIASEHYNQPNWLTEVQDTANKALLALFTAEMLLKMYSLGLQAYFVSLFNRFDCFVVCGGILETILVETKIMSPLGISVLRCVRLLRIFKITRYWNSLSNLVASLLNSVRSIASLLLLLFLFIIIFSLLGMQLFGGKFNFDEMQTRRSTFDNFPQSLLTVFQILTGEDWNSVMYDGIMAYGGPSFPGMLVCIYFIILFICGNYILLNVFLAIAVDNLADAESLTSAQKEEEEEKERKKLARTASPEKKQELVEKPAVGESKEEKIELKSITADGESPPATKINMDDLQPNENEDKSPYPNPETTGEEDEEEPEMPVGPRPRPLSELHLKEKAVPMPEASAFFIFSSNNRFRLQCHRIVNDTIFTNLILFFILLSSISLAAEDPVQHTSFRNHILFYFDIVFTTIFTIEIALKILGNADYVFTSIFTLEIILKMTAYGAFLHKGSFCRNYFNILDLLVVSVSLISFGIQSSAINVVKILRVLRVLRPLRAINRAKGLKHVVQCVFVAIRTIGNIVIVTTLLQFMFACIGVQLFKGKLYTCSDSSKQTEAECKGNYITYKDGEVDHPIIQPRSWENSKFDFDNVLAAMMALFTVSTFEGWPELLYRSIDSHTEDKGPIYNYRVEISIFFIIYIIIIAFFMMNIFVGFVIVTFQEQGEQEYKNCELDKNQRQCVEYALKARPLRRYIPKNQHQYKVWYVVNSTYFEYLMFVLILLNTICLAMQHYGQSCLFKIAMNILNMLFTGLFTVEMILKLIAFKPKGYFSDPWNVFDFLIVIGSIIDVILSETNHYFCDAWNTFDALIVVGSIVDIAITEVNPAEHTQCSPSMNAEENSRISITFFRLFRVMRLVKLLSRGEGIRTLLWTFIKSFQALPYVALLIVMLFFIYAVIGMQVFGKIALNDTTEINRNNNFQTFPQAVLLLFRCATGEAWQDIMLACMPGKKCAPESEPSNSTEGETPCGSSFAVFYFISFYMLCAFLIINLFVAVIMDNFDYLTRDWSILGPHHLDEFKRIWAEYDPEAKGRIKHLDVVTLLRRIQPPLGFGKLCPHRVACKRLVSMNMPLNSDGTVMFNATLFALVRTALRIKTEGNLEQANEELRAIIKKIWKRTSMKLLDQVVPPAGDDEVTVGKFYATFLIQEYFRKFKKRKEQGLVGKPSQRNALSLQAGLRTLHDIGPEIRRAISGDLTAEEELDKAMKEAVSAASEDDIFRRAGGLFGNHVSYYQSDGRSAFPQTFTTQRPLHINKAGSSQGDTESPSHEKLVDSTFTPSSYSSTGSNANINNANNTALGRLPRPAGYPSTVSTVEGHGPPLSPAIRVQEVAWKLSSNRCHSRESQAAMAGQEETSQDETYEVKMNHDTEACSEPSLLSTEMLSYQDDENRQLTLPEEDKRDIRQSPKRGFLRSASLGRRASFHLECLKRQKDRGGDISQKTVLPLHLVHHQALAVAGLSPLLQRSHSPASFPRPFATPPATPGSRGWPPQPVPTLRLEGVESSEKLNSSFPSIHCGSWAETTPGGGGSSAARRVRPVSLMVPSQAGAPGRQFHGSASSLVEAVLISEGLGQFAQDPKFIEVTTQELADACDMTIEEMESAADNILSGGAPQSPNGALLPFVNCRDAGQDRAGGEEDAGCVRARGRPSEEELQDSRVYVSSL

SEQ ID NO: 43619 - protein, 2159 aa, Homo sapiens
MYIPEENHQGSNYGSPRPAHANMNANAAAGLAPEHIPTPGAALSWQAAIDAARQAKLMGSAGNATISTVSSTQRKRQQYGKPKKQGSTTATRPPRALLCLTLKNPIRRACISIVEWKPFEIIILLTIFANCVALAIYIPFPEDDSNATNSNLERVEYLFLIIFTVEAFLKVIAYGLLFHPNAYLRNGWNLLDFIIVVVGLFSAILEQATKADGANALGGKGAGFDVKALRAFRVLRPLRLVSGVPSLQVVLNSIIKAMVPLLHIALLVLFVIIIYAIIGLELFMGKMHKTCYNQEGIADVPAEDDPSPCALETGHGRQCQNGTVCKPGWDGPKHGITNFDNFAFAMLTVFQCITMEGWTDVLYWVNDAVGRDWPWIYFVTLIIIGSFFVLNLVLGVLSGEFSKEREKAKARGDFQKLREKQQLEEDLKGYLDWITQAEDIDPENEDEGMDEEKPRNMSMPTSETESVNTENVAGGDIEGENCGARLAHRISKSKFSRYWRRWNRFCRRKCRAAVKSNVFYWLVIFLVFLNTLTIASEHYNQPNWLTEVQDTANKALLALFTAEMLLKMYSLGLQAYFVSLFNRFDCFVVCGGILETILVETKIMSPLGISVLRCVRLLRIFKITRYWNSLSNLVASLLNSVRSIASLLLLLFLFIIIFSLLGMQLFGGKFNFDEMQTRRSTFDNFPQSLLTVFQILTGEDWNSVMYDGIMAYGGPSFPGMLVCIYFIILFICGNYILLNVFLAIAVDNLADAESLTSAQKEEEEEKERKKLARTASPEKKQELVEKPAVGESKEEKIELKSITADGESPPATKINMDDLQPNENEDKSPYPNPETTGEEDEEEPEMPVGPRPRPLSELHLKEKAVPMPEASAFFIFSSNNRFRLQCHRIVNDTIFTNLILFFILLSSISLAAEDPVQHTSFRNHILFYFDIVFTTIFTIEIALKMTAYGAFLHKGSFCRNYFNILDLLVVSVSLISFGIQSSAINVVKILRVLRVLRPLRAINRAKGLKHVVQCVFVAIRTIGNIVIVTTLLQFMFACIGVQLFKGKLYTCSDSSKQTEAECKGNYITYKDGEVDHPIIQPRSWENSKFDFDNVLAAMMALFTVSTFEGWPELLYRSIDSHTEDKGPIYNYRVEISIFFIIYIIIIAFFMMNIFVGFVIVTFQEQGEQEYKNCELDKNQRQCVEYALKARPLRRYIPKNQHQYKVWYVVNSTYFEYLMFVLILLNTICLAMQHYGQSCLFKIAMNILNMLFTGLFTVEMILKLIAFKPKGYFSDPWNVFDFLIVIGSIIDVILSETNHYFCDAWNTFDALIVVGSIVDIAITEVNPAEHTQCSPSMNAEENSRISITFFRLFRVMRLVKLLSRGEGIRTLLWTFIKSFQALPYVALLIVMLFFIYAVIGMQVFGKIALNDTTEINRNNNFQTFPQAVLLLFRCATGEAWQDIMLACMPGKKCAPESEPSNSTEGETPCGSSFAVFYFISFYMLCAFLIINLFVAVIMDNFDYLTRDWSILGPHHLDEFKRIWAEYDPEAKGRIKHLDVVTLLRRIQPPLGFGKLCPHRVACKRLVSMNMPLNSDGTVMFNATLFALVRTALRIKTEGNLEQANEELRAIIKKIWKRTSMKLLDQVVPPAGDDEVTVGKFYATFLIQEYFRKFKKRKEQGLVGKPSQRNALSLQAGLRTLHDIGPEIRRAISGDLTAEEELDKAMKEAVSAASEDDIFRRAGGLFGNHVSYYQSDGRSAFPQTFTTQRPLHINKAGSSQGDTESPSHEKLVDSTFTPSSYSSTGSNANINNANNTALGRLPRPAGYPSTVSTVEGHGPPLSPAIRVQEVAWKLSSNRCHSRESQAAMAGQEETSQDETYEVKMNHDTEACSEPSLLSTEMLSYQDDENRQLTLPEEDKRDIRQSPKRGFLRSASLGRRASFHLECLKRQKDRGGDISQKTVLPLHLVHHQALAVAGLSPLLQRSHSPASFPRPFATPPATPGSRGWPPQPVPTLRLEGVESSEKLNSSFPSIHCGSWAETTPGGGGSSAARRVRPVSLMVPSQAGAPGRQFHGSASSLVEAVLISEGLGQFAQDPKFIEVTTQELADACDMTIEEMESAADNILSGGAPQSPNGALLPFVNCRDAGQDRAGGEEDAGCVRARGRPSEEELQDSRVYVSSL

SEQ ID NO: 43620 - protein, 246 aa, Homo sapiens
MDTGTSGSATAAQPADNLLGDIDDLEDFVYSPAPQGVTVRCRIIRDKRGMDRGLFPTYYMYLEKEENQKIFLLAARKRKKSKTANYLISIDPVDLSREGESYVGKLRSNLMGTKFTVYDRGICPMKGRGLVGAAHTRQELAAISYNHDSLLSRWQNRTMENLVELHNKAPVWNSDTQSYVLNFRGRVTQASVKNFQIVHKNDPDYIVMQFGRVADDVFTLDYNYPLCAVQAFGIGLSSFDSKLACE

SEQ ID NO: 43621 - protein, 681 aa, Homo sapiens
MLRKAQEFFQTCDAEGKGFIARKDMQRLHKELPLSLEELEDVFDALDADGNGYLTPQEFTTGFSHFFFSQNNPSQEDAGEQVAQRHEEKVYLSRGDEDLGDMGEDEEAQFRMLMDRLGAQKVLEDESDVKQLWLQLKKEEPHLLSNFEDFLTRIISQLQEAHEEKNELECALKRKIAAYDEEIQHLYEEMEQQIKSEKEQFLLKDTERFQARSQELEQKLLCKEQELEQLTQKQKRLEGQCTALHHDKHETKAENTKLKLTNQELARELERTSWELQDAQQQLESLQQEACKLHQEKEMEVYRVTESLQREKAGLLKQLDFLRERNKHLRDERDICFQKNKAAKANTAASRASWKKRSGSVIGKYVDSRGILRSQSEEEEEVFGIPRRSSLGLSGYPLTEEEPGTGEPGPGGPYPRPLRRIISVEEDPLPQLLDGGFEQPLSKCSEEEEVSDQGVQGQIPEAPPLKLTPTSPRGQPVGKEALCKEESSPSAPDRLFKIVFVGNSAVGKTSFLRRFCEDRFSPGMAATVGIDYRVKTLNVDNSQVALQLWDTAGQERYRCITQQFFRKADGVIVMYDLTDKQSFLSVRRWLSSVEEAVGDRVPVLLLGNKLDNEKEREVPRGLGEQLATENNLIFYECSAYSGHNTKESLLHLARFLKEQEDTVREDTIQVGHPAKKKSCCG

SEQ ID NO: 43622 - protein, 227 aa, Homo sapiens [sequence omitted]

SEQ ID NO: 43623 - protein, 183 aa, Homo sapiens
MLEVCEEQKCEEEVFPLAMNYLDRFLAGVPTPKSHLQLLGAVCMFLASKLKETSPLTAEKLCIYTDNSIKPQELLEWELVVLGKLKWNLAAVTPHDFIEHILRKLPQQREKLSLIRKHAQTFIALCATDFKFAMYPPSMIATGSVGAAICGLQQDEEVSSLTCDALTELLAKITNTDVWRNKI

SEQ ID NO: 43624 - protein, 205 aa, Homo sapiens [sequence omitted]

SEQ ID NO: 43625 - protein, 505 aa, Homo sapiens
MLLHSLPCFIEKDLKEALTQFIEEESLSDYDRDAEASLAAVKSGEVDLHQLASTWAKAYAETTLEHARPEEPSWDEDFADVYHDLIHSPASETLLNLEHNYFVSISELIGERDVELKKLRERQGIEMEKVMQELGKSLTDQDVNSLAAQHFESQQDLENKWSNELKQSTAIQKQEYQEWVIKLHQDLKNPNNSSLSEEIKVQPSQFRESVEAIGRIYEEQRKLEESFTIHLGAQLKTMHNLRLLRADMLDFCKHKRNHRSGVKLHRLQTALSLYSTSLCGLVLLVDNRINSYSGIKRDFATVCQECTDFHFPRIEEQLEVVQQVVLYARTQRRSKLKESLDSGNQNGGNDDKTKNAERNYLNVLPGEFYITRHSNLSEIHVAFHLCVDDHVKSGNITARDPAIMGLRNILKVCCTHDITTISIPLLLVHDMSEEMTIPWCLRRAELVFKCVKGFMMEMASWDGGISRTVQFLVPQSISEEMFYQLSNMLPQIFRVSSTLTLTSKH

SEQ ID NO: 43626 - protein, 363 aa, Homo sapiens [sequence omitted]

SEQ ID NO: 43627 - protein, 270 aa, Homo sapiens
MFCAAWALECTHCELLSDCPPGTEAELKDEVGKGNNHCVPCKAGHFQNTSSPSARCQPHTRCENQGLVEAAPGTAQSDTTCKNPLEPLPPEMSGSLLKRRPQGEGPNPVAGSWEPPKAHPYFPDLVQPLLPISGDVSPVSTGLPAAPVLEAGVPQQQSPLDLTREPQLEPGEQSQVAHGTNGIHVTGGSMTITGNIYIYNGPVLGGPPGPGDLPATPEPPYPIPEEGDPGPPGLSTPHQEDGKAWHLAETEHCGATPSNRGPRNQFITHD

SEQ ID NO: 43628 - protein, 326 aa, Homo sapiens
MANMQVSGGGPSISLVMKTPRVTKNEALWHPTLNLPLSPQGTVRTAVEFQVMTQTQSLSFLLGSSASLDCGFSMAPGLDLISVEWRLQHKGRGQLVYSWTAGQGQAVRKGATLEPAQLGMARDASLTLPGLTIQDEGTYICQITTSLYRAQQIIQLNIQASPKVRLSLANEALLPTLICDIAGYYPLDVVVTWTREELGGSPAQVSGASFSSLRQSVAGTYSISSSLTAEPGSAGATYTCQVTHISLEEPLGASTQVVPPERRTALGVIFASSLFLLALMFLGLQRRQAPTGLGLLQAERWETTSCADTQSSHLHEDRTARVSQPS

SEQ ID NO: 43629 - protein, 1397 aa, Homo sapiens
MYEFHLPLSPEELLKSGGVNQYVVQEVLSIKHLPPQLRAFQAAFRAQGPLAMLQHFDTIYSILHHFRSIDPGLKEDTLQFLIKVVSRHSQELPAILDDTTLSGSDRNAHLNALKMNCYALIRLLESFETMASQTNLVDLDLGGKGKKARTKAAHGFDWEEERQPILQLLTQLLQLDIRHLWNHSIIEEEFVSLVTGCCYRLLENPTINHQKNRPTREAITHLLGVALTRYNHMLSATVKIIQMLQHFEHLAPVLVAAVSLWATDYGMKSIVGEIVREIGQKCPQELSRDPSGTKGFAAFLTELAERVPAILMSSMCILLDHLDGENYMMRNAVLAAMAEMVLQVLSGDQLEAAARDTRDQFLDTLQAHGHDVNSFVRSRVLQLFTRIVQQKALPLTRFQAVVALAVGRLADKSVLVCKNAIQLLASFLANNPFSCKLSDADLAGPLQKETQKLQEMRAQRRTAAASAVLDPEEEWEAMLPELKSTLQQLLQLPQGEEEIPEQIANTETTEDVKGRIYQLLAKASYKKAIILTREATGHFQESEPFSHIDPEESEETRLLNILGLIFKGPAASTQEKNPRESTGNMVTGQTVCKNKPNMSDPEESRGNDELVKQEMLVQYLQDAYSFSRKITEAIGIISKMMYENTTTVVQEVIEFFVMVFQFGVPQALFGVRRMLPLIWSKEPGVREAVLNAYRQLYLNPKGDSARAKAQALIQNLSLLLVDASVGTIQCLEEILCEFVQKDELKPAVTQLLWERATEKVACCPLERCSSVMLLGMMARGKPEIVGSNLDTLVSIGLDEKFPQDYRLAQQVCHAIANISDRRKPSLGKRHPPFRLPQEHRLFERLRETVTKGFVHPDPLWIPFKEVAVTLIYQLAEGPEVICAQILQGCAKQALEKLEEKRTSQEDPKESPAMLPTFLLMNLLSLAGDVALQQLVHLEQAVSGELCRRRVLREEQEHKTKDPKEKNTSSETTMEEELGLVGATADDTEAELIRGICEMELLDGKQTLAAFVPLLLKVCNNPGLYSNPDLSAAASLALGKFCMISATFCDSQLRLLFTMLEKSPLPIVRSNLMVATGDLAIRFPNLVDPWTPHLYARLRDPAQQVRKTAGLVMTHLILKDMVKVKGQVSEMAVLLIDPEPQIAALAKNFFNELSHKGNAIYNLLPDIISRLSDPELGVEEEPFHTIMKQLLSYITKDKQTESLVEKLCQRFRTSRTERQQRDLAYCVSQLPLTERGLRKMLDNFDCFGDKLSDESIFSAFLSVVGKLRRGAKPEGKAIIDEFEQKLRACHTRGLDGIKELEIGQAGSQRAPSAKKPSTGSRYQPLASTASDNDFVTPEPRRTTRRHPNTQQRASKKKPKVVFSSDESSEEDLSAEMTEDETPKKTTPILRASARRHRS

SEQ ID NO: 43630 - protein, 290 aa, Homo sapiens [sequence omitted]

SEQ ID NO: 43631 - protein, 1827 aa, Homo sapiens
MLLCRQLGDSSGEGPEFVEEEEEVALRSDSEGSDYTPGKKKKKKLGPKKEKKSKSKRKEEEEEEDDDDDSKEPKSSAQLLEDWGMEDIDHVFSEEDYRTLTNYKAFSQFVRPLIAAKNPKIAVSKMMMVLGAKWREFSTNNPFKGSSGASVAAAAAAAVAVVESMVTATEVAPPPPPVEVPIRKAKTKEGKGPNARRKPKGSPRVPDAKKPKPKKVAPLKIKLGGFGSKRKRSSSEDDDLDVESDFDDASINSYSVSDGSTSRSSRSRKKLRTTKKKKKDHQDYCEVCQQGGEIILCDTCPRAYHMVCLDPDMEKAPEGKWSCPHCEKEGIQWEAKEDNSEGEEILEEVGGDLEEEDDHHMEFCRVCKDGGELLCCDTCPSSYHIHCLNPPLPEIPNGEWLCPRCTCPALKGKVQKILIWKWGQPPSPTPVPRPPDADPNTPSPKPLEGRPERQFFVKWQGMSYWHCSWVSELQLELHCQVMFRNYQRKNDMDEPPSGDFGGDEEKSRKRKNKDPKFAEMEERFYRYGIKPEWMMIHRILNHSVDKKGHVHYLIKWRDLPYDQASWESEDVEIQDYDLFKQSYWNHRELMRGEEGRPGKKLKKVKLRKLERPPETPTVDPTVKYERQPEYLDATGGTLHPYQMEGLNWLRFSWAQGTDTILADEMGLGKTVQTAVFLYSLYKEGHSKGPFLVSAPLSTIINWEREFEMWAPDMYVVTYVGDKDSRAIIRENEFSFEDNAIRGGKKASRMKKEASVKFHVLLTSYELITIDMAILGSIDWACLIVDEAHRLKNNQSKFFRVLNGYSLQHKLLLTGTPLQNNLEELFHLLNFLTPERFHNLEGFLEEFADIAKEDQIKKLHDMLGPHMLRRLKADVFKNMPSKTELIVRVELSPMQKKYYKYILTRNFEALNARGGGNQVSLLNVVMDLKKCCNHPYLFPVAAMEAPKMPNGMYDGSALIRASGKLLLLQKMLKNLKEGGHRVLIFSQMTKMLDLLEDFLEHEGYKYERIDGGITGNMRQEAIDRFNAPGAQQFCFLLSTRAGGLGINLATADTVIIYDSDWNPHNDIQAFSRAHRIGQNKKVMIYRFVTRASVEERITQVAKKKMMLTHLVVRPGLGSKTGSMSKQELDDILKFGTEELFKDEATDGGGDNKEGEDSSVIHYDDKAIERLLDRNQDETEDTELQGMNEYLSSFKVAQYVVREEEMGEEEEVEREIIKQEESVDPDYWEKLLRHHYEQQQEDLARNLGKGKRIRKQVNYNDGSQEDRDWQDDQSDNQSDYSVASEEGDEDFDERSEAPRRPSRKGLRNDKDKPLPPLLARVGGNIEVLGFNARQRKAFLNAIMRYGMPPQDAFTTQWLVRDLRGKSEKEFKAYVSLFMRHLCEPGADGAETFADGVPREGLSRQHVLTRIGVMSLIRKKVQEFEHVNGRWSMPELAEVEENKKMSQPGSPSPKTPTPSTPGDTQPNTPAPVPPAEDGIKIEENSLKEEESIEGEKEVKSTAPETAIECTQAPAPASEDEKVVVEPPEGEEKVEKAEVKERTEEPMETEPKGKGAADVEKVEEKSAIDLTPIVVEDKEEKKEEEEKKEVMLQNGETPKDLNDEKQKKNIKQRFMFNIADGGFTELHSLWQNEERAATVTKKTYEIWHRRHDYWLLAGIINHGYARWQDIQNDPRYAILNEPFKGEMNRGNFLEIKNKFLARRFKLLEQALVIEEQLRRAAYLNMSEDPSHPSMALNTRFAEVECLAESHQHLSKESMAGNKPANAVLHKGILKQLEELLSDMKADVTRLPATIARIPPVAVRLQMSERNILSRLANRAPEPTPQQVAQQQ

SEQ ID NO: 43632 - protein, 1837 aa, Homo sapiens
MLLCRQLGDSSGEGPEFVEEEEEVALRSDSEGSDYTPGKKKKKKLGPKKEKKSKSKRKEEEEEEDDDDDSKEPKSSAQLLEDWGMEDIDHVFSEEDYRTLTNYKAFSQFVRPLIAAKNPKIAVSKMMMVLGAKWREFSTNNPFKGSSGASVAAAAAAAVAVVESMVTATEVAPPPPPVEVPIRKAKTKEGKGPNARRKPKGSPRVPDAKKPKPKKVAPLKIKLGGFGSKRKRSSSEDDDLDVESDFDDASINSYSVSDGSTSRSSRSRKKLRTTKKKKKGEEEVTAVDGYETDHQDYCEVCQQGGEIILCDTCPRAYHMVCLDPDMEKAPEGKWSCPHCEKEGIQWEAKEDNSEGEEILEEVGGDLEEEDDHHMEFCRVCKDGGELLCCDTCPSSYHIHCLNPPLPEIPNGEWLCPRCTCPALKGKVQKILIWKWGQPPSPTPVPRPPDADPNTPSPKPLEGRPERQFFVKWQGMSYWHCSWVSELQLELHCQVMFRNYQRKNDMDEPPSGDFGGDEEKSRKRKNKDPKFAEMEERFYRYGIKPEWMMIHRILNHSVDKKGHVHYLIKWRDLPYDQASWESEDVEIQDYDLFKQSYWNHRELMRGEEGRPGKKLKKVKLRKLERPPETPTVDPTVKYERQPEYLDATGGTLHPYQMEGLNWLRFSWAQGTDTILADEMGLGKTVQTAVFLYSLYKEGHSKGPFLVSAPLSTIINWEREFEMWAPDMYVVTYVGDKDSRAIIRENEFSFEDNAIRGGKKASRMKKEASVKFHVLLTSYELITIDMAILGSIDWACLIVDEAHRLKNNQSKFFRVLNGYSLQHKLLLTGTPLQNNLEELFHLLNFLTPERFHNLEGFLEEFADIAKEDQIKKLHDMLGPHMLRRLKADVFKNMPSKTELIVRVELSPMQKKYYKYILTRNFEALNARGGGNQVSLLNVVMDLKKCCNHPYLFPVAAMEAPKMPNGMYDGSALIRASGKLLLLQKMLKNLKEGGHRVLIFSQMTKMLDLLEDFLEHEGYKYERIDGGITGNMRQEAIDRFNAPGAQQFCFLLSTRAGGLGINLATADTVIIYDSDWNPHNDIQAFSRAHRIGQNKKVMIYRFVTRASVEERITQVAKKKMMLTHLVVRPGLGSKTGSMSKQELDDILKFGTEELFKDEATDGGGDNKEGEDSSVIHYDDKAIERLLDRNQDETEDTELQGMNEYLSSFKVAQYVVREEEMGEEEEVEREIIKQEESVDPDYWEKLLRHHYEQQQEDLARNLGKGKRIRKQVNYNDGSQEDRDWQDDQSDNQSDYSVASEEGDEDFDERSEAPRRPSRKGLRNDKDKPLPPLLARVGGNIEVLGFNARQRKAFLNAIMRYGMPPQDAFTTQWLVRDLRGKSEKEFKAYVSLFMRHLCEPGADGAETFADGVPREGLSRQHVLTRIGVMSLIRKKVQEFEHVNGRWSMPELAEVEENKKMSQPGSPSPKTPTPSTPGDTQPNTPAPVPPAEDGIKIEENSLKEEESIEGEKEVKSTAPETAIECTQAPAPASEDEKVVVEPPEGEEKVEKAEVKERTEEPMETEPKGAADVEKVEEKSAIDLTPIVVEDKEEKKEEEEKKEVMLQNGETPKDLNDEKQKKNIKQRFMFNIADGGFTELHSLWQNEERAATVTKKTYEIWHRRHDYWLLAGIINHGYARWQDIQNDPRYAILNEPFKGEMNRGNFLEIKNKFLARRFKLLEQALVIEEQLRRAAYLNMSEDPSHPSMALNTRFAEVECLAESHQHLSKESMAGNKPANAVLHKVLKQLEELLSDMKADVTRLPATIARIPPVAVRLQMSERNILSRLANRAPEPTPQQVAQQQ

SEQ ID NO: 43633 - protein, 1865 aa, Homo sapiens
MLLCRQLGDSSGEGPEFVEEEEEVALRSDSEGSDYTPGKKKKKKLGPKKEKKSKSKRKEEEEEEDDDDDSKEPKSSAQLLEDWGMEDIDHVFSEEDYRTLTNYKAFSQFVRPLIAAKNPKIAVSKMMMVLGAKWREFSTNNPFKGSSGASVAAAAAAAVAVVESMVTATEVAPPPPPVEVPIRKAKTKEGKGPNARRKPKGSPRVPDAKKPKPKKVAPLKIKLGGFGSKRKRSSSEDDDLDVESDFDDASINSYSVSDGSTSRSSRSRKKLRTTKKKKKGEEEVTAVDGYETDHQDYCEVCQQGGEIILCDTCPRAYHMVCLDPDMEKAPEGKWSCPHCEKEGIQWEAKEDNSEGEEILEEVGGDLEEEDDHHMEFCRVCKDGGELLCCDTCPSSYHIHCLNPPLPEIPNGEWLCPRCTCPALKGKVQKILIWKWGQPPSPTPVPRPPDADPNTPSPKPLEGRPERQFFVKWQGMSYWHCSWVSELQLELHCQVMFRNYQRKNDMDEPPSGDFGGDEEKSRKRKNKDPKFAEMEERFYRYGIKPEWMMIHRILNHSVDKKGHVHYLIKWRDLPYDQASWESEDVEIQDYDLFKQSYWNHRELMRGEEGRPGKKLKKVKLRKLERPPETPTVDPTVKYERQPEYLDATGGTLHPYQMEGLNWLRFSWAQGTDTILADEMGLGKTVQTAVFLYSLYKEGHSKGPFLVSAPLSTIINWEREFEMWAPDMYVVTYVGDKDSRAIIRENEFSFEDNAIRGGKKASRMKKEASVKFHVLLTSYELITIDMAILGSIDWACLIVDEAHRLKNNQSKFFRVLNGYSLQHKLLLTGTPLQNNLEELFHLLNFLTPERFHNLEGFLEEFADIAKEDQIKKLHDMLGPHMLRRLKADVFKNMPSKTELIVRVELSPMQKKYYKYILTRNFEALNARGGGNQVSLLNVVMDLKKCCNHPYLFPVAAMEAPKMPNGMYDGSALIRASGKLLLLQKMLKNLKEGGHRVLIFSQMTKMLDLLEDFLEHEGYKYERIDGGITGNMRQEAIDRFNAPGAQQFCFLLSTRAGGLGINLATADTVIIYDSDWNPHNDIQAFSRAHRIGQNKKVMIYRFVTRASVEERITQVAKKKMMLTHLVVRPGLGSKTGSMSKQELDDILKFGTEELFKDEATDGGGDNKEGEDSSVIHYDDKAIERLLDRNQDETEDTELQGMNEYLSSFKVAQYVVREEEMGEEEEVEREIIKQEESVDPDYWEKLLRHHYEQQQEDLARNLGKGKRIRKQVNYNDGSQEDRGVCGRPRPPPMGRSTRAVGPAHLPSLPPDWQDDQSDNQSDYSVASEEGDEDFDERSEAPRRPSRKGLRNDKDKPLPPLLARVGGNIEVLGFNARQRKAFLNAIMRYGMPPQDAFTTQWLVRDLRGKSEKEFKAYVSLFMRHLCEPGADGAETFADGVPREGLSRQHVLTRIGVMSLIRKKVQEFEHVNGRWSMPELAEVEENKKMSQPGSPSPKTPTPSTPGDTQPNTPAPVPPAEDGIKIEENSLKEEESIEGEKEVKSTAPETAIECTQAPAPASEDEKVVVEPPEGEEKVEKAEVKERTEEPMETEPKGAADVEKVEEKSAIDLTPIVVEDKEEKKEEEEKKEVMLQNGETPKDLNDEKQKKNIKQRFMFNIADGGFTELHSLWQNEERAATVTKKTYEIWHRRHDYWLLAGIINHGYARWQDIQNDPRYAILNEPFKGEMNRGNFLEIKNKFLARRFKLLEQALVIEEQLRRAAYLNMSEDPSHPSMALNTRFAEVECLAESHQHLSKESMAGNKPANAVLHKVLKQLEELLSDMKADVTRLPATIARIPPVAVRLQMSERNILSRLANRAPEPTPQQVAQQQ

SEQ ID NO: 43634 - protein, 1901 aa, Homo sapiens
MDALLNNSLPPPHPENEEDPEEDLSETETPKLKKKKKPKKPRDPKIPKSKRQKKELGDSSGEGPEFVEEEEEVALRSDSEGSDYTPGKKKKKKLGPKKEKKSKSKRKEEEEEEDDDDDSKEPKSSAQLLEDWGMEDIDHVFSEEDYRTLTNYKAFSQFVRPLIAAKNPKIAVSKMMMVLGAKWREFSTNNPFKGSSGASVAAAAAAAVAVVESMVTATEVAPPPPPVEVPIRKAKTKEGKGPNARRKPKGSPRVPDAKKPKPKKVAPLKIKLGGFGSKRKRSSSEDDDLDVESDFDDASINSYSVSDGSTSRSSRSRKKLRTTKKKKKDHQDYCEVCQQGGEIILCDTCPRAYHMVCLDPDMEKAPEGKWSCPHCEKEGIQWEAKEDNSEGEEILEEVGGDLEEEDDHHMEFCRVCKDGGELLCCDTCPSSYHIHCLNPPLPEIPNGEWLCPRCTCPALKGKVQKILIWKWGQPPSPTPVPRPPDADPNTPSPKPLEGRPERQFFVKWQGMSYWHCSWVSELQLELHCQVMFRNYQRKNDMDEPPSGDFGGDEEKSRKRKNKDPKFAEMEERFYRYGIKPEWMMIHRILNHSVDKKGHVHYLIKWRDLPYDQASWESEDVEIQDYDLFKQSYWNHRELMRGEEGRPGKKLKKVKLRKLERPPETPTVDPTVKYERQPEYLDATGGTLHPYQMEGLNWLRFSWAQGTDTILADEMGLGKTVQTAVFLYSLYKEGHSKGPFLVSAPLSTIINWEREFEMWAPDMYVVTYVGDKDSRAIIRENEFSFEDNAIRGGKKASRMKKEASVKFHVLLTSYELITIDMAILGSIDWACLIVDEAHRLKNNQSKFFRVLNGYSLQHKLLLTGTPLQNNLEELFHLLNFLTPERFHNLEGFLEEFADIAKEDQIKKLHDMLGPHMLRRLKADVFKNMPSKTELIVRVELSPMQKKYYKYILTRNFEALNARGGGNQVSLLNVVMDLKKCCNHPYLFPVAAMEAPKMPNGMYDGSALIRASGKLLLLQKMLKNLKEGGHRVLIFSQMTKMLDLLEDFLEHEGYKYERIDGGITGNMRQEAIDRFNAPGAQQFCFLLSTRAGGLGINLATADTVIIYDSDWNPHNDIQAFSRAHRIGQNKKVMIYRFVTRASVEERITQVAKKKMMLTHLVVRPGLGSKTGSMSKQELDDILKFGTEELFKDEATDGGGDNKEGEDSSVIHYDDKAIERLLDRNQDETEDTELQGMNEYLSSFKVAQYVVREEEMGEEEEVEREIIKQEESVDPDYWEKLLRHHYEQQQEDLARNLGKGKRIRKQVNYNDGSQEDRGVCGRPRPPPMGRSTRAVGPAHLPSLPPDWQDDQSDNQSDYSVASEEGDEDFDERSEAPRRPSRKGLRNDKDKPLPPLLARVGGNIEVLGFNARQRKAFLNAIMRYGMPPQDAFTTQWLVRDLRGKSEKEFKAYVSLFMRHLCEPGADGAETFADGVPREGLSRQHVLTRIGVMSLIRKKVQEFEHVNGRWSMPELAEVEENKKMSQPGSPSPKTPTPSTPGDTQPNTPAPVPPAEDGIKIEENSLKEEESIEGEKEVKSTAPETAIECTQAPAPASEDEKVVVEPPEGEEKVEKAEVKERTEEPMETEPKGAADVEKVEEKSAIDLTPIVVEDKEEKKEEEEKKEVMLQNGETPKDLNDEKQKKNIKQRFMFNIADGGFTELHSLWQNEERAATVTKKTYEIWHRRHDYWLLAGIINHGYARWQDIQNDPRYAILNEPFKGEMNRGNFLEIKNKFLARRFKLLEQALVIEEQLRRAAYLNMSEDPSHPSMALNTRFAEVECLAESHQHLSKESMAGNKPANAVLHKVLKQLEELLSDMKADVTRLPATIARIPPVAVRLQMSERNILSRLANRAPEPTPQQVAQQQ

SEQ ID NO: 43635 - protein, 1839 aa, Homo sapiens
MLLCRQLGDSSGEGPEFVEEEEEVALRSDSEGSDYTPGKKKKKKLGPKKEKKSKSKRKEEEEEEDDDDDSKEPKSSAQLLEDWGMEDIDHVFSEEDYRTLTNYKAFSQFVRPLIAAKNPKIAVSKMMMVLGAKWREFSTNNPFKGSSGASVAAAAAAAVAVVESMVTATEVAPPPPPVEVPIRKAKTKEGKGPNARRKPKGSPRVPDAKKPKPKKVAPLKIKLGGFGSKRKRSSSEDDDLDVESDFDDASINSYSVSDGSTSRSSRSRKKLRTTKKKKKGEEEVTAVDGYETDHQDYCEVCQQGGEIILCDTCPRAYHMVCLDPDMEKAPEGKWSCPHCEKEGIQWEAKEDNSEGEEILEEVGGDLEEEDDHHMEFCRVCKDGGELLCCDTCPSSYHIHCLNPPLPEIPNGEWLCPRCTCPALKGKVQKILIWKWGQPPSPTPVPRPPDADPNTPSPKPLEGRPERQFFVKWQGMSYWHCSWVSELQLELHCQVMFRNYQRKNDMDEPPSGDFGGDEEKSRKRKNKDPKFAEMEERFYRYGIKPEWMMIHRILNHSVDKKGHVHYLIKWRDLPYDQASWESEDVEIQDYDLFKQSYWNHRELMRGEEGRPGKKLKKVKLRKLERPPETPTVDPTVKYERQPEYLDATGGTLHPYQMEGLNWLRFSWAQGTDTILADEMGLGKTVQTAVFLYSLYKEGHSKGPFLVSAPLSTIINWEREFEMWAPDMYVVTYVGDKDSRAIIRENEFSFEDNAIRGGKKASRMKKEASVKFHVLLTSYELITIDMAILGSIDWACLIVDEAHRLKNNQSKFFRVLNGYSLQHKLLLTGTPLQNNLEELFHLLNFLTPERFHNLEGFLEEFADIAKEDQIKKLHDMLGPHMLRRLKADVFKNMPSKTELIVRVELSPMQKKYYKYILTRNFEALNARGGGNQVSLLNVVMDLKKCCNHPYLFPVAAMEAPKMPNGMYDGSALIRASGKLLLLQKMLKNLKEGGHRVLIFSQMTKMLDLLEDFLEHEGYKYERIDGGITGNMRQEAIDRFNAPGAQQFCFLLSTRAGGLGINLATADTVIIYDSDWNPHNDIQAFSRAHRIGQNKKVMIYRFVTRASVEERITQVAKKKMMLTHLVVRPGLGSKTGSMSKQELDDILKFGTEELFKDEATDGGGDNKEGEDSSVIHYDDKAIERLLDRNQDETEDTELQGMNEYLSSFKVAQYVVREEEMGEEEEVEREIIKQEESVDPDYWEKLLRHHYEQQQEDLARNLGKGKRIRKQVNYNDGSQEDRDWQDDQSDNQSDYSVASEEGDEDFDERSEAPRRPSRKGLRNDKDKPLPPLLARVGGNIEVLGFNARQRKAFLNAIMRYGMPPQDAFTTQWLVRDLRGKSEKEFKAYVSLFMRHLCEPGADGAETFADGVPREGLSRQHVLTRIGVMSLIRKKVQEFEHVNGRWSMPELAEVEENKKMSQPGSPSPKTPTPSTPGDTQPNTPAPVPPAEDGIKIEENSLKEEESIEGEKEVKSTAPETAIECTQAPAPASEDEKVVVEPPEGEEKVEKAEVKERTEEPMETEPKGKGAADVEKVEEKSAIDLTPIVVEDKEEKKEEEEKKEVMLQNGETPKDLNDEKQKKNIKQRFMFNIADGGFTELHSLWQNEERAATVTKKTYEIWHRRHDYWLLAGIINHGYARWQDIQNDPRYAILNEPFKGEMNRGNFLEIKNKFLARRFKLLEQALVIEEQLRRAAYLNMSEDPSHPSMALNTRFAEVECLAESHQHLSKESMAGNKPANAVLHKVLKQLEELLSDMKADVTRLPATIARIPPVAVRLQMSERNILSRLANRAPEPTPQQVAQQQ

SEQ ID NO: 43636 - protein, 1886 aa, Homo sapiens [sequence omitted]

SEQ ID NO: 43637 - protein, 1824 aa, Homo sapiens
MLLCRQLGDSSGEGPEFVEEEEEVALRSDSEGSDYTPGKKKKKKLGPKKEKKSKSKRKEEEEEEDDDDDSKEPKSSAQLLEDWGMEDIDHVFSEEDYRTLTNYKAFSQFVRPLIAAKNPKIAVSKMMMVLGAKWREFSTNNPFKGSSGASVAAAAAAAVAVVESMVTATEVAPPPPPVEVPIRKAKTKEGKGPNARRKPKGSPRVPDAKKPKPKKVAPLKIKLGGFGSKRKRSSSEDDDLDVESDFDDASINSYSVSDGSTSRSSRSRKKLRTTKKKKKDHQDYCEVCQQGGEIILCDTCPRAYHMVCLDPDMEKAPEGKWSCPHCEKEGIQWEAKEDNSEGEEILEEVGGDLEEEDDHHMEFCRVCKDGGELLCCDTCPSSYHIHCLNPPLPEIPNGEWLCPRCTCPALKGKVQKILIWKWGQPPSPTPVPRPPDADPNTPSPKPLEGRPERQFFVKWQGMSYWHCSWVSELQLELHCQVMFRNYQRKNDMDEPPSGDFGGDEEKSRKRKNKDPKFAEMEERFYRYGIKPEWMMIHRILNHSVDKKGHVHYLIKWRDLPYDQASWESEDVEIQDYDLFKQSYWNHRELMRGEEGRPGKKLKKVKLRKLERPPETPTVDPTVKYERQPEYLDATGGTLHPYQMEGLNWLRFSWAQGTDTILADEMGLGKTVQTAVFLYSLYKEGHSKGPFLVSAPLSTIINWEREFEMWAPDMYVVTYVGDKDSRAIIRENEFSFEDNAIRGGKKASRMKKEASVKFHVLLTSYELITIDMAILGSIDWACLIVDEAHRLKNNQSKFFRVLNGYSLQHKLLLTGTPLQNNLEELFHLLNFLTPERFHNLEGFLEEFADIAKEDQIKKLHDMLGPHMLRRLKADVFKNMPSKTELIVRVELSPMQKKYYKYILTRNFEALNARGGGNQVSLLNVVMDLKKCCNHPYLFPVAAMEAPKMPNGMYDGSALIRASGKLLLLQKMLKNLKEGGHRVLIFSQMTKMLDLLEDFLEHEGYKYERIDGGITGNMRQEAIDRFNAPGAQQFCFLLSTRAGGLGINLATADTVIIYDSDWNPHNDIQAFSRAHRIGQNKKVMIYRFVTRASVEERITQVAKKKMMLTHLVVRPGLGSKTGSMSKQELDDILKFGTEELFKDEATDGGGDNKEGEDSSVIHYDDKAIERLLDRNQDETEDTELQGMNEYLSSFKVAQYVVREEEMGEEEEVEREIIKQEESVDPDYWEKLLRHHYEQQQEDLARNLGKGKRIRKQVNYNDGSQEDRDWQDDQSDNQSDYSVASEEGDEDFDERSEAPRRPSRKGLRNDKDKPLPPLLARVGGNIEVLGFNARQRKAFLNAIMRYGMPPQDAFTTQWLVRDLRGKSEKEFKAYVSLFMRHLCEPGADGAETFADGVPREGLSRQHVLTRIGVMSLIRKKVQEFEHVNGRWSMPELAEVEENKKMSQPGSPSPKTPTPSTPGDTQPNTPAPVPPAEDGIKIEENSLKEEESIEGEKEVKSTAPETAIECTQAPAPASEDEKVVVEPPEGEEKVEKAEVKERTEEPMETEPKGAADVEKVEEKSAIDLTPIVVEDKEEKKEEEEKKEVMLQNGETPKDLNDEKQKKNIKQRFMFNIADGGFTELHSLWQNEERAATVTKKTYEIWHRRHDYWLLAGIINHGYARWQDIQNDPRYAILNEPFKGEMNRGNFLEIKNKFLARRFKLLEQALVIEEQLRRAAYLNMSEDPSHPSMALNTRFAEVECLAESHQHLSKESMAGNKPANAVLHKVLKQLEELLSDMKADVTRLPATIARIPPVAVRLQMSERNILSRLANRAPEPTPQQVAQQQ

SEQ ID NO: 43638 - protein, 1873 aa, Homo sapiens [sequence omitted]

SEQ ID NO: 43639 - protein, 341 aa, Homo sapiens
MLELDGTENKSKFGANAILGVSLAVCKAGAAERELPLYRHIAQLAGNSDLILPVPAFNVINGGSHAGNKLAMQEFMILPVGAESFRDAMRLGAEVYHTLKGVIKDKYGKDATNVGDEGGFAPNILENSEALELVKEAIDKAGYTEKIVIGMDVAASEFYRDGKYDLDFKSPTDPSRYITGDQLGALYQDFVRDYPVVSIEDPFDQDDWAAWSKFTANVGIQIVGDDLTVTNPKRIERAVEEKACNCLLLKVNQIGSVTEAIQACKLAQENGWGVMVSHRSGETEDTFIADLVVGLCTGQIKTGAPCRSERLAKYNQLMRIEEELGDEARFAGHNFRNPSVL

SEQ ID NO: 43640 - protein, 108 aa, Homo sapiens [sequence omitted]

SEQ ID NO: 43641 - protein, 86 aa, Homo sapiens
MVQLLHKLSVRAADGPQKLLKVIKNPVSDHFPVGCMKVGTSFSIPVVSDVRELVPSSDPIVFVVGAFAHGKVSGSYLFQSKVMMAL

SEQ ID NO: 43642 - protein, 464 aa, Homo sapiens [sequence omitted]

SEQ ID NO: 43643 - protein, 585 aa, Homo sapiens
MKLAGHFTQDKALRQEGLRPGPWPPGAPASEAASKPLGVASEDELVAEFLQDQNAPLVSRAPQTFKMDDLLAEMQQIEQSNFRQAPQRAPGVADLALSENWAQEFLAAGDAVDVTQDYNETDWSQEFISEVTDPLSVSPARWAEEYLEQSEEKLWLGEPEGTATDRWYDEYHPEEDLQHTASDFVAKVDDPKLANSEGTSDAWVDQFTRPVNTSALDMEFERAKSAIESDVDFWDKLQAELEEMAKRDAEAHPWLSDYDDLTSATYDKGYQFEEENPLRDHPQPFEEGLRRLQEGDLPNAVLLFEAAVQQDPKHMEAWQYLGTTQAENEQELLAISALRRCLELKPDNQTALMALAVSFTNESLQRQACETLRDWLRYTPAYAHLVTPAEEGAGGAGLGPSKRILGSLLSDSLFLEVKELFLAAVRLDPTSIDPDVQCGLGVLFNLSGEYDKAVDCFTAALSVRPNDYLLWNKLGATLANGNQSEEAVAAYRRALELQPGYIRSRYNLGISCINLGAHREAVEHFLEALNMQRKSRGPRGEGGAMSENIWSTLRLALSMLGQSDAYGAADARDLSTLLTMFGLPQ

SEQ ID NO: 43644 - protein, 614 aa, Homo sapiens
MKLAGHFTQDKALRQEGLRPGPWPPGAPASEAASKPLGVASEDELVAEFLQDQNAPLVSRAPQTFKMDDLLAEMQQIEQSNFRQAPQRAPGVADLALSENWAQEFLAAGDAVDVTQDYNETDWSQEFISEVTDPLSVSPARWAEEYLEQSEEKLWLGEPEGTATDRWYDEYHPEEDLQHTASDFVAKVDDPKLANSEFLKFVRQIGEGQVSLESGAGSGRAQAEQWAAEFIQQQGTSDAWVDQFTRPVNTSALDMEFERAKSAIELQAELEEMAKRDAEAHPWLSDYDDLTSATYDKGYQFEEENPLRDHPQPFEEGLRRLQEGDLPNAVLLFEAAVQQDPKHMEAWQYLGTTQAENEQELLAISALRRCLELKPDNQTALMALAVSFTNESLQRQACETLRDWLRYTPAYAHLVTPAEEGAGGAGLGPSKRILGSLLSDSLFLEVKELFLAAVRLDPTSIDPDVQCGLGVLFNLSGEYDKAVDCFTAALSVRPNDYLLWNKLGATLANGNQSEEAVAAYRRALELQPGYIRSRYNLGISCINLGAHREAVEHFLEALNMQRKSRGPRGEGGAMSENIWSTLRLALSMLGQSDAYGAADARDLSTLLTMFGLPQ

SEQ ID NO: 43645 - protein, 622 aa, Homo sapiens
MKLAGHFTQDKALRQEGLRPGPWPPGAPASEAASKPLGVASEDELVAEFLQDQNAPLVSRAPQTFKMDDLLAEMQQIEQSNFRQAPQRAPGVADLALSENWAQEFLAAGDAVDVTQDYNETDWSQEFISEVTDPLSVSPARWAEEYLEQSEEKLWLGEPEGTATDRWYDEYHPEEDLQHTASDFVAKVDDPKLANSEFLKFVRQIGEGQVSLESGAGSGRAQAEQWAAEFIQQQGTSDAWVDQFTRPVNTSALDMEFERAKSAIESDVDFWDKLQAELEEMAKRDAEAHPWLSDYDDLTSATYDKGYQFEEENPLRDHPQPFEEGLRRLQEGDLPNAVLLFEAAVQQDPKHMEAWQYLGTTQAENEQELLAISALRRCLELKPDNQTALMALAVSFTNESLQRQACETLRDWLRYTPAYAHLVTPAEEGAGGAGLGPSKRILGSLLSDSLFLEVKELFLAAVRLDPTSIDPDVQCGLGVLFNLSGEYDKAVDCFTAALSVRPNDYLLWNKLGATLANGNQSEEAVAAYRRALELQPGYIRSRYNLGISCINLGAHREAVEHFLEALNMQRKSRGPRGEGGAMSENIWSTLRLALSMLGQSDAYGAADARDLSTLLTMFGLPQ

SEQ ID NO: 43646 - protein, 243 aa, Homo sapiens
MIDEAEVLEFPMVVKNTRGHRGKAVFLARDKHHLADLSHLIRHEAPYLFQKYVKESHGRDVRVIVVGGRVVGTMLRCSTDGRMQSNCSLGGVGMMCSLSEQGKQLAIQVSNILGMDVCGIDLLMKDDGSFCVCEANANVGFIAFDKACNLDVAGIIADYAASLLPSGRLTRRMSLLSVVSTASETSEPELGPPASTAVDNMSASSSSVDSDPESTERELLTKLPGGLFNMNQLLANEIKLLVD

SEQ ID NO: 43647 - protein, 164 aa, Homo sapiens
MIDEAEVLEFPMVVKNTRGHRGKAVFLARDKHHLADLSHLIRHEAPYLFQKYVKESHGRDVRVIVVGGRVVGTMLRCSTDGRMQSNCSLGGVGMMCSLSEQGKQLAIQVSNILGMDVCGIDLLMKDDGSFCVCEANANPFQEPKKQIQTNKKIPREKTFLLPPS

SEQ ID NO: 43648 - protein, 410 aa, Homo sapiens
MEEDSIRLPAHLRLQPIYWSRDDVAQWLKWAENEFSLRPIDSNTFEMNGKALLLLTKEDFRYRSPHSGDVLYELLQHILKQRKPRILFSPFFHPGNSIHTQPEVILHQNHEEDNCVQRTPRPSVDNVHHNPPTIELLHRSRSPITTNHRPSPDPEQRPLRSPLDNMIRRLSPAERAQGPRPHQENNHQESYPLSVSPMENNHCPASSESHPKPSSPRQESTRVIQLMPSPIMHPLILNPRHSVDFKQSRLSEDGLHREGKPINLSHREDLAYMNHIMVSVSPPEEHAMPIGRIADCRLLWDYVYQLLSDSRYENFIRWEDKESKIFRIVDPNGLARLWGNHKNRTNMTYEKMSRALRHYYKLNIIRKEPGQRLLFRFMKTPDEIMSGRTDRLEHLESQELDEQIYQEDEC

SEQ ID NO: 43649 - protein, 274 aa, Homo sapiens
MSQSLALAKKPHIIIATPGRLIDHLENTKGFNLRALKYLVMDEADRILNMDFETEVDKILKVIPRDRKTFLFSATMTKKVQKLQRAALKNPVKCAVSSKYQTVEKLQQYYIFIPSKFKSKRLGSLNKFKAKARSILLATDVASRGLDIPHVDVVVNFDIPTHSKDYIHRVGRTARAGRSGKAITFVTQYDVELFQRIEHLIGKKLPGFPTQDDEVMMLTERVAEAQRFARMELREHGEKKKRSREDAGDNDDTEGAIGVRNKVAGGKMKKRKGR

SEQ ID NO: 43650 - protein, 323 aa, Homo sapiens [sequence omitted]

SEQ ID NO: 43651 - protein, 131 aa, Homo sapiens
MPKVAKYAGGTNDKGIGMGMTVPISFAVFPNEDGSLQKKLKVWFRIPNQFQSDPPAPSDKSVKIEEREGITVYSMQFGGYAKEADYVAQATRLRAALEGTATYRGDIYFCTGYDPPMKPYGRRNEIWLLKT

SEQ ID NO: 43652 - protein, 42 aa, Homo sapiens
MGPPWRAAGPCSASFRAFRGCLGREPGRGPQAVPLRRPLLLF

SEQ ID NO: 43653 - protein, 205 aa, Homo sapiens
MNTQILLMAVKNNSYIKDFFEQMLKIFKEMQSVVDARHDKIQKESLCSKVAMAMCSVVQKSTNVEELHQSAKEVFKSAHTPVIISVLNSSNILGSLESSLSHLMKFPIMNLQLSDFYTEDTKEQSDVTTSERTRSPPGSSKTTMIDTLKKLQDVLKTEDSKNPTKSAADLLEQIVKAMGPILEILQKAIKTMEMNISVFKKASDK

SEQ ID NO: 43654 - protein, 842 aa, Homo sapiens
MSSVGHISVPGIPNTQVKDTMNGHISNHPSSFGMYPSQMNGYGSSPTFSQTDREHGSKTSAKALYEQRKNYARDSVSSVSDISQYRVEHLTTFVLDRKDAMITVDDGIRKLKLLDAKGKVWTQDMILQVDDRAVSLIDLESKNELENFPLNTIQHCQAVMHSCSYDSVLALVCKEPTQNKPDLHLFQCDEVKANLISEDIESAISDSKGGKQKRRPDALRMISNADPSIPPPPRAPAPAPPGTVTQVDVRSRVAAWSAWAADQGDFEKPRQYHEQEETPEMMAARIDRDVQILNHILDDIEFFITKLQKAAEAFSELSKRKKNKKGKRKGPGEGVLTLRAKPPPPDEFLDCFQKFKHGFNLLAKLKSHIQNPSAADLVHFLFTPLNMVVQATGGPELASSVLSPLLNKDTIDFLNYTVNGDERQLWMSLGGTWMKARAEWPKEQFIPPYVPRFRNGWEPPMLNFMGATMEQDLYQLAESVANVAEHQRKQEIKRLSTEHSSVSEYHPADGYAFSSNIYTRGSHLDQGEAAVAFKPTSNRHIDRNYEPLKTQPKKYAKSKYDFVARNNSELSVLKDDILEILDDRKQWWKVRNASGDSGFVPNNILDIVRPPESGLGRADPPYTHTIQKQRMEYGPRPADTPPAPSPPPTPAPVPVPLPPSTPAPVPVSKVPANITRQNSSSSDSGGSIVRDSQRHKQLPVDRRKSQMEEVQDELIHRLTIGRSAAQKKFHVPRQNVPVINITYDSTPEDVKTWLQSKGFNPVTVNSLGVLNGAQLFSLNKDELRTVCPEGARVYSQITVQKAALEDSSGSSELQEIMRRRQEKISAAASDSGVESFDEGSSH

SEQ ID NO: 43655 - protein, 112 aa, Homo sapiens [sequence omitted]

SEQ ID NO: 43656 - protein, 19 aa, Homo sapiens
MLLFDLSQGEALQSSHCAY

SEQ ID NO: 43657 - protein, 165 aa, Homo sapiens
MPSIKLQSSGGEIFEVDVEIVKQSVTIKTMLEDLGMNDEGDHDPVPLPNVNAAILKKVIQWCTHHEDDSPPPKVYENKEKRTDDIPVWDQEFLKVDQGTLFELILAANYLDIKGLLDVTCKTVANMVNRKTPEEIHKTFNLKNDFTFTEEWEAQVHQENQQCEEK

SEQ ID NO: 43658 - protein, 436 aa, Homo sapiens [sequence omitted]

SEQ ID NO: 43659 - protein, 996 aa, Homo sapiens
MGLYLLRAGVRLPLAVALLAACCGGEALVQIGLGVGEDHLLSLPAAGVVLSCLAAATWLVLRLRLGVLMIALTSAVRTVSLISLERFKVAWRPYLAYLAGVLGILLARYVEQILPQSAEAAPREHLGSQLIAGTKEDIPVFKRRRRSSSVVSAEMSGCSSKSHRRTSLPCIPREQLMGHSEWDHKRGPRGSQSSGTSITVDIAVMGEAHGLITDLLADPSLPPNVCTSLRAVSNLLSTQLTFQAIHKPRVNPVTSLSENYTCSDSEESSEKDKLAIPKRLRRSLPPGLLRRVSSTWTTTTSATGLPTLEPAPVRRDRSTSIKLQEAPSSSPDSWNNPVMMTLTKSRSFTSSYAISAANHVKAKKQSRPGALAKISPLSSPCSSPLQGTPASSLVSKISAVQFPESADTTAKQSLGSHRALTYTQSAPDLSPQILTPPVICSSCGRPYSQGNPADEPLERSGVATRTPSRTDDTAQVTSDYETNNNSDSSDIVQNEDETECLREPLRKASACSTYAPETMMFLDKPILAPEPLVMDNLDSIMEQLNTWNFPIFDLVENIGRKCGRILSQVSYRLFEDMGLFEAFKIPIREFMNYFHALEIGYRDIPYHNRIHATDVLHAVWYLTTQPIPGLSTVINDHGSTSDSDSDSGFTHGHMGYVFSKTYNVTDDKYGCLSGNIPALELMALYVAAAMHDYDHPGRTNAFLVATSAPQAVLYNDRSVLENHHAAAAWNLFMSRPEYNFLINLDHVEFKHFRFLVIEAILATDLKKHFDFVAKFNGKVNDDVGIDWTNENDRLLVCQMCIKLADINGPAKCKELHLQWTDGIVNEFYEQGDEEASLGLPISPFMDRSAPQLANLQESFISHIVGPLCNSYDSAGLMPGKWVEDSDESGDTDDPEEEEEEAPAPNEEETCENNESPKKKTFKRRKIYCQITQHLLQNHKMWKKVIEEEQRLAGIENQSLDQTPQSHSSEQIQAIKEEEEEKGKPRGEEIPTQKPDQ

SEQ ID NO: 43660 - protein, 506 aa, Homo sapiens
MEDQLMVLKQLGISATMLNASSSKEHVKWVHAEMVNKNSELKLIYVTPEKIAKSKMFMSRLEKAYEARRFTRIAVDEVHCCSQWGHDFRPDYKALGILKRQFPNASLIGLTATATNHVLTDAQKILCIEKCFTFTASFNRPNLYYEVRQKPSNTEDFIEDIVKLINGRYKGQSGIIYCFSQKDSEQVTVSLQNLGIHAGAYHANLEPEDKTTVHRKWSANEIQVVVATVAFGMGIDKPDVRFVIHHSMSKSMENYYQESGRAGRDDMKADCILYYGFGDIFRISSMVVMENVGQQKLYEMVSYCQNISKCRRVLMAQHFDEVWNSEACNKMCDNCCKDSAFERKNITEYCRDLIKILKQAEELNEKLTPLKLIDSWMGKGAAKLRVAGVVAPTLPREDLEKIIAHFLIQQYLKEDYSFTAYATISYLKIGPKANLLNNEAHAITMQVTKSTQNSFRAESSQTCHSEQGDKKMEEKNSGNFQKKAANMLQQSGSKNTGAKKRKIDDA

SEQ ID NO: 43661 - protein, 347 aa, Homo sapiens
MSFLCSWLLFAIMWWLVAFAHGDIYAYMEKSGMEKSGLESTVCVTNVRSFTSAFLFSIEVQVTIGFGGRMMTEECPLAITVLILQNIVGLIINAVMLGCIFMKTAQAHRRAETLIFSRHAVIAVRNGKLCFMFRVGDLRKSMIISASVRIQVVKKTTTPEGEVVPIHQLDIPVDNPIESNNIFLVAPLIICHVIDKRSPLYDISATDLANQDLEVIVILEGVVETTGITTQARTSYIAEEIQWGHRFVSIVTEEEGVYSVDYSKFGNTVKVAAPRCSARELDEKPSILIQTLQKSELSHQNSLRKRNSMRRNNSMRRNNSIRRNNSSLMVPKVQFMTPEGNQNTSES

SEQ ID NO: 43662 - protein, 19 aa, Homo sapiens
MSKDGKKKKKKSKTKCVIM

SEQ ID NO: 43663 - protein, 280 aa, Homo sapiens
MDIFGKGKETEFKQKVLNNCKTTADELKKLIRLQTEKLQSIEKQLESNEIEIRFWEQKYNSNLEEEIVRLEQKIKRNDVEIEEEEFWENELQIEQENEKQLKDQLQEIRQKITECENKLKDYLAQIRTMESGLEAEKLQREVQEAQVNEEEVKGKIGKVKGEIDIQGQQSLRLENGIKAVERSLGQATKRLQDKEQELEQLTKELRQVNLQQFIQQTGTKVTVLPAEPIEIEASHADIEREAPFQSGSLKRPGSSRQLPSNLRILQNPISSGFNPEGIYV

SEQ ID NO: 43664 - protein, 647 aa, Homo sapiens
MEYCRIMYDIFPFKKLVNFIVSDSGAHVLNSWTQEDQNLQELMAALAAVGPPNPRADPECCSILHGLVAAVETLCKITEYQHEARTLLMENAERVGNRGRIICITNAKSDSHVRMLEDCVQETIHEHNKLAANSDHLMQIQKCELVLIHTYPVGEDSLVSDRSKKELSPVLTSEVHSVRAGRHLATKLNILVQQHFDLASTTITNIPMKEEQHANTSANYDVELLHHKDAHVDFLKSGDSHLGGGSREGSFKETITLKWCTPRTNNIELHYCTGAYRISPVDVNSRPSSCLTNFLLNGRSVLLEQPRKSGSKVISHMLSSHGGEIFLHVLSSSRSILEDPPSISEGCGGRVTDYRITDFGEFMRENRLTPFLDPRYKIDGSLEVPLERAKDQLEKHTRYWPMIISQTTIFNMQAVVPLASVIVKESLTEEDVLNCQKTIYNLVDMERKNDPLPISTVGTRGKGPKRDEQYRIMWNELETLVRAHINNSEKHQRVLECLMACRSKPPEEEERKKRGRKREDKEDKSEKAVKDYEQEKSWQDSERLKGILERGKEELAEAEIIKDSPDSPEPPNKKPLVEMDETPQVEKSKGPVSLLSLWSNRINTANSRKHQEFAGRLNSVNNRAELYQHLKEENGMETTENGKASRQ

SEQ ID NO: 43665 - protein, 187 aa, Homo sapiens
MGIQQENRQIRELQQENKELRTSLEEHQSALELIMSKYREQMFRLLMASKKDDPGIIMKLKEQHSKIDMVHRNKSEGFFLDASRHILEAPQHGLERRHLEANQNELQAHVDQITEMAAVMRKAIEIDEQQGCKEQERIFQLEQENKGLREILQITRESFLNLRKDDASESTSLSALVTNSDLSLRKS

SEQ ID NO: 43666 - protein, 149 aa, Homo sapiens
MGIQQENRQIRELQQENKELRTSLEEHQSALELIMSKYREQMFRLLMASKKDDPGIIMKLKEQHSKELQAHVDQITEMAAVMRKAIEIDEQQGCKEQERIFQLEQENKGLREILQITRESFLNLRKDDASESTSLSALVTNSDLSLRKS

SEQ ID NO: 43667 - protein, 106 aa, Homo sapiens
MGIQQENRQIRELQQENKELRTSLEEHQSALELIMSKYREQMFRLLMASKKDDPGIIMKLKEQHSKIDMVHRNKSEGFFLDASRHILEAPQHGLERRHLEANQNVH

SEQ ID NO: 43668 - protein, 448 aa, Homo sapiens
MAILLSYSERDPVPGGCNLEFDLDIDPNIYLEYNFFETTIKFAPANLGYARGVDPPPCDAGTDQDSRWRLQYDVYQYFLPENDLTEEMLLKHLQRMVSVPQVKASALKVVTLTANDKTSVSFSSLPGQGVIYNVIVWDPFLNTSAAYIPAHTYACSFEAGEGSCASLGRVSSKVFFTLFALLGFFICFFGHRFWKTELFFIGFIIMGFFFYILITRLTPIKYDVNLILTAVTGSVGGMFLVAVWWRFGILSICMLCVGLVLGFLISSVTFFTPLGNLKIFHDDGVFWVTFSCIAILIPVVFMGCLRILNILTCGVIGSYSVVLAIDSYWSTSLSYITLNVLKRALNKDFHRAFTNVPFQTNDFIILAVWGMLAVSGITLQIRRERGRPFFPPHPYKLWKQERERRVTNILDPSYHIPPLRERLYGRLTQIKGLFQKEQPAGERTPLLL

SEQ ID NO: 43669 - protein, 462 aa, Homo sapiens [sequence omitted]

SEQ ID NO: 43670 - protein, 998 aa, Homo sapiens
MLAAALEQMDGIIAGSKALEYSNGIFDCQSPTSPFMGSLRALHLVEDLRGLLEMMETDEKEGLRCQIPDSTAETLVEWLQSQMTNGHLPGNGDVYQERLARLENDKESLVLQVSVLTDQVEAQGEKIRDLEFCLEEHREKVNATEEMLQQELLSRTSLETQKLDLMAEISNLKLKLTAVEKDRLDYEDKFRDTEGLIQEINDLRLKVSEMDSERLQYEKKLKSTKDELASLKEQLEEKESEVKRLQEKLVCKMKGEGVEIVDRDENFKKKLKEKNIEVQKMKKAVESLMAANEEKDRKIEDLRQCLNRYKKMQDTVVLAQGKKGKDGEYEELLNSSSISSLLDAQGFSDLEKSPSPTPVMGSPSCDPFNTSVPEEFHTTILQVSIPSLLPATVSMETSEKSKLTPKPETSFEENDGNIILGATVDTQLCDKLLTSSLQKSSSLGNLKKETSDGEKETIQKTSEDRAPAESRPFGTLPPRPPGQDTSMDDNPFGTRKVRSSFGRGFFKIKSNKRTASAPNLDRKRSASAPTLAETEKETAEHLDLAGASSRPKDSQRNSPFQIPPPSPDSKKKSRGIMKLFGKLRRSQSTTFNPDDMSEPEFKRGGTRATAGPRLGWSRDLGQSNSDLDMPFAKWTKEQVCNWLMEQGLGSYLNSGKHWIASGQTLLQASQQDLEKELGIKHSLHRKKLQLALQALGSEEETNHGKLDFNWVTRWLDDIGLPQYKTQFDEGRVDGRMLHYMTVDDLLSLKVVSVLHHLSIKRAIQVLRINNFEPNCLRRRPSDENTIAPSEVQKWTNHRVMEWLRSVDLAEYAPNLRGSGVHGGLMVLEPRFNVETMAQLLNIPPNKTLLRRHLATHFNLLIGAEAQHQKRDAMELPDYVLLTATAKVKPKKLAFSNFGNLRKKKQEDGEEYVCPMELGQASGSASKKGFKPGLDMRLYEEDDLDRLEQMEDSEGTVRQIGAFSEGINNLTHMLKEDDMFKDFAARSPSASITDEDSNV

SEQ ID NO: 43671 - protein, 973 aa, Homo sapiens
MLAAALEQMDGIIAGSKALEYSNGIFDCQSPTSPFMGSLRALHLVEDLRGLLEMMETDEKEGLRCQIPDSTAETLVEWLQSQMTNGHLPGNGDVYQERLARLENDKESLVLQVSVLTDQVEAQGEKIRDLEFCLEEHREKVNATEEMLQQELLSRTSLETQKLDLMAEISNLKLKLTAVEKDRLDYEDKFRDTEGLIQEINDLRLKVSEMDSERLQYEKKLKSTKDELASLKEQLEEKESEVKRLQEKLVCKMKGEGVEIVDRDIEVQKMKKAVESLMAANEEKDRKIEDLRQCLNRYKKMQDTVVLAQGKDGEYEELLNSSSISSLLDAQGFSDLEKSPSPTPVMGSPSCDPFNTSVPEEFHTTILQVSIPSLLPATVSMETSEKSKLTPKPETSFEENDGNIILGATVDTQLCDKLLTSSLQKSSSLGNLKKETSDGEKETIQKTSEDRAPAESRPFGTLPPRPPGQDTSMDDNPFGTRKVRSSFGRGFFKIKSNKRTASAPNLAETEKETAEHLDLAGASSRPKDSQRNSPFQIPPPSPDSKKKSRGIMKLFGKLRRSQSTTFNPDDMSEPEFKRGGTRATAGPRLGWSRDLGQSNSDLDMPFAKWTKEQVCNWLMEQGLGSYLNSGKHWIASGQTLLQASQQDLEKELGIKHSLHRKKLQLALQALGSEEETNHGKLDFNWVTRWLDDIGLPQYKTQFDEGRVDGRMLHYMTVDDLLSLKVVSVLHHLSIKRAIQVLRINNFEPNCLRRRPSDENTIAPSEVQKWTNHRVMEWLRSVDLAEYAPNLRGSGVHGGLMVLEPRFNVETMAQLLNIPPNKTLLRRHLATHFNLLIGAEAQHQKRDAMELPDYVLLTATAKVKPKKLAFSNFGNLRKKKQEDGEEYVCPMELGQASGSASKKGFKPGLDMRLYEEDDLDRLEQMEDSEGTVRQIGAFSEGINNLTHMLKEDDMFKDFAARSPSASITDEDSNV

SEQ ID NO: 43672 - protein, 500 aa, Homo sapiens [sequence omitted]

SEQ ID NO: 43673 - protein, 364 aa, Homo sapiens
MVQIRLEDRCYPVSKRKLIEQSDYFRALYRSGMREALSQEAGGPEVQQLRGLSAPGLRLVLDFINAGGAREGWLLGPRGEKGGGVDEDEEMDEVSLLSELVEAASFLQVTSLLQLLLSQVRLNNCLEMYRLAQVYGLPDLQEACLRFMVVHFHEVLCKPQFHLLGSPPQAPGDVSLKQRLREARMTGTPVLVALGDFLGGPLAPHPYQGEPPSMLRYEEMTERWFPLANNLPPDLVNVRGYGSAILDNYLFIVGGYRITSQEISAAHSYNPSTNEWLQVASMNQKRSNFKLVAVNSKLYAIGGQAVSNVECYNPEQDAWNFVAPLPNPLAEFSACECKGKIYVIGGYTTRDSLWRSCVATCHVS

SEQ ID NO: 43674 - protein, 489 aa, Homo sapiens
MEKLFRTSPDLKVIYILVRPKAGQTLQQRVFQILDSKLFEKVKEVCPNVHEKIRAIYADLNQNDFAISKEDMQELLSCTNIIFHCAATVRFDDTLRHAVQLNVTATRQLLLMASQMPKLEAFIHISTAYSNCNLKHIDEVIYPCPVEPKKIIDSLEWLDDAIIDEITPKLIRDWPNIYTYTKALGEMVVQQESRNLNIAIIRPSIVGATWQEPFPGWVDNINGPNGIIIATGKGFLRAIKATPMAVADVIPVDTVVNLMLAVGWYTAVHRPKSTLVYHITSGNMNPCNWHKMGVQVLATFEKIPFERPFRRPNANFTSNSFTSQYWNAVSHRAPAIIYDCYLRLTGRKPRMTKLMNRLLRTVSMLEYFINRSWEWSTYNTEMLMSELSPEDQRVFNFDVRQLNWLEYIENYVLGVKKYLLKEDMAGIPKAKQRLKRLRNIHYLFNTALFLIAWRLLIARSQMARNVWFFIVSFCYKFLSYFRASSTLKV

SEQ ID NO: 43675 - protein, 925 aa, Homo sapiens
MCLRAIIKHDFPGHWPGVVDKIDYYLQSQSSASWLGSLLCLYQLVKTYEYKKAEEREPLIIAMQIFLPRIQQQIVQLLPDSSYYSVLLQKQILKIFYALVQYALPLQLVNNQTMTTWMEIFRTIIDRTVPPETLHIDEDDRPELVWWKCKKWALHIVARLFERYGSPGNVTKEYFEFSEFFLKTYAVGIQQVLLKILDQYRQKEYVAPRVLQQAFNYLNQGVVHSITWKQMKPHIQNISEDVIFSVMCYKDEDEELWQEDPYEYIRMKFDIFEDYASPTTAAQTLLYTAAKKRKEVLPKMMAFCYQILTDPNFDPRKKDGALHVIGSLAEILLKKSLFKDQMELFLQNHVFPLLLSNLGYLRARSCWVLHAFSSLKFHNELNLRNAVELAKKSLIEDKEMPVKVEAALALQSLISNQIQAKEYMKPHVRPIMQELLHIVRETENDDVTNVIQKMICEYSQEVASIAVDMTQHLAEIFGKVLQSDEYEEVEDKTVMAMGILHTIDTILTVVEDHKEITQQLENICLRIIDLVLQKHVIEFYEEILSLAYSLTCHSISPQMWQLLGILYEVFQQDCFEYFTDMMPLLHNYVTIDTDTLLSNAKHLEILFTMCRKVLCGDAGEDAECHAAKLLEVIILQCKGRGIDQCIPLFVQLVLERLTRGVKTSELRTMCLQVAIAALYYNPDLLLHTLERIQLPHNPGPITVQFINQWMNDTDCFLGHHDRKMCIIGLSILLELQNRPPAVDAVVGQIVPSILFLFLGLKQVCATRQLVNREDRSKAEKADMEENEEISSDEEETNVTAQAMQSNNGRGEDEEEEDDDWDEEVLEETALEGFSTPLDLDNSVDEYQFFTQALITVQSRDAAWYQLLMAPLSEDQRTALQEVYTLAEHRRTVAEAKKKIEQQGGFTFENKGVLSAFNFGTVPSNN

SEQ ID NO: 43676 - protein, 793 aa, Homo sapiens
MLIQSEKKTQLSKTESVKESESLMEFAQPEIQPQEFLNRRYMTEVDYSNKQGEEQPWEADYARKPNLPKRWDMLTEPDGQEKKQESFKSWEASGKHQEVSKPAVSLEQRKQDTSKLRSTLPEEQKKQEISKSKPSPSQWKQDTPKSKAGYVQEEQKKQETPKLWPVQLQKEQDPKKQTPKSWTPSMQSEQNTTKSWTTPMCEEQDSKQPETPKSWENNVESQKHSLTSQSQISPKSWGVATASLIPNDQLLPRKLNTEPKDVPKPVHQPVGSSSTLPKDPVLRKEKLQDLMTQIQGTCNFMQESVLDFDKPSSAIPTSQPPSATPGSPVASKEQNLSSQSDFLQEPLQATSSPVTCSSNACLVTTDQASSGSETEFMTSETPEAAIPPGKQPSSLASPNPPMAKGSEQGFQSPPASSSSVTINTAPFQAMQTVFNVNAPLPPRKEQEIKESPYSPGYNQSFTTASTQTPPQCQLPSIHVEQTVHSQETANYHPDGTIQVSNGSLAFYPAQTNVFPRPTQPFVNSRGSVRGCTRGGRLITNSYRSPGGYKGFDTYRGLPSISNGNYSQLQFQAREYSGAPYSQRDNFQQCYKRGGTSGGPRANSRAGWSDSSQVSSPERDNETFNSGDSGQGDSRSMTPVDVPVTNPAATILPVHVYPLPQQMRVAFSAARTSNLAPGTLDQPIVFDLLLNNLGETFDLQLGRFNCPVNGTYVFIFHMLKLAVNVPLYVNLMKNEEVLVSAYANDGAPDHETASNHAILQLFQGDQIWLRLHRGAIYGSSWKYSTFSGYLLYQD

SEQ ID NO: 43677 - protein, 794 aa, Homo sapiens
MLIQSEKKTQLSKTESVKESESLMEFAQPEIQPQEFLNRRYMTEVDYSNKQGEEQPWEADYARKPNLPKRWDMLTEPDGQEKKQESFKSWEASGKHQEVSKPAVSLEQRKQDTSKLRSTLPEEQKKQEISKSKPSPSQWKQDTPKSKAGYVQEEQKKQETPKLWPVQLQKEQDPKKQTPKSWTPSMQSEQNTTKSWTTPMCEEQDSKQPETPKSWENNVESQKHSLTSQSQISPKSWGVATASLIPNDQLLPRKLNTEPKDVPKPVHQPVGSSSTLPKDPVLRKEKLQDLMTQIQGTCNFMQESVLDFDKPSSAIPTSQPPSATPGSPVASKEQNLSSQSDFLQEPLQATSSPVTCSSNACLVTTDQASSGSETEFMTSETPEAAIPPGKQPSSLASPNPPMAKGSEQGFQSPPASSSSVTINTAPFQAMQTVFNVNAPLPPRKEQEIKESPYSPGYNQSFTTASTQTPPQCQLPSIHVEQTVHSQETAANYHPDGTIQVSNGSLAFYPAQTNVFPRPTQPFVNSRGSVRGCTRGGRLITNSYRSPGGYKGFDTYRGLPSISNGNYSQLQFQAREYSGAPYSQRDNFQQCYKRGGTSGGPRANSRAGWSDSSQVSSPERDNETFNSGDSGQGDSRSMTPVDVPVTNPAATILPVHVYPLPQQMRVAFSAARTSNLAPGTLDQPIVFDLLLNNLGETFDLQLGRFNCPVNGTYVFIFHMLKLAVNVPLYVNLMKNEEVLVSAYANDGAPDHETASNHAILQLFQGDQIWLRLHRGAIYGSSWKYSTFSGYLLYQD

SEQ ID NO: 43678 - protein, 686 aa, Homo sapiens
MEQSSLYFWDLLEGSEKAVVGTTYKHLKDLLSKLLNSGYFESIPVPKNAKEKEVPLEEEMLIQSEKKTQLSKTESVKESESLMEFAQPEIQPQEFLNRRYMTEVDYSNKQGEEQPWEADYARKPNLPKRWDMLTEPDGQEKKQESFKSWEASGKHQEVSKPAVSLEQRKQDTSKLRSTLPEEQKKQEISKSKPSPSQWKQDTPKSKAGYVQEEQKKQETPKLWPVQLQKEQDPKKQTPKSWTPSMQSEQNTTKSWTTPMCEEQDSKQPETPKSWENNVESQKHSLTSQSQISPKSWGVATASLIPNDQLLPRKLNTEPKDVPKPVHQPVGSSSTLPKDPVLRKEKLQDLMTQIQGTCNFMQESVLDFDKPSSAIPTSQPPSATPGSPVASKEQNLSSQSDFLQEPLQATSSPVTCSSNACLVTTDQASSGSETEFMTSETPEAAIPPGKQPSSLASPNPPMAKGSEQGFQSPPASSSSVTINTAPFQAMQTVFNVNAPLPPRKEQEIKESPYSPGYNQSFTTASTQTPPQCQLPSIHVEQTVHSQETANYHPDGTIQVSNGSLAFYPAQTNVFPRPTQPFVNSRGSVRGCTRGGRLITNSYRSPGGYKGFDTYRGLPSISNGNYSQLQFQAREYSGAPYSQRDNFQQCYKRGGTSGGPRANSRANCFIMRNSLLLIKQQGGVILLR

SEQ ID NO: 43679 - protein, 246 aa, Homo sapiens [sequence omitted]

SEQ ID NO: 43680 - protein, 1293 aa, Homo sapiens
MRFHHVDQAGLELLTSSNSPASASRSAEITVVSQHAQPGFLYQWLEADRHGKSQGAANTTSGENFDQSPLRRTFKSKVLAHYPQNIEWNPFDQDAVNMLCMPKGLSFRTQTDNKDPQFHSFIITREDGSRTYGFVLTFYEEVTSKQICTAMQTLYQMHNAEHYSSVYASSSCSMDSLASSLDEGDTTSLLKLQRYNSYDISRDTLYVSKSICLITPLPFMQACKKFLIQLYKAVTSQQPPPLPLESYIHNILYEVPLPPPGRSLKFYGVYEPVICQRPGPSELPLSDYPLREAFELLGLENLVQVFTCVLLEMQILLYSQDYQRLMTVAEGITTLLFPFQWQHVYVPILPASLLHFLDAPVPYLMGLQSKEGTDRSKLELPQEANLCFVDIDNHFIELPEEFPQFPNKVDFIQELSEVLVQFGIPPEGSLHCSESTSKLKNMVLKDLVNDKKNGNVCTNNISMYELLKGNETIARLQALAKRTGVAVEKMDLSASLGEKDKDLKLHCEEAELRDYQLNVQLREVFANRFTQMFADYEAFVIQTAQDMESWLTNREQMQNFDKASFLSDQPEPYLPFLSRFIETQMFATFIDNKIMSQWEEKDPLLRVFDTRIDKIRLYNVRAPTLRTSIYQKCSTLKEAAQSIEQRLMKMDHTAIHPHLLDMKIGQGKYEQGFFPKLQSDVLATGPTSNNRWVSRSATAQRRKERLRQHSEHVGLDNDLREKYMQEARSLGKNLRQPKLSDLSPAVIAQTNCKFVEGLLKECRMKTKRMLVEKMGHEAVELGHGEANITGLEENTLIASLCDLLERIWSHGLQVKQGKSALWSHLIQFQDREEKQEHLAESPVALGPERRKSDSGVMLPTLRVSLIQDMRHIQNMSEIKTDVGRARAWIRLSLEKKLLSQHLKQLLSNQPLTKKLYKRYAFLRCEEEREQFLYHLLSLNAVDYFCFTSVFTTIMIPYRSVIIPIKKLSNAIITSNPWICVSGELGDTGVMQIPKNLLEMTFECQNLGKLTTVQIGHDNSGLLAKWLVDCVMVRNEITGHTYRFPCGRWLGKGIDDGSLERILIGELMTSASDEDLVKQCRTPPQQKSPTTARRLSITSLTGKNNKPNAGQIQEGIGEAVNNIVKHFHKPEKERGSLTVLLCGENGLVAALEQVFHHGFKSARIFHKNVFIWDFIEKVVAYFETTDQILDNEDDVLIQKSSCKTFCHYVNAINTAPRNIGKDGKFQILVCLGTRDRLLPQWIPLLAECPAITRMYEESALLRDRMTVNSLIRILQTIQDFTIVLEGSLIKGVDV

SEQ ID NO: 43681 - protein, 504 aa, Homo sapiens
MPKGLSFRTQTDNKDPQFHSFIITREDGSRTYGFVLTFYEEVTSKQICTAMQTLYQMHNAEHYSSVYASSSCSMDSLASSLDEGDTTSLLKLQRYNSYDISRDTLYVSKSICLITPLPFMQACKKFLIQLYKAVTSQQPPPLPLESYIHNILYEVPLPPPGRSLKFYGVYEPVICQRPGPSELPLSDYPLREAFELLGLENLVQVFTCVLLEMQILLYSQDYQRLMTVAEGITTLLFPFQWQHVYVPILPASLLHFLDAPVPYLMGLQSKEGTDRSKLELPQEANLCFVDIDNHFIELPEEFPQFPNKVDFIQELSEVLVQFGIPPEGSLHCSESTSKLKNMVLKDLVNDKKNGNVCTNNISMYELLKGNETIARLQALAKRTGVAVEKMDLSASLGEKDKDLKLHCEEAELRDYQLNVQLREVFANRFTQMFADYEAFVIQTAQDMESWLTNREQMQNFDKVKRTIVFLLWLLVALLLILTFLNFLFFCAYAYPYIIDFVNLF

SEQ ID NO: 43682 - protein, 61 aa, Homo sapiens
MCTPKFLPAFTRASSQLACLCLQLGFTECSLLENDLGLLFMKKKSLTEDSHTPTICLSDFF

SEQ ID NO: 43683 - protein, 1638 aa, Homo sapiens
MSSGVTQNVWLNSPMRNPVHSHIGATVSHQTDFGANVPNMPALQSQLITSDTYSMQMQMIPSNSTRLPVAYQGNQGLNQSFSEQQVDWTQQCISKGLTYPDYRPPPKLYRYSPQSFLPDSTIQKQNFIPHTSLQVKNSQLLNSVLTLPSRQTSAVPSQQYATQTDKRPPPPPYNCRYGSQPLQSTQHITKHLSMEVPQSREMLSSEIRTSFQQQWQNPNENVSTIGNFTNLKVNTNSKQPFNSPIRSSVDGVQTLAQTNEEKIMDSCNPTSNQVLDTSVAKEKLVRDIKTLVEIKQKFSELARKIKINKDLLMAAGCIKMTNTSYSEPAQNSKLSLKQTAKIQSGPQITPVMPENAERQTPTVVESAETNKTQCMLNSDIQEVNCRRFNQVDSVLPNPVYSEKRPMPDSSHDVKVLTSKTSAVEMTQAVLNTQLSSENVTKVEQNSPAVCETISVPKSMSTEEYKSKIQNENMLLLALLSQARKTQKTVLKDANQTIQDSKPDSCEMNPNTQMTGNQLNLKNMETPSTSNVSGRVLDNSFCSGQESSTKGMPAKSDSSCSMEVLATCLSLWKKQPSDTAKEKECDKLRTNTTAVGISKPANIHVKSPCSVVGNSNSQNKISNPSQQTALSMVMHNYESSGINITKGTELQIAVVSPLVLSEVKTLSVKGITPAVLPETVYPVIKEGSVCSLQNQLAENAKATAALKVDVSGPVASTATSTKIFPLTQKEKQNESTNGNSEVTPNVNQGKHNKLESAIHSPMNDQQISQESRNSTVVSSDTLQIDNICSLVEGDTSYNSQIAKIFSSLPLKMVEPQKPSLPNQQGIGSREPEKQLDNTTENKDFGFQKDKPVQCTDVSHKICDQSKSEPPLESSFNNLETNRVILEKSSLEHATEKSTANDTCSSAAIQEDIYPQEIDASSNYTPQDPARNEIHSDKAPVLYLHDQLSELLKEFPYGIEAVNTREGSVGQQTTYQTSEDQTADKTSSDSKDPADQIQITILSSEQMKEIFPEQDDQPYVVDKLAEPQKEEPITEVVSQCDLQAPAAGQSRDSVILDSEKDDIHCCALGWLSMVYEGVPQCQCNSIKNSSSEEEKQKEQCSPLDTNSCKQGERTSDRDVTVVQFKSLVNNPKTPPDGKSHFPELQDDSRKDTPKTKHKSLPRTEQELVAGQFSSKCDKLNPLQNHKRKKLRFHEVTFHSSNKMTASYEQASQETRQKKHVTQNSRPLKTKTAFLPNKDVYKKHSSLGQSLSPEKIKLKLKSVSFKQKRKLDQGNVLDMEVKKKKHDKQEQKGSVGATFKLGDSLSNPNERAIVKEKMVSNTKSVDTKASSSKFSRILTPKEYLQRQKHKEALSNKASKKICVKNVPCDSEHMRPSKLAVQVESCGKSNEKHSSGVQTSKESLNGLTSHGKNLKIHHSQESKTYNILRNVKEKVGGKQPDKIWIDKTKLDKLTNISNEAQFSQMPPQVKDQKKLYLNRVGFKCTERESISLTKLESSPRKLHKDKRQENKHKTFLPVKGNTEKSNMLEFKLCPDILLKNTNSVEERKDVKPHPRKEQAPLQVSGIKSTKEDWLKFVATKKRTQKDSQERDNVNSRLSKRSFSADGFEMLQNPVKDSKEMFQTYKQMYLEKRSRSLGSSPVK

SEQ ID NO: 43684 - protein, 181 aa, Homo sapiens
MEALIPVINKLQDVFNTVGADIIQLPQIVVVGTQSSGKSSVLESLVGRDLLPRGTGIVTRRPLILQLVHVSQEDKRKTTGEENGVEAEEWGKFLHTKNKLYTDFDEIRQEIENETERISGNNKGVSPEPIHLKIFSPNVVNLTLVDLPGMTKDTTLYRFISSLTGHSFSVSFAVSSHLPNV

SEQ ID NO: 43685 - protein, 550 aa, Homo sapiens
MTKVPVGDQPKDIELQIRELILRFISNPNSIILAVTAANTDMATSEALKISREVDPDGRRTLAVITKLDLMDAGTDAMDVLMGRVIPVKLGIIGVVNRSQLDINNKKSVTDSIRDEYAFLQKKYPSLANRNGTKYLARTLNRLLMHHIRDCLPELKTRINVLAAQYQSLLNSYGEPVDDKSATLLQLITKFATEYCNTIEGTAKYIETSELCGGARICYIFHETFGRTLESVDPLGGLNTIDILTAIRNATGPRPALFVPEVSFELLVKRQIKRLEEPSLRCVELVHEEMQRIIQHCSNYSTQELLRFPKLHDAIVEVVTCLLRKRLPVTNEMVHNLVAIELAYINTKHPDFADACGLMNNNIEEQRRNRLARELPSAVSRDKVASGGGGVGDGVQEPTTGNWRGMLKTSKAEELLAEEKSKPIPIMPASPQKGHAVNLLDVPVPVARKLSAREQRDCEVIERLIKSYFLIVRKNIQDSVPKAVMHFLVNHVKDTLQSELVGQLYKSSLLDDLLTESEDMAQRRKEAADMLKALQGASQIIAEIRETHLW

SEQ ID NO: 43686 - protein, 561 aa, Homo sapiens
MTKVPVGDQPKDIELQIRELILRFISNPNSIILAVTAANTDMATSEALKISREVDPDGRRTLAVITKLDLMDAGTDAMDVLMGRVIPVKLGIIGVVNRSQLDINNKKSVTDSIRDEYAFLQKKYPSLANRNGTKYLARTLNRLLMHHIRDCLPELKTRINVLAAQYQSLLNSYGEPVDDKSATLLQLITKFATEYCNTIEGTAKYIETSELCGGARICYIFHETFGRTLESVDPLGGLNTIDILTAIRNATGPRPALFVPEVSFELLVKRQIKRLEEPSLRCVELVHEEMQRIIQHCSNYSTQELLRFPKLHDAIVEVVTCLLRKRLPVTNEMVHNLVAIELAYINTKHPDFADACGLMNNNIEEQRRNRLARELPSAVSRDKLIQDSRRETKNVASGGGGVGDGVQEPTTGNWRGMLKTSKAEELLAEEKSKPIPIMPASPQKGHAVNLLDVPVPVARKLSAREQRDCEVIERLIKSYFLIVRKNIQDSVPKAVMHFLVNHVKDTLQSELVGQLYKSSLLDDLLTESEDMAQRRKEAADMLKALQGASQIIAEIRETHLW

SEQ ID NO: 43687 - protein, 576 aa, Homo sapiens
MTKVPVGDQPKDIELQIRELILRFISNPNSIILAVTAANTDMATSEALKISREVDPDGRRTLAVITKLDLMDAGTDAMDVLMGRVIPVKLGIIGVVNRSQLDINNKKSVTDSIRDEYAFLQKKYPSLANRNGTKYLARTLNRLLMHHIRDCLPELKTRINVLAAQYQSLLNSYGEPVDDKSATLLQLITKFATEYCNTIEGTAKYIETSELCGGARICYIFHETFGRTLESVDPLGGLNTIDILTAIRNATGPRPALFVPEVSFELLVKRQIKRLEEPSLRCVELVHEEMQRIIQHCSNYSTQELLRFPKLHDAIVEVVTCLLRKRLPVTNEMVHNLVAIELAYINTKHPDFADACGLMNNNIEEQRRNRLARELPSAVSRDKSSKVPSALAPASQEPSPAASAEADGKVASGGGGVGDGVQEPTTGNWRGMLKTSKAEELLAEEKSKPIPIMPASPQKGHAVNLLDVPVPVARKLSAREQRDCEVIERLIKSYFLIVRKNIQDSVPKAVMHFLVNHVKDTLQSELVGQLYKSSLLDDLLTESEDMAQRRKEAADMLKALQGASQIIAEIRETHLW

SEQ ID NO: 43688 - protein, 403 aa, Homo sapiens
MQFCANKLDKKDFFGKSDPFLVFYRSNEDGSFTICHKTEVVKNTLNPVWQAFKISVRALCNGDYDRTIKVEVYDWDRDGSHDFIGEFTTSYRELSRGQSQFNVYEVVNPKKKGKKKKYTNSGTVTLLSFLVETEVSFLDYIKGGTQINFTVAIDFTASNGNPAQPTSLHYMNPYQLNAYGMALKAVGEIVQDYDSDKMFPALGFGAKLPPDGRISHEFALNGNPQNPYCDGIEGVMEAYYRSLKSVQLYGPTNFAPVINHVARYASSVKDGSQYFVLLIVTDGVISDMAQTKESIVNASKLPMSIIIVGVGPAEFDAMVELDGDDVRVSSRGKYAERDIVQFVPFRDYIDRSGNHILSMARLAKDVLAEIPEQFLSYMRARGIKPSPAPPPYTPPTHVLQTQI

SEQ ID NO: 43689 - protein, 589 aa, Homo sapiens
MIAIPATFVNSAIRYLECKLALAFRTRLVDHAYETYFTNQTYYKVINMDGRLANPDQSLTEDIMMFSQSVAHLYSNLTKPILDVMLTSYTLIQTATSRGASPIGPTLLAGLVVYATAKVLKACSPKFGKLVAEEAHRKGYLRYVHSRIIANVEEIAFYRGHKVEMKQLQKSYKALADQMNLILSKRLWYIMIEQFLMKYVWSSSGLIMVAIPIITATGFADGEDGQKQVMVSERTEAFTTARNLLASGADAIERIMSSYKEVTELAGYTARVYNMFWVFDEVKRGIYKRTAVIQESESHSKNGAKVELPLSDTLAIKGKVIDVDHGIICENVPIITPAGEVVASRLNFKVEEGMHLLITGPNGCGKSSLFRILSGLWPVYEGVLYKPPPQHMFYIPQRPYMSLGSLRDQVIYPDSVDDMHDKGYTDQDLERILHNVHLYHIVQREGGWDAVMDWKDVLSGGEKQRMGMARMFYHKPKYALLDECTSAVSIDVEGKIFQAAKGAGISLLSITHRPSLWKYHTHLLQFDGEGGWRFEQLDTAIRLTLSEEKQKLESQLAGIPKMQQRLNELCKILGEDSVLKTIKNEDETS

SEQ ID NO: 43690 - protein, 7 aa, Homo sapiens
MGRCRTF

SEQ ID NO: 43691 - protein, 2456 aa, Homo sapiens
MRVASVQQVGWSLLCKLIEVCPGTMQSLMGPQDVGNDWEVLGVHQLILKMLTVHNASVNLSVIGLKTLDLLLTSGKITLLILDEESDIFMLIFDAMHSFPANDEVQKLGCKALHVLFERVSEEQLTEFVENKDYMILLSALTNFKDEEEIVLHVLHCLHSLAIPCNNVEVLMSGNVRCYNIVVEAMKAFPMSERIQEVSCCLLHRLTLGNFFNILVLNEVHEFVVKAVQQYPENAALQISALSCLALLTETIFLNQDLEEKNENQENDDEGEEDKLFWLEACYKALTWHRKNKHVQEAACWALNNLLMYQNSLHEKIGDEDGHFPAHREVMLSMLMHSSSKEVFQASANALSTLLEQNVNFRKILLSKGIHLNVLELMQKHIHSPEVAESGCKMLNHLFEGSNTSLDIMAAVVPKILTVMKRHETSLPVQLEALRAILHFIVPGMPEESREDTEFHHKLNMVKKQCFKNDIHKLVLAALNRFIGNPGIQKCGLKVISSIVHFPDALEMLSLEGAMDSVLHTLQMYPDDQEIQCLGLSLIGYLITKKNVFIGTGHLLAKILVSSLYRFKDVAEIQTKGFQTILAILKLSASFSKLLVHHSFDLVIFHQMSSNIMEQKDQQFLNLCCKCFAKVAMDDYLKNVMLERACDQNNSIMVECLLLLGADANQAKEGSSLICQVCEKESSPKLVELLLNSGSREQDVRKALTISIGKGDSQIISLLLRRLALDVANNSICLGGFCIGKVEPSWLGPLFPDKTSNLRKQTNIASTLARMVIRYQMKSAVEEGTASGSDGNFSEDVLSKFDEWTFIPDSSMDSVFAQSDDLDSEGSEGSFLVKKKSNSISVGEFYRDAVLQRCSPNLQRHSNSLGPIFDHEDLLKRKRKILSSDDSLRSSKLQSHMRHSDSISSLASEREYITSLDLSANELRDIDALSQKCCISVHLEHLEKLELHQNALTSFPQQLCETLKSLTHLDLHSNKFTSFPSYLLKMSCIANLDVSRNDIGPSVVLDPTVKCPTLKQFNLSYNQLSFVPENLTDVVEKLEQLILEGNKISGICSPLRLKELKILNLSKNHISSLSENFLEACPKVESFSARMNFLAAMPFLPPSMTILKLSQNKFSCIPEAILNLPHLRSLDMSSNDIQYLPGPAHWKSLNLRELLFSHNQISILDLSEKAYLWSRVEKLHLSHNKLKEIPPEIGCLENLTSLDVSYNLELRSFPNEMGKLSKIWDLPLDELHLNFDFKHIGCKAKDIIRFLQQRLKKAVPYNRMKLMIVGNTGSGKTTLLQQLMKTKKSDLGMQSATVGIDVKDWPIQIRDKRKRDLVLNVWDFAGREEFYSTHPHFMTQRALYLAVYDLSKGQAEVDAMKPWLFNIKARASSSPVILVGTHLDVSDEKQRKACMSKITKELLNKRGFPAIRDYHFVNATEESDALAKLRKTIINESLNFKIRDQLVVGQLIPDCYVELEKIILSERKNVPIEFPVIDRKRLLQLVRENQLQLDENELPHAVHFLNESGVLLHFQDPALQLSDLYFVEPKWLCKIMAQILTVKVEGCPKHPKGIISRRDVEKFLSKKRKFPKNYMSQYFKLLEKFQIALPIGEEYLLVPSSLSDHRPVIELPHCENSEIIIRLYEMPYFPMGFWSRLINRLLEISPYMLSGRERALRPNRMYWRQGIYLNWSPEAYCLVGSEVLDNHPESFLKITVPSCRKGCILLGQVVDHIDSLMEEWFPGLLEIDICGEGETLLKKWALYSFNDGEEHQKILLDDLMKKAEEGDLLVNPDQPRLTIPISQIAPDLILADLPRNIMLNNDELEFEQAPEFLLGDGSFGSVYRAAYEGEEVAVKIFNKHTSLRLLRQELVVLCHLHHPSLISLLAAGIRPRMLVMELASKGSLDRLLQQDKASLTRTLQHRIALHVADGLRYLHSAMIIYRDLKPHNVLLFTLYPNAAIIAKIADYGIAQYCCRMGIKTSEGTPGFRAPEVARGNVIYNQQADVYSFGLLLYDILTTGGRIVEGLKFPNEFDELEIQGKLPDPVKEYGCAPWPMVEKLIKQCLKENPQERPTSAQVFDILNSAELVCLTRRILLPKNVIVECMVATHHNSRNASIWLGCGHTDRGQLSFLDLNTEGYTSEEVADSRILCLALVHLPVEKESWIVSGTQSGTLLVINTEDGKKRHTLEKMTDSVTCLYCNSFSKQSKQKNFLLVGTADGKLAIFEDKTVKLKGAAPLKILNIGNVSTPLMCLSESTNSTERNVMWGGCGTKIFSFSNDFTIQKLIETRTSQLFSYAAFSDSNIITVVVDTALYIAKQNSPVVEVWDKKTEKLCGLIDCVHFLREVMVKENKESKHKMSYSGRVKTLCLQKNTALWIGTGGGHILLLDLSTRRLIRVIYNFCNSVRVMMTAQLGSLKNVMLVLGYNRKNTEGTQKQKEIQSCLTVWDINLPHEVQNLEKHIEVRKELAEKMRRTSVE

SEQ ID NO: 43692 - protein, 499 aa, Homo sapiens [sequence omitted]

SEQ ID NO: 43693 - protein, 1686 aa, Homo sapiens
MDFNSPNDYNKLVLSLLSGLPNEVDFAINVCTLLSNESKHVMQLEKDPKIITLLLANAGVFDDTLGSFSTVFGEEWKEKTDRDFVKFWKDIVDDNEVRDLISDRNKSHEGTSGEWIWESLFHPPRKLGINDIEGQRVLQIAVILRNLSFEEGNVKLLAANRTCLRFLLLSAHSHFISLRQLGLDTLGNIAAELLLDPVDFKTTHLMFHTVTKCLMSRDRFLKMRGMEILGNLCKAEDNGVLICEYVDQDSYREIICHLTLPDVLLVISTLEVLYMLTEMGDVACTKIAKVEKSIDMLVCLVSMDIQMFGPDALAAVKLIEHPSSSHQMLSEIRPQAIEQVQTQTHVASAPASRAVVAQHVAPPPGIVEIDSEKFACQWLNAHFEVNPDCSVSRAEMYSEYLSTCSKLARGGILTSTGFYKCLRTVFPNHTVKRVEDSSSNGQAHIHVVGVKRRAIPLPIQMYYQQQPVSTSVVRVDSVPDVSPAPSPAGIPHGSQTIGNHFQRTPVANQSSNLTATQMSFPVQGVHTVAQTVSRIPQNPSPHTHQQQNAPVTVIQSKAPIPCEVVKATVIQNSIPQTGVPVSIAVGGGPPQSSVVQNHSTGPQPVTVVNSQTLLHHPSVIPQQSPLHTVVPGQIPSGTPVTVIQQAVPQSHMFGRVQNIPACTSTVSQGQQLITTSPQPVQTSSQQTSAGSQSQDTVIIAPPQYVTTSASNIVSATSVQNFQVATGQMVTIAGVPSPQASRVGFQNIAPKPLPSQQVSSTVVQQPIQQPQQPTQQSVVIVSQPAQQGQTYAPAIHQIVLANPAALPAGQTVQLTGQPNITPSSSPSPVPATNNQVPTAMSSSSTPQSQGPPPTVSQMLSVKRQQQQQHSPAPPPQQVQVQVQQPQQVQMQVQPQQSNAGVGQPASGESSLIKQLLLPKRGPSTPGGKLILPAPQIPPPNNARAPSPQVVYQVASNQAAGFGVQGQTPAQQLLVGQQNVQLVPSAMPPSGGVQTVPISNLQILPGPLISNSPATIFQGTSGNQVTITVVPNTSFAPATVSQGNATQLIAPAGITMSGTQTGVGLPVQTLPATQASPAGQSSCTTATPPFKGDKIICQKEEEAKEATGLHVHERKIEVMENPSCRRGATNTSNGDTKENEMHVGSLLNGRKYSDSSLPPSNSGKIQSETNQCSLISNGPSLELGENGASGKQNSEQIDMQDIKSDLRKPLVNGICDFDKGDGSHLSKNIPNHKTSNHVGNGEISPMEPQGTLDITQQDTAKGDQLERISNGPVLTLGGSSVSSIQEASNAATQQFSGTDLLNGPLASSLNSDVPQQRPSVVVSPHSTTSVIQGHQIIAVPDSGSKVSHSPALSSDVRSTNGTAECKTVKRPAEDTDRETVAGIPNKVGVRIVTISDPNNAGCSATMVAVPAGADPSTVAKVAIESAVQQKQQHPPTYVQNVVPQNTPMPPSPAVQVQGQPNSSQPSPFSGSSQPGDPMRKPGQNFMCLWQSCKKWFQTPSQVFYHAATEHGGKDVYPGQCLWEGCEPFQRQRFSFITHLQDKHCSKDALLAGLKQDEPGQAGSQKSSTKQPTVGGTSSTPRAQKAIVNHPSAALMALRRGSRNLVFRDFTDEKEGPITKHIRLTAALILKNIGKYSECGRRLLKRHENNLSVLAISNMEASSTLAKCLYELNFTVQSKEQEKDSEMLQ

SEQ ID NO: 43694 - protein, 472 aa, Homo sapiens [sequence omitted]

SEQ ID NO: 43695 - protein, 544 aa, Homo sapiens [sequence omitted]

SEQ ID NO: 43696 - protein, 358 aa, Homo sapiens
MLSSFLPPVPSLPSDPPEHFPLRKTVSEPNLKLRYKPKKSLERRKNPLLRKESAPPSLRRRPAETLGDSSPSSSSTPASGCSSPNDSEHGPNPILGSEADSDRRTHPTLGPRGPILGSPHTPLFLPHGLEPEAGGTLPSRLQPILLLDPSGSHAPLLTVPGLGPLPFHFAQSLMTTERLSGSGLHWPLSRTRSEPLPPSATAPPPPGPMQPRLEQLKTHVQVIKRSAKPSEKPRLRQIPSAEDLETDGGGPGQVVDDGLEHRELGHGQPEARGPAPLQQHPQVLLWEQQRLAGRLPRGSTGDTVLLPLAQGGHRPLSRAQSSPAAPASLSAPEPASQARVLSSSETPARTLPFTTGSL

SEQ ID NO: 43697 - protein, 840 aa, Homo sapiens
MCVIQSRQLVRTPQRTAGEASTSSMLIPKPPPKTDILKSLDTMDDPDTVGSIPVFKTEWIMTHEEHHAAKTLGIGKAIAVLTSGGDAQGMNAAVRAVVRVGIFTGARVFFVHEGYQGLVDGGDHIKEATWESVSMMLQLGGTVIGSARCKDFREREGRLRAAYNLVKRGITNLCVIGGDGSLTGADTFRSEWSDLLSDLQKAGKITDEEATKSSYLNIVGLVGSIDNDFCGTDMTIGTDSALHRIMEIVDAITTTAQSHQRTFVLEVMGRHCGYLALVTSLSCGADWVFIPECPPDDDWEEHLCRRLSETRTRGSRLNIIIVAEGAIDKNGKPITSEDIKNLVVKRLGYDTRVTVLGHVQRGGTPSAFDRILGSRMGVEAVMALLEGTPDTPACVVSLSGNQAVRLPLMECVQVTKDVTKAMDEKKFDEALKLRGRSFMNNWEVYKLLAHVRPPVSKSGSHTVAVMNVGAPAAGMNAAVRSTVRIGLIQGNRVLVVHDGFEGLAKGQIEEAGWSYVGGWTGQGGSKLGTKRTLPKKSFEQISANITKFNIQGLVIIGGFEAYTGGLELMEGRKQFDELCIPFVVIPATVSNNVPGSDFSVGADTALNTICTTCDRIKQSAAGTKRRVFIIETMGGYCGYLATMAGLAAGADAAYIFEEPFTIRDLQANVEHLVQKMKTTVKRGLVLRNEKCNENYTTDFIFNLYSEEGKGIFDSRKNVLGHMQQGGSPTPFDRNFATKMGAKAMNWMSGKIKESYRNGRIFANTPDSGCVLGMRKRALVFQPVAELKDQTDFEHRIPKEQWWLKLRPILKILAKYEIDLDTSDHAHLEHITRKRSGEAAV

SEQ ID NO: 43698 - protein, 720 aa, Homo sapiens
MNAAVRAVVRVGIFTGARVFFVHEGYQGLVDGGDHIKEATWESVSMMLQLGGTVIGSARCKDFREREGRLRAAYNLVKRGITNLCVIGGDGSLTGADTFRSEWSDLLSDLQKAGKITDEEATKSSYLNIVGLVGSIDNDFCGTDMTIGTDSALHRIMEIVDAITTTAQSHQRTFVLEVMGRHCGYLALVTSLSCGADWVFIPECPPDDDWEEHLCRRLSETRTRGSRLNIIIVAEGAIDKNGKPITSEDIKNGSRMGVEAVMALLEGTPDTPACVVSLSGNQAVRLPLMECVQVTKDVTKAMDEKKFDEALKLRGRSFMNNWEVYKLLAHVRPPVSKSGSHTVAVMNVGAPAAGMNAAVRSTVRIGLIQGNRVLVVHDGFEGLAKGQIEEAGWSYVGGWTGQGGSKLGTKRTLPKKSFEQISANITKFNIQGLVIIGGFEAYTGGLELMEGRKQFDELCIPFVVIPATVSNNVPGSDFSVGADTALNTICTTCDRIKQSAAGTKRRVFIIETMGGYCGYLATMAGLAAGADAAYIFEEPFTIRDLQANVEHLVQKMKTTVKRGLVLRNEKCNENYTTDFIFNLYSEEGKGIFDSRKNVLGHMQQGGSPTPFDRNFATKMGAKAMNWMSGKIKESYRNGRIFANTPDSGCVLGMRKRALVFQPVAELKDQTDFEHRIPKEQWWLKLRPILKILAKYEIDLDTSDHAHLEHITRKRSGEAAV

SEQ ID NO: 43699 - protein, 390 aa, Homo sapiens [sequence omitted]

SEQ ID NO: 43700 - protein, 308 aa, Homo sapiens
MRPVVLVGPSLKGYEVTDMMQKALFDFLKHRFDGRISITRVTADLSLAKRSVLNNPGKRTIIERSSARSSIAEVQSEIERIFELAKSLQLVVLDADTINHPAQLAKTSLAPIIVFVKVSSPKVLQRLIRSRGKSQMKHLTVQMMAYDKLVQCPPESFDVILDENQLEDACEHLAEYLEVYWRATHHPAPGPGLLGPPSAIPGLQNQQLLGERGEEHSPLERDSLMPSDEASESSRQAWTGSSQRSSRHLEEDYADAYQDLYQPHRQHTSGLPSANGHDPQDRLLAQDSEHNHSDRNWQRNRPWPKDSY

SEQ ID NO: 43701 - protein, 634 aa, Homo sapiens
MLEEERKKRKQFQDLGRKMLEDPQERERRERRERMERETNGNEDEEGRQKIREEKDKSKELHAIKERYLGGIKKRRRTRHLNDRKFVFEWDASEDTSIDYNPLYKERHQVQLLGRGFIAGIDLKQQKREQSRFYGDLMEKRRTLEEKEQEEARLRKLRKKEAKQRWDDRHWSQKKLDEMTDRDWRIFREDYSITTKGGKIPNPIRSWKDSSLPPHILEVIDKCGYKEPTPIQRQAIPIGLQNRDIIGVAETGSGKTAAFLIPLLVWITTLPKIDRIEESDQGPYAIILAPTRELAQQIEEETIKFGKPLGIRTVAVIGGISREDQGFRLRMGCEIVIATPGRLIDVLENRYLVLSRCTYVVLDEADRMIDMGFEPDVQKILEHMPVSNQKPDTDEAEDPEKMLANFESGKHKYRQTVMFTATMPPAVERLARSYLRRPAVVYIGSAGKPHERVEQKVFLMSESEKRKKLLAILEQGFDPPIIIFVNQKKGCDVLAKSLEKMGYNACTLHGGKGQEQREFALSNLKAGAKDILVATDVAGRGIDIQDVSMVVNYDMAKNIEDYIHRIGRTGRAGKSGVAITFLTKEDSAVFYELKQAILESPVSSCPPELANHPDAQHKPGTILTKKRREETIFA

SEQ ID NO: 43702 - protein, 5231 aa, Homo sapiens
MEELPAHSWKCKACRVCRACGAGSAELNPNSEWFENYSLCHRCHKAQGGQTIRSVAEQHTPVCSRFSPPEPGDTPTDEPDALYVACQGQPKGGHVTSMQPKEPGPLQCEAKPLGKAGVQLEPQLEAPLNEEMPLLPPPEESPLSPPPEESPTSPPPEASRLSPPPEELPASPLPEALHLSRPLEESPLSPPPEESPLSPPPESSPFSPLEESPLSPPEESPPSPALETPLSPPPEASPLSPPFEESPLSPPPEELPTSPPPEASRLSPPPEESPMSPPPEESPMSPPPEASRLFPPFEESPLSPPPEESPLSPPPEASRLSPPPEDSPMSPPPEESPMSPPPEVSRLSPLPVVSRLSPPPEESPLSPPPEESPTSPPPEASRLSPPPEDSPTSPPPEDSPASPPPEDSLMSLPLEESPLLPLPEEPQLCPRSEGPHLSPRPEEPHLSPRPEEPHLSPQAEEPHLSPQPEEPCLCAVPEEPHLSPQAEGPHLSPQPEELHLSPQTEEPHLSPVPEEPCLSPQPEESHLSPQSEEPCLSPRPEESHLSPELEKPPLSPRPEKPPEEPGQCPAPEELPLFPPPGEPSLSPLLGEPALSEPGEPPLSPLPEELPLSPSGEPSLSPQLMPPDPLPPPLSPIITAAAPPALSPLGELEYPFGAKGDSDPESPLAAPILETPISPPPEANCTDPEPVPPMILPPSPGSPVGPASPILMEPLPPQCSPLLQHSLVPQNSPPSQCSPPALPLSVPSPLSPIGKVVGVSDEAELHEMETEKVSEPECPALEPSATSPLPSPMGDLSCPAPSPAPALDDFSGLGEDTAPLDGIDAPGSQPEPGQTPGSLASELKGSPVLLDPEELAPVTPMEVYPECKQTAGQGSPCEEQEEPRAPVAPTPPTLIKSDIVNEISNLSQGDASASFPGSEPLLGSPDPEGGGSLSMELGVSTDVSPARDEGSLRLCTDSLPETDDSLLCDAGTAISGGKAEGEKGRRRSSPARSRIKQGRSSSFPGRRRPRGGAHGGRGRGRARLKSTASSIETLVVADIDSSPSKEEEEEDDDTMQNTVVLFSNTDKFVLMQDMCVVCGSFGRGAEGHLLACSQCSQCYHPYCVNSKITKVMLLKGWRCVECIVCEVCGQASDPSRLLLCDDCDISYHTYCLDPPLLTVPKGGWKCKWCVSCMQCGAASPGFHCEWQNSYTHCGPCASLVTCPICHAPYVEEDLLIQCRHCERWMHAGCESLFTEDDVEQAADEGFDCVSCQPYVVKPVAPVAPPELVPMKVKEPEPQYFRFEGVWLTETGMALLRNLTMSPLHKRRQRRGRLGLPGEAGLEGSEPSDALGPDDKKDGDLDTDELLKGEGGVEHMECEIKLEGPVSPDVEPGKEETEESKKRKRKPYRPGIGGFMVRQRKSHTRTKKGPAAQAEVLSGDGQPDEVIPADLPAEGAVEQSLAEGDEKKKQQRRGRKKSKLEDMFPAYLQEAFFGKELLDLSRKALFAVGVGRPSFGLGTPKAKGDGGSERKELPTSQKGDDGPDIADEESRGLEGKADTPGPEDGGVKASPVPSDPEKPGTPGEGMLSSDLDRISTEELPKMESKDLQQLFKDVLGSEREQHLGCGTPGLEGSRTPLQRPFLQGGLPLGNLPSSSPMDSYPGLCQSPFLDSRERGGFFSPEPGEPDSPWTGSGGTTPSTPTTPTTEGEGDGLSYNQRSLQRWEKDEELGQLSTISPVLYANINFPNLKQDYPDWSSRCKQIMKLWRKVPAADKAPYLQKAKDNRAAHRINKVQKQAESQINKQTKVGDIARKTDRPALHLRIPPQPGALGSPPPAAAPTIFIGSPTTPAGLSTSADGFLKPPAGSVPGPDSPGELFLKLPPQVPAQVPSQDPFGLAPAYPLEPRFPTAPPTYPPYPSPTGAPAQPPMLGASSRPGAGQPGEFHTTPPGTPRHQPSTPDPFLKPRCPSLDNLAVPESPGVGGGKASEPLLSPPPFGESRKALEVKKEELGASSPSYGPPNLGFVDSPSSGTHLGGLELKTPDVFKAPLTPRASQVEPQSPGLGLRPQEPPPAQALAPSPPSHPDIFRPGSYTDPYAQPPLTPRPQPPPPESCCALPPRSLPSDPFSRVPASPQSQSSSQSPLTPRPLSAEAFCPSPVTPRFQSPDPYSRPPSRPQSRDPFAPLHKPPRPQPPEVAFKAGSLAHTSLGAGGFPAALPAGPAGELHAKVPSGQPPNFVRSPGTGAFVGTPSPMRFTFPQAVGEPSLKPPVPQPGLPPPHGINSHFGPGPTLGKPQSTNYTVATGNFHPSGSPLGPSSGSTGESYGLSPLRPPSVLPPPAPDGSLPYLSHGASQRSGITSPVEKREDPGTGMGSSLATAELPGTQDPGMSGLSQTELEKQRQRQRLRELLIRQQIQRNTLRQEKETAAAAAGAVGPPGSWGAEPSSPAFEQLSRGQTPFAGTQDKSSLVGLPPSKLSGPILGPGSFPSDDRLSRPPPPATPSSMDVNSRQLVGGSQAFYQRAPYPGSLPLQQQQQQLWQQQQATAATSMRFAMSARFPSTPGPELGRQALGSPLAGISTRLPGPGEPVPGPAGPAQFIELRHNVQKGLGPGGTPFPGQGPPQRPRFYPVSEDPHRLAPEGLRGLAVSGLPPQKPSAPPAPELNNSLHPTPHTKGPTLPTGLELVNRPPSSTELGRPNPLALEAGKLPCEDPELDDDFDAHKALEDDEELAHLGLGVDVAKGDDELGTLENLETNDPHLDDLLNGDEFDLLAYTDPELDTGDKKDIFNEHLRLVESANEKAEREALLRGVEPGPLGPEERPPPAADASEPRLASVLPEVKPKVEEGGRHPSPCQFTIATPKVEPAPAANSLGLGLKPGQSMMGSRDTRMGTGPFSSSGHTAEKASFGATGGPPAHLLTPSPLSGPGGSSLLEKFELESGALTLPGGPAASGDELDKMESSLVASELPLLIEDLLEHEKKELQKKQQLSAQLQPAQQQQQQQQQHSLLSAPGPAQAMSLPHEGSSPSLAGSQQQLSLGLAGARQPGLPQPLMPTQPPAHALQQRLAPSMAMVSNQGHMLSGQHGGQAGLVPQQSSQPVLSQKPMGTMPPSMCMKPQQLAMQQQLANSFFPDTDLDKFAAEDIIDPIAKAKMVALKGIKKVMAQGSIGVAPGMNRQQVSLLAQRLSGGPSSDLQNHVAAGSGQERSAGDPSQPRPNPPTFAQGVINEADQRQYEEWLFHTQQLLQMQLKVLEEQIGVHRKSRKALCAKQRTAKKAGREFPEADAEKLKLVTEQQSKIQKQLDQVRKQQKEHTNLMAEYRNKQQQQQQQQQQQQQQHSAVLALSPSQSPRLLTKLPGQLLPGHGLQPPQGPPGGQAGGLRLTPGGMALPGQPGGPFLNTALAQQQQQQHSGGAGSLAGPSGGFFPGNLALRSLGPDSRLLQERQLQLQQQRMQLAQKLQQQQQQQQQQQHLLGQVAIQQQQQQGPGVQTNQALGPKPQGLMPPSSHQGLLVQQLSPQPPQGPQGMLGPAQVAVLQQQHPGALGPQGPHRQVLMTQSRVLSSPQLAQQGQGLMGHRLVTAQQQQQQQQHQQQGSMAGLSHLQQSLMSHSGQPKLSAQPMGSLQQLQQQQQLQQQQQLQQQQQQQLQQQQQLQQQQLQQQQQQQQLQQQQQQQLQQQQQQLQQQQQQQQQQFQQQQQQQQMGLLNQSRTLLSPQQQQQQQVALGPGMPAKPLQHFSSPGALGPTLLLTGKEQNTVDPAVSSEATEGPSTHQGGPLAIGTTPESMATEPGEVKPSLSGDSQLLLVQPQPQPQPSSLQLQPPLRLPGQQQQQVSLLHTAGGGSHGQLGSGSSSEASSVPHLLAQPSVSLGDQPGSMTQNLLGPQQPMLERPMQNNTGPQPPKPGPVLQSGQGLPGVGIMPTVGQLRAQLQGVLAKNPQLRHLSPQQQQQLQALLMQRQLQQSQAVRQTPPYQEPGTQTSPLQGLLGCQPQLGGFPGPQTGPLQELGAGPRPQGPPRLPAPPGALSTGPVLGPVHPTPPPSSPQEPKRPSQLPSPSSQLPTEAQLPPTHPGTPKPQGPTLEPPPGRVSPAAAQLADTLFSKGLGPWDPPDNLAETQKPEQSSLVPGHLDQVNGQVVPEASQLSIKQEPREEPCALGAQSVKREANGEPIGAPGTSNHLLLAGPRSEAGHLLLQKLLRAKNVQLSTGRGSEGLRAEINGHIDSKLAGLEQKLQGTPSNKEDAAARKPLTPKPKRVQKASDRLVSSRKKLRKEDGVRASEALLKQLKQELSLLPLTEPAITANFSLFAPFGSGCPVNGQSQLRGAFGSGALPTGPDYYSQLLTKNNLSNPPTPPSSLPPTPPPSVQQKMVNGVTPSEELGEHPKDAASARDSERALRDTSEVKSLDLLAALPTPPHNQTEDVRMESDEDSDSPDSIVPASSPESILGEEAPRFPHLGSGRWEQEDRALSPVIPLIPRASIPVFPDTKPYGALGLEVPGKLPVTTWEKGKGSEVSVMLTVSAAAAKNLNGVMVAVAELLSMKIPNSYEVLFPESPARAGTEPKKGEAEGPGGKEKGLEGKSPDTGPDWLKQFDAVLPGYTLKSQLDILSLLKQESPAPEPPTQHSYTYNVSNLDVRQLSAPPPEEPSPPPSPLAPSPASPPTEPLVELPTEPLAEPPVPSPLPLASSPESARPKPRARPPEEGEDSRPPRLKKWKGVRWKRLRLLLTIQKGSGRQEDEREVAEFMEQLGTALRPDKVPRDMRRCCFCHEEGDGATDGPARLLNLDLDLWVHLNCALWSTEVYETQGGALMNVEVALHRGLLTKCSLCQRTGATSSCNRMRCPNVYHFACAIRAKCMFFKDKTMLCPMHKIKGPCEQELSSFAVFRRVYIERDEVKQIASIIQRGERLHMFRVGGLVFHAIGQLLPHQMADFHSATALYPVGYEATRIYWSLRTNNRRCCYRCSIGENNGRPEFVIKVIEQGLEDLVFTDASPQAVWNRIIEPVAAMRKEADMLRLFPEYLKGEELFGLTVHAVLRIAESLPGVESCQNYLFRYGRHPLMELPLMINPTGCARSEPKILTHYKRPHTLNSTSMSKAYQSTFTGETNTPYSKQFVHSKSSQYRRLRTEWKNNVYLARSRIQGLGLYAAKDLEKHTMVIEYIGTIIRNEVANRREKIYEEQNRGIYMFRINNEHVIDATLTGGPARYINHSCAPNCVAEVVTFDKEDKIIIISSRRIPKGEELTYDYQFDFEDDQHKIPCHCGAWNCRKWMN

SEQ ID NO: 43703 - protein, 362 aa, Homo sapiens
MPFAYFFTESEGFAGSRKGVLGRVYETVVMLMLLTLLVLGMVWVASAIVDKNKANRESLYDFWEYYLPYLYSCISFLGVLLLLVCTPLGLARMFSVTGKLLVKPRLLEDLEEQLYCSAFEEAALTRRICNPTSCWLPLDMELLHRQVLALQTQRVLLEKRRKASAWQRNLGYPLAMLCLLVLTGLSVLIVAIHILELLIDEAAMPRGMQGTSLGQVSFSKLGSFGAVIQVVLIFYLMVSSVVGFYSSPLFRSLRPRWHDTAMTQIIGNCVCLLVLSSALPVFSRTLGLTRFDLLGDFGRFNWLGNFYIVFLYNAAFAGLTTLCLVKTFTAAVRAELIRAFGLDRLPLPVSGFPQASRKTQHQ

SEQ ID NO: 43704 - protein, 266 aa, Homo sapiens
MPFAYFFTESEGFAGSRKGVLGRVYETVVMLMLLTLLVLGMVWVASAIVDKNKANRESLYDFWEYYLPYLYSCISFLGVLLLLVCTPLGLARMFSVTGKLLVKPRLLEDLEEQLYCSAFEEAALTRRICNPTSCWLPLDMELLHRQVLALQTQRVLLEKRRKASAWQRNLGYPLAMLCLLVLTGLSVLIVAIHILELLIDEAAMPRGMQGTSLGQVSFSKLGSFGAVIQVVLILYPSGNPSLPLFSKPVSWDSRPSTSWTLSPLGL

SEQ ID NO: 43705 - protein, 296 aa, Homo sapiens
MERLSVDYGKKSKLEFSIYPAPQVSTAVVEPYNSILTTHTTLEHSDCAFMVDNEAIYDICRRNLDIERPTYTNLNRLISQIVSSITASLRFDGALNVDLTEFQTNLVPYPRIHFPLATYAPVISAEKAYHEQLTVAEITNACFEPANQMVKCDPRHGKYMACCLLYRGDVVPKDVNAAIATIKTKRTIQFVDWCPTGFKVGINYQPPTVVPGGDLAKVQRAVCMLSNTTAVAEAWARLDHKFDLMYAKRAFVHWYVGEGMEEGEFSEAREDMAALEKDYEEVGADSADGEDEGEEY

SEQ ID NO: 43706 - protein, 951 aa, Homo sapiens
MPMPEPCELEERFALVLSSMNLPPDKARLLRQYDNEKKWDLICDQERFQVKNPPHTYIQKLQSFLDPSVTRKKFRRRVQESTKVLRELEISLRTNHIGWVREFLNDENKGLDVLVDYLSFAQCSVMYSTLPGRRALKNSRLVSQKDDVHVCILCLRAIMNYQYGFNLVMSHPHAVNEIALSLNNKNPRTKALVLELLAAVCLVRGGHEIILAAFDNFKEVCKELHRFEKLMEYFRNEDSNIDFMVACMQFINIVVHSVEDMNFRVHLQYEFTKLGLEEFLQKSRHTESEKLQVQIQAYLDNVFDVGGLLEDAETKNVALEKVEELEEHVSHLTEKLLDLENENMMRVAELEKQLLQREKELESIKETYENTSHQVHTLRRLIKEKEEAFQRRCHLEPNVRGLESVDSEALARVGPAELSEGMPPSDLDLLAPAPPPEEVLPLPPPPAPPLPPPPPPLPDKCPPAPPLPGAAPSVVLTVGLSAIRIKKPIKTKFRLPVFNWTALKPNQISGTVFSELDDEKILEDLDLDKFEELFKTKAQGPALDLICSKNKTAQKAASKVTLLEANRAKNLAITLRKAGRSAEEICRAIHTFDLQTLPVDFVECLMRFLPTEAEVKLLRQYERERQPLEELAAEDRFMLLFSKVERLTQRMAGMAFLGNFQDNLQMLTPQLNAIIAASASVKSSQKLKQMLEIILALGNYMNSSKRGAVYGFKLQSLDLLLDTKSTDRKMTLLHFIALTVKEKYPDLANFWHELHFVEKAAAVSLENVLLDVKELGRGMELIRRECSIHDNSVLRNFLSTNEGKLDKLQRDAKTAEEAYNAVVRYFGESPKTTPPSVFFPVFVRFIRSYKEAEQENEARKKQEEVMREKQLAQEAKKLDAKTPSQRNKWQQQELIAELRRRQAKEHRPVYEGKDGTIEDIITGLHCQPMVVRHQARSAAPPSGPPRAPGPH

SEQ ID NO: 43707 - protein, 1002 aa, Homo sapiens
MPMPEPCELEERFALVLSSMNLPPDKARLLRQYDNEKKWDLICDQERFQVKNPPHTYIQKLQSFLDPSVTRKKFRRRVQESTKVLRELEISLRTNHIGWVREFLNDENKGLDVLVDYLSFAQCSVMFDFEGLESGDDGAFDKLRSWSRSIEDLQPPSALSAPFTNSLARSARQSVLRYSTLPGRRALKNSRLVSQKDDVHVCILCLRAIMNYQYGFNLVMSHPHAVNEIALSLNNKNPRTKALVLELLAAVCLVRGGHEIILAAFDNFKEVCKELHRFEKLMEYFRNEDSNIDFMVACMQFINIVVHSVEDMNFRVHLQYEFTKLGLEEFLQKSRHTESEKLQVQIQAYLDNVFDVGGLLEDAETKNVALEKVEELEEHVSHLTEKLLDLENENMMRVAELEKQLLQREKELESIKETYENTSHQVHTLRRLIKEKEEAFQRRCHLEPNVRGLESVDSEALARVGPAELSEGMPPSDLDLLAPAPPPEEVLPLPPPPAPPLPPPPPPLPDKCPPAPPLPGAAPSVVLTVGLSAIRIKKPIKTKFRLPVFNWTALKPNQISGTVFSELDDEKILEDLDLDKFEELFKTKAQGPALDLICSKNKTAQKAASKVTLLEANRAKNLAITLRKAGRSAEEICRAIHTFDLQTLPVDFVECLMRFLPTEAEVKLLRQYERERQPLEELAAEDRFMLLFSKVERLTQRMAGMAFLGNFQDNLQMLTPQLNAIIAASASVKSSQKLKQMLEIILALGNYMNSSKRGAVYGFKLQSLDLLLDTKSTDRKMTLLHFIALTVKEKYPDLANFWHELHFVEKAAAVSLENVLLDVKELGRGMELIRRECSIHDNSVLRNFLSTNEGKLDKLQRDAKTAEAYNAVVRYFGESPKTTPPSVFFPVFVRFIRSYKEAEQENEARKKQEEVMREKQLAQEAKKLDAKTPSQRNKWQQQELIAELRRRQAKEHRPVYEGKDGTIEDIITVLKSVPFTARTAKRGSRFFCDAAHHDESNC

SEQ ID NO: 43708 - protein, 1330 aa, Homo sapiens
MDQPAGGPGNPRPGEGDDGSMEPGTCQELLHRLRELEAENSALAQANENQRETYERCLDEVANHVVQALLNQKDLREECIKLKKRVFDLERQNQMLSALFQQKLQLTTGSLPQIPLTPLQPPSEPPASPSLSSTEGPAAPLPLGHCAGQREVCWEQQLRPGGPGPPAAPPPALDALSPFLRKKAQILEVLRALEETDPLLLCSPATPWRPPGQGPGSPEPINGELCGPPQPEPSPWAPCLLLGPGNLGGLLHWERLLGGLGGEEDTGRPWGPSRGPPQAQGTSSGPNCAPGSSSSSSSDEAGDPNEAPSPDTLLGALARRQLNLGQLLEDTESYLQAFLAGAAGPLNGDHPGPGQSSSPDQAPPQLSKSKGLPKSAWGGGTPEAHRPGFGATSEGQGPLPFLSMFMGAGDAPLGSRPGHPHSSSQVKSKLQIGPPSPGEAQGPLLPSPARGLKFLKLPPTSEKSPSPGGPQLSPQLPRNSRIPCRNSGSDGSPSPLLARRGLGGGELSPEGAQGLPTSPSPCYTTPDSTQLRPPQSALSTTLSPGPVVSPCYENILDLSRSTFRGPSPEPPPSPLQVPTYPQLTLEVPQAPEVLRSPGVPPSPCLPESYPYGSPQEKSLDKAGSESPHPGRRTPGNSSKKPSQGSGRRPGDPGSTPLRDRLAALGKLKTGPEGALGSEKNGVPARPGTEKTRGPGKSGESAGDMVPSIHRPLEQLEAKGGIRGAVALGTNSLKQQEPGLMGDPGARVYSSHSMGARVDLEPVSPRSCLTKVELAKSRLAGALCPQVPRTPAKVPTSAPSLGKPNKSPHSSPTKLPSKSPTKVVPRPGAPLVTKESPKPDKGKGPPWADCGSTTAQSTPLVPGPTDPSQGPEGLAPHSAIEEKVMKGIEENVLRLQGQERAPGAEVKHRNTSSIASWFGLKKSKLPALNRRTEATKNKEGAGGGSPLRREVKMEARKLEAESLNISKLMAKAEDLRRALEEEKAYLSSRARPRPGGPAPGPNTGLGQVQGQLAGMYQGADTFMQQLLNRVDGKELPSKSWREPKPEYGDFQPVSSDPKSPWPACGPRNGLVGPLQGCGKPPGKPSSEPGRREEMPSEDSLAEPVPTSHFTACGSLTRTLDSGIGTFPPPDHGSSGTPSKNLPKTKPPRLDPPPGVPPARPPPLTKVPRRAHTLEREVPGIEELLVSGRHPSMPAFPALLPAAPGHRGHETCPDDPCEDPGPTPPVQLAKNWTFPNTRAAGSSSDPLMCPPRQLEGLPRTPMALPVDRKRSQEPSRPSPTPQGPPFGGSRTPSTSDMAEEGRVASGGPPGLETSESLSDSLYDSLSSCGSQG

SEQ ID NO: 43709 - protein, 628 aa, Homo sapiens [sequence omitted]

SEQ ID NO: 43710 - protein, 476 aa, Homo sapiens
MGPAPGQGLYRSPMPGAAYPRPGMLPGSRMTPQGPSMGPPGYGGNPSVRPGLAQSGMDQSRKRPAPQQIQQVQQQAVQNRNHNAKKKKMADKILPQRIRELVPESQAYMDLLAFERKLDQTIMRKRLDIQEALKRPIKQKRKLRIFISNTFNPAKSDAEDGEGTVASWELRVEGRLLEDSALSKYDATKQKRKFSSFFKSLVIELDKDLYGPDNHLVEWHRTATTQETDGFQVKRPGDVNVRCTVLLMLDYQPPQFKLDPRLARLLGIHTQTRPVIIQALWQYIKTHKLQDPHEREFVICDKYLQQIFESQRMKFSEIPQRLHALLMPPEPIIINHVISVDPNDQKKTACYDIDVEVDDTLKTQMNSFLLSTASQQEIATLDNKIHETIETINQLKTQREFMLSFARDPQGFINDWLQSQCRDLKTMTDVVGNPEEERRAEFYFQPWAQEAVCRYFYSKVQQRRQELEQALGIRNT

SEQ ID NO: 43711 - protein, 39 aa, Homo sapiens
MMLLTVYGGYLCSVRVYHYFQWRRAQRQAAEEQKTSGIM

SEQ ID NO: 43712 - protein, 583 aa, Homo sapiens
MYSSSCETTRNTTGIEESTDGMILGPEDLSYQIYDVSGESNSAVSTEDLKECLKKQLEFCFSRENLSKDLYLISQMDSDQFIPIWTVANMEEIKKLTTDPDLILEVLRSSPMVQVDEKGEKVRPSHKRCIVILREIPETTPIEEVKGLFKSENCPKVISCEFAHNSNWYITFQSDTDAQQAFKYLREEVKTFQGKPIMAPFPNGSFVNGFNSPGSYKTNAAAMNMGRPFQKNRVKPQFRSSGGSEHSTEGSVSLGDGQLNRYSSRNFPAERHNPTVTGHQEQTYLQKETSTLQVEQNGDYGRGRRTLFRGRRRREDDRISRPHPSTAESKAPTPKFDLLASNFPPLPGSSSRMPGELVLENRMSDVVKGVYKEKDNEELTISCPVPADEQTECTSAQQLNMSTSSPCAAELTALSTTQQEKDLIEDSSVQKDGLNQTTIPVSPPSTTKPSRASTASPCNNNINAATAVALQEPRKLSYAEVCQKPPKEPSSVLVQPLRELRSNVVSPTKNEDNGAPENSVEKPHEKPEARASKDYSGFRGNIIPRGAAGKIREQRRQFSHRAIPQGVTRRNGKEQYVPPRSPK

SEQ ID NO: 43713 - protein, 654 aa, Homo sapiens
MYSSSCETTRNTTGIEESTDGMILGPEDLSYQIYDVSGESNSAVSTEDLKECLKKQLEFCFSRENLSKDLYLISQMDSDQFIPIWTVANMEEIKKLTTDPDLILEVLRSSPMVQVDEKGEKVRPSHKRCIVILREIPETTPIEEVKGLFKSENCPKVISCEFAHNSNWYITFQSDTDAQQAFKYLREEVKTFQGKPIMARIKAINTFFAKNGYRLMDSSIYSHPIQTQAQYASPVFMQPVYNPHQQYSVYSIVPQSWSPNPTPYFETPLAPFPNGSFVNGFNSPGSYKTNAAAMNMGRPFQKNRVKPQFRSSGGSEHSTEGSVSLGDGQLNRYSSRNFPAERHNPTVTGHQEQTYLQKETSTLQVEQNGDYGRGRRTLFRGRRRREDDRISRPHPSTAESKAPTPKFDLLASNFPPLPGSSSRMPGELVLENRMSDVVKGVYKEKDNEELTISCPVPADEQTECTSAQQLNMSTSSPCAAELTALSTTQQEKDLIEDSSVQKDGLNQTTIPVSPPSTTKPSRASTASPCNNNINAATAVALQEPRKLSYAEVCQKPPKEPSSVLVQPLRELRSNVVSPTKNEDNGAPENSVEKPHEKPEARASKDYSGFRGNIIPRGAAGKIREQRRQFSHRAIPQGVTRRNGKEQYVPPRSPK

SEQ ID NO: 43714 - protein, 1458 aa, Homo sapiens
MALPMPTKRRSTFVQSPADACTPPDTSSASEDEGSLRRQAALSAALQQSLQNAESWINRSIQGSSTSSSASSTLSHGEVKGTSGSLADVFANTRIENFSAPPDVTTTTSSSSSSSSIRPANIDLPPSGIVKGMHKGSNRSSLMDTADGVPVSSRVSTKIQQLLNTLKRPKRPPLKEFFVDDSEEIVEVPQPDPNQPKPEGRQMTPVKGEPLGVICNWPPALESALQRWGTTQAKCSCLTALDMTGKPVYTLTYGKLWSRSLKLAYTLLNKLGTKNEPVLKPGDRVALVYPNNDPVMFMVAFYGCLLAEVIPVPIEVPLTRKDAGGQQIGFLLGSCGIALALTSEVCLKGLPKTQNGEIVQFKGWPRLKWVVTDSKYLSKPPKDWQPHISPAGTEPAYIEYKTSKEGSVMGVTVSRLAMLSHCQALSQACNYSEGETIVNVLDFKKDAGLWHGMFANVMNKMHTISVPYSVMKTCPLSWVQRVHAHKAKVALVKCRDLHWAMMAHRDQRDVSLSSLRMLIVTDGANPWSVSSCDAFLSLFQSHGLKPEAICPCATSAEAMTVAIRRPGVPGAPLPGRAILSMNGLSYGVIRVNTEDKNSALTVQDVGHVMPGGMMCIVKPDGPPQLCKTDEIGEICVSSRTGGMMYFGLAGVTKNTFEVIPVNSAGSPVGDVPFIRSGLLGFVGPGSLVFVVGKMDGLLMVSGRRHNADDIVATGLAVESIKTVYRGRIAVFSVSVFYDERIVVVAEQRPDASEEDSFQWMSRVLQAIDSIHQVGVYCLALVPANTLPKTPLGGIHISQTKQLFLEGSLHPCNILMCPHTCVTNLPKPRQKQPGVGPASVMVGNLVAGKRIAQAAGRDLGQIEENDLVRKHQFLAEILQWRAQATPDHVLFMLLNAKGTTVCTASCLQLHKRAERIASVLGDKGHLNAGDNVVLLYPPGIELIAAFYGCLYAGCIPVTVRPPHAQNLTATLPTVRMIVDVSKAACILTSQTLMRLLRSREAAAAVDVKTWPTIIDTDDLPRKRLPQLYKPPTPEMLAYLDFSVSTTGMLTGVKMSHSAVNALCRAIKLQCELYSSRQIAICLDPYCGLGFALWCLCSVYSGHQSVLIPPMELENNLFLWLSTVNQYKIRDTFCSYSVMELCTKGLGNQVEVLKTRGINLSCVRTCVVVAEERPRVALQQSFSKLFKDIGLSPRAVSTTFGSRVNVAICLQGTSGPDPTTVYVDLKSLRHDRVRLVERGAPQSLLLSESGKILPGVKVVIVNPETKGPVGDSHLGEIWVNSPHTASGYYTIYDSETLQADHFNTRLSFGDAAQTLWARTGYLGFVRRTELTAATGERHDALYVVGALDETLELRGLRYHPIDIETSVSRIHRSIAECAVFTWTNLLVVVVELCGSEQEALDLVPLVTNVVLEEHYLIVGVVVVVDPGVIPINSRGEKQRMHLRDSFLADQLDPIYVAYNM

SEQ ID NO: 43715 - protein, 145 aa, Homo sapiens
MLLTSYLPPPLLRHRLKTHTTVIHQLDKALAKLGIGQLTAQEVKSACYLRGLNSTHIGEDRCRTWLGEWLQISCSLKVETRFLHVGQADLELPTSGDPLASASQSFGITGVSHHVQPILFFIEAELSLLLHNVVLLSTNYLGTRR

SEQ ID NO: 43716 - protein, 449 aa, Homo sapiens [sequence omitted]

SEQ ID NO: 43717 - protein, 592 aa, Homo sapiens
MSGHETIRVLEVGVDAQLPAEEESKGLEGVAAEGSQSGDPAEASQAAGEAGPDNLGSSAEATVKSPPGIPPSPATAIATFSQAPSQPQASQTLTPLAVQAAPQVLTQENLATVLTGVMVPAGAVTQPLLIPISIAGQVAGQQGLAVWTIPTATVAALPGLTAASPTGGVFKPPLAGLQAAAVLNTALPAPVQAAAPVQASSTAQPRPPAQPQTLFQTQPLLQTTPAILPQPTAATAAAPTPKPVDTPPQITVQPAGFAFSPGIISAASLGGQTQILGSLTTAPVITSAIPSMPGISSQILTNAQGQVIGTLPWVVNSASVAAPAPAQSLQVQAVTPQLLLNAQGQVIATLASSPLPPPVAVRKPSTPESPAKSEVQPIQPTPTVPQPAVVIASPAPAAKPSASAPIPITCSETPTVSQLVSKPHTPSLDEDGINLEEIREFAKNFKIRRLSLGLTQTQVGQALTATEGPAYSQSAICRFEKLDITPKSAQKLKPVLEKWLNEAELRNQEGQQNLMEFVGGEPSKKRKRRTSFTPQAIEALNAYFEKNPLPTGQEITEIAKELNYDREVVRVWFCNRRQTLKNTSKLNVFQIP

SEQ ID NO: 43718 - protein, 489 aa, Homo sapiens
MALVTQGDPVKPSRGPLVTCTCESPHCKGPTCRGAWCTVVLVREEGRHPQEHRGCGNLHRELCRGRPTEFVNHYCCDSHLCNHNVSLVLEATQPPSEQPGTDGQLALILGPVLALLALVALGVLGLWHVRRRQEKQRGLHSELGESSLILKASEQGDSMLGDLLDSDCTTGSGSGLPFLVQRTVARQVALVECVGKGRYGEVWRGLWHGESVAVKIFSSRDEQSWFRETEIYNTVLLRHDNILGFIASDMTSRNSSTQLWLITHYHEHGSLYDFLQRQTLEPHLALRLAVSAACGLAHLHVEIFGTQGKPAIAHRDFKSRNVLVKSNLQCCIADLGLAVMHSQGSDYLDIGNNPRVGTKRYMAPEVLDEQIRTDCFESYKWTDIWAFGLVLWEIARRTIVNGIVEDYRPPFYDVVPNDPSFEDMKKVVCVDQQTPTIPNRLAADPVLSGLAQMMRECWYPNPSARLTALRIKKTLQKISNSPEKPKVIQ

SEQ ID NO: 43719 - protein, 494 aa, Homo sapiens
MVSIFNLDGMEHHVRTCIPKVELVPAGKPFYCLSSEDLRNTHCCYTDYCNRIDLRVPSGHLKEPEHPSMWGPVELVGIIAGPVFLLFLIIIIVFLVINYHQRVYHNRQRLDMEDPSCEMCLSKDKTLQDLVYDLSTSGSGSGLPLFVQRTVARTIVLQEIIGKGRFGEVWRGRWRGGDVAVKIFSSREERSWFREAEIYQTVMLRHENILGFIAADNKADCSFLTLPWEVVMVSAAPKLRSLRLQYKGGRGRARFLFPLNNGTWTQLWLVSDYHEHGSLFDYLNRYTVTIEGMIKLALSAASGLAHLHMEIVGTQGKPGIAHRDLKSKNILVKKNGMCAIADLGLAVRHDAVTDTIDIAPNQRVGTKRYMAPEVLDETINMKHFDSFKCADIYALGLVYWEIARRCNSGGVHEEYQLPYYDLVPSDPSIEEMRKVVCDQKLRPNIPNWWQSYEALRVMGKMMRECWYANGAARLTALRIKKTLSQLSVQEDVKI

SEQ ID NO: 43720 - protein, 1386 aa, Homo sapiens
MKPRKAEPHSFREKVFRKKPPVCAVCKVTIDGTGVSCRVCKVATHRKCEAKVTSACQALPPVELRRNTAPVRRIEHLGSTKSLNHSKQRSTLPRSFSLDPLMERRWDLDLTYVTERILAAAFPARPDEQRHRGHLRELAHVLQSKHRDKYLLFNLSEKRHDLTRLNPKVQDFGWPELHAPPLDKLCSICKAMETWLSADPQHVVVLYCKGNKGKLGVIVSAYMHYSKISAGADQALATLTMRKFCEDKVATELQPSQRRYISYFSGLLSGSIRMNSSPLFLHYVLIPMLPAFEPGTGFQPFLKIYQSMQLVYTSGVYHIAGPGPQQLCISLEPALLLKGDVMVTCYHKGGRGTDRTLVFRVQFHTCTIHGPQLTFPKDQLDEAWTDERFPFQASVEFVFSSSPEKIKGSTPRNDPSVSVDYNTTEPAVRWDSYENFNQHHEDSVDGSLTHTRGPLDGSPYAQVQRPPRQTPPAPSPEPPPPPMLSVSSDSGHSSTLTTEPAAESPGRPPPTAAERQELDRLLGGCGVASGGRGAGRETAILDDEEQPTVGGGPHLGVYPGHRPGLSRHCSCRQGYREPCGVPNGGYYRPEGTLERRRLAYGGYEGSPQGYAEASMEKRRLCRSLSEGLYPYPPEMGKPATGDFGYRAPGYREVVILEDPGLPALYPCPACEEKLALPTAALYGLRLEREAGEGWASEAGKPLLHPVRPGHPLPLLLPACGHHHAPMPDYSCLKPPKAGEEGHEGCSYTMCPEGRYGHPGYPALVTYSYGGAVPSYCPAYGRVPHSCGSPGEGRGYPSPGAHSPRAGSISPGSPPYPQSRKLSYEIPTEEGGDRYPLPGHLASAGPLASAESLEPVSWREGPSGHSTLPRSPRDAPCSASSELSGPSTPLHTSSPVQGKESTRRQDTRSPTSAPTQRLSPGEALPPVSQAGTGKAPELPSGSGPEPLAPSPVSPTFPPSSPSDWPQERSPGGHSDGASPRSPVPTTLPGLRHAPWQGPRGPPDSPDGSPLTPVPSQMPWLVASPEPPQSSPTPAFPLAASYDTNGLSQPPLPEKRHLPGPGQQPGPWGPEQASSPARGISHHVTFAPLLSDNVPQTPEPPTQESQSNVKFVQDTSKFWYKPHLSRDQAIALLKDKDPGAFLIRDSHSFQGAYGLALKVATPPPSAQPWKGDPVEQLVRHFLIETGPKGVKIKGCPSEPYFGSLSALVSQHSISPISLPCCLRIPSKDPLEETPEAPVPTNMSTAADLLRQGAACSVLYLTSVETESLTGPQAVARASSAALSCSPRPTPAVVHFKVSAQGITLTDNQRKLFFRRHYPVNSITFSSTDPQDRRWTNPDGTTSKIFGFVAKKPGSPWENVCHLFAELDPDQPAGAIVTFITKVLLGQRK

SEQ ID NO: 43721 - protein, 167 aa, Homo sapiens
MLSQIASKQAENGERAGSPDVLRCSSQGHRKDSDKSRSRKDDDSLSEASHSKKTVKKVVVVEQNGSFQVKIPKNFVCEHCFGAFRSSYHLKRHILIHTGEKPFECDICDMRFIQKYHLERHKRVHSGEKPYQCERCHQCFSRTDRLLRHKRMCQGCQSKTSDGQFSL

SEQ ID NO: 43722 - protein, 352 aa, Homo sapiens [sequence omitted]

SEQ ID NO: 43723 - protein, 264 aa, Homo sapiens
MPEFSTVSSFLPQAPSRQISYPYSAQVPPVREVSYGLEPSGKWHHRNSYSSCYAAADELMHRECLPPSTVTEILMKNEGSYGGHHHPSAPHATPAGFYSSVNKNSVLPQAFDRFFDNAYCGGGDPPAEPPCSGKGEAKGEPEAPPASGLASRAEAGAEAEAEEENTNPSSSGSAHSVAKEPAKGAAPNAPRTRKKRCPYSKFQIRELEREFFFNVYINKEKRLQLSRMLNLTDRQVKIWFQNRRMKEKKLSRDRLQYFSGNPLL

SEQ ID NO: 43724 - protein, 312 aa, Homo sapiens [sequence omitted]

SEQ ID NO: 43725 - protein, 105 aa, Homo sapiens
MFPWMRPHAPGRRSGRQTYSRYQTLELEKEFLFNPYLTRKRRIEVSHALGLTERQVKIWFQNRRMKWKKENNKDKLPGARDEEKVEEEGNEEEEKEEEEKEENKD

SEQ ID NO: 43726 - protein, 92 aa, Homo sapiens
MATHAIAPTLSWAIPRQQCSPQPGRLNALPPDRCSGPHFGDRAPESCFPGACSVSGACAFKGTRPACPPQEPSLRSSRNRLREGQTFGRMEI

SEQ ID NO: 43727 - protein, 125 aa, Homo sapiens
MKKYKKMKEGENNKPREKSESNKRKSNFSNSADDIKSKKKREQSNDIARGFERGLEPEKIIGATDSCGDLMFLMKWKDTDEADLVLAKEANVKCPQIVIAFYEERLTWHAYPEDAENKEKETAKS

SEQ ID NO: 43728 - protein, 69 aa, Homo sapiens
MAGRLWRRSGEQKKGVFIRFLIVLPLDARHVLGLGAARRGRQRPCPLLAGRTEFWPHCEERQKPAVAAG

SEQ ID NO: 43729 - protein, 398 aa, Homo sapiens [sequence omitted]

SEQ ID NO: 43730 - protein, 51 aa, Homo sapiens
MEATLMSYFQSLQECQLGPGPQTTAPHTVLDLDSDCGSTVPLTLISGSNQT

SEQ ID NO: 43731 - protein, 128 aa, Homo sapiens
MYYRGAQAAIVVYDITNQETFARAKTWVKELQRQASPSIVIALAGNKADLANKRMVEYEEAQAYADDNSLLFMETSAKTAMNVNDLFLAIAKKLPKSEPQNLGGAAGRSRGVDLHEQSQQNKSQCCSN

SEQ ID NO: 43732 - protein, 420 aa, Homo sapiens [sequence omitted]

SEQ ID NO: 43733 - protein, 189 aa, Homo sapiens
MLRKRVEELKKQVSNLLATNEVLLEQNAQFRNQAKVITLSSTAPATEQTLAPTVGTVATFNHGIAQTHTTLSSQALQPRPVSQQELVAPAGAPAAPPTNAAPPAAPPPPPPHLTPEITPLSAALAQTIAQGMAPPPVSMAPVAVSVAPVAPVAVSMAQPLAGITMSHTTTPMVTYPIASQSMRITAMPH

SEQ ID NO: 43734 - protein, 32 aa, Homo sapiens
MTEEEVETVLAGHEDSNGCINYEAFLKHILSV

SEQ ID NO: 43735 - protein, 102 aa, Homo sapiens
MNVKVLDFEHFLPMLQTVAKNKDQGTYEDYVEGLRVFDKEGNGTVMGAEIRHVLVTLGEKMTEEEVEMLVAGHEDSNGCINYEGKRRCEGLQESCSHHNPPA

SEQ ID NO: 43736 - protein, 718 aa, Homo sapiens
MTNGADTARRGIHDMFPLHLAVLFGFSDCCRKLLSSGQLYSIVSSLSNEHVLSAGFDINTPDNLGRTCLHAAASGGNVECLNLLLSSGADLRRRDKFGRTPLHYAAANGSYQCAVTLVTAGAGVNEADCKGCSPLHYAAASDTYRRAEPHTPSSHDAEEDEPLKESRRKEAFFCLEFLLDNGADPSLRDRQGYTAVHYAAAYGNRQNLELLLEMSFNCLEDVESTIPVSPLHLAAYNGHCEALKTLAETLVNLDVRDHKGRTALFLATERGSTECVEVLTAHGASALIKERKRKWTPLHAAAASGHTDSLHLLIDSGERADITDVMDAYGQTPLMLAIMNGHVDCVHLLLEKGSTADAADLRGRTALHRGAVTGCEDCLAALLDHDAFVLCRDFKGRTPIHLASACGHTAVLRTLLQAALSTDPLDAGVDYSGYSPMHWASYTGHEDCLELLLEHSPFSYLEGNPFTPLHCAVINNQDSTTEMLLGALGAKIVNSRDAKGRTPLHAAAFADNVSGLRMLLQHQAEVNATDHTGRTALMTAAENGQTAAVEFLLYRGKADLTVLDENKNTALHLACSKGHEKCALMILAETQDLGLINATNSALQMPLHIAARNGLASVVQALLSHGATVLAVDEEGHTPALACAPNKDVADCLALILSTMKPFPPKDAVSPFSFSLLKNCSIAAAKTVGGCGALPHGASCPYSQERPGAIGLDGCYSE

SEQ ID NO: 43737 - protein, 421 aa, Homo sapiens
MHLVLFLQQHGKTVVGQITVDMMYGGMRGMKGLVYETSVLDPDEGIRFRGFSIPECQKLLPKAKGGEEPLPEGLFWLLVTGHIPTEEQVSWLSKEWAKRAALPSHVVTMLDNFPTNLHPMSQLSAAVTALNSESNFARAYAQGISRTKYWELIYEDSMDLIAKLPCVAAKIYRNLYREGSGIGAIDSNLDWSHNFTNMLGYTDHQFTELTRLYLTIHSDHEGGNVSAHTSHLVGSALSDPYLSFAAAMNGLAGPLHGLANQEVLVWLTQLQKEVGKDVSDEKLRDYIWNTLNSGRVVPGYGHAVLRKTDPRYTCQREFALKHLPNDPMFKLVAQLYKIVPNVLLEQGKAKNPWPNVDAHSGVLLQYYGMTEMNYYTVLFGVSRALGVLAQLIWSRALGFPLERPKSMSTEGLMKFVDSKSG

SEQ ID NO: 43738 - protein, 133 aa, Homo sapiens
MSQLSAAVTALNSESNFARAYAQGISRTKYWELIYEDSMDLIAKLPCVAAKIYRNLYREGSGIGAIDSNLDWSHNFTNMLGYTDHQFTELTRLYLTIHSSHERAGRASPWTGKSGSACLANTAAEGSWQRCVR

SEQ ID NO: 43739 - protein, 1141 aa, Homo sapiens
MEGVYSELHSVVAEVGVPVSVSHFDLHEEMLWVGSHGGHATSFFGPALERYSSFQVNGSDDIRQIQSLENGILFLTKNNLKYMARGGLIIFDYLLDENEDMHSLLLTDSSTLLVGGLQNHIIEIDLNTVQETQKYAVETPGVTIMRQTNRFFFCGHTSGKVSLRDLRTFKVEHEFDAFSGSLSDFDVHGNLLAACGFSSRLTGLACDRFLKVYDLRMMRAITPLQVHVDPAFLRFIPTYTSRLAIISQSGQCQFCEPTGLANPADIFHVNPVGPLLMTFDVSASKQALAFGDSEGCVHLWTDSPEPSFNPYSRETEFALPCLVDSLPPLDWSQDLLPLSLIPVPLTTDTLLSDWPAANSAPAPRRAPPVDAEILRTMKKVGFIGYAPNPRTRLRNQIPYRLKESDSEFDSFSQVTESPVGREEEPHLHMVSKKYRKVTIKYSKLGLEDFDFKHYNKTLFAGLEPHIPNAYCNCMIQVLYFLEPVRCLIQNHLCQKEFCLACELGFLFHMLDLSRGDPCQGNNFLRAFRTIPEASALGLILADSDEASGKGNLARLIQRWNRFILTQLHQDMQELEIPQAYRGAGGSSFCSSGDSVIGQLFSCEMENCSLCRCGSETVRASSTLLFTLSYPDDKTGKNYDFAQVLKRSICLDQNTQAWCDTCEKYQPTIQTRNIRHLPDILVINCEVNSSKEADFWRMQAEVAFKMAVKKHGGEISKNKEFALADWKELGSPEGVLVCPSIEELKNVWLPFSIRMKMTKNKGLDVCNWTDGDEMQWGPARAEEEHGVYVYDLMATVVHILDSRTGGSLVAHIKVGETYHQRKEGVTHQQWYLFNDFLIEPIDKHEAVQFDMNWKVPAILYYVKRNLNSRYNLNIKNPIEASVLLAEASLARKQRKTHTTFIPLMLNEMPQIGDLVGLDAEFVTLNEEEAELRSDGTKSTIKPSQMSVARITCVRGQGPNEGIPFIDDYISTQEQVVDYLTQYSGIKPGDLDAKISSKHLTTLKSTYLKLRFLIDIGVKFVGHGLQKDFRVINLMVPKDQVLDTVYLFHMPRKRMISLRFLAWYFLDLKIQGETHDSIEDARTALQLYRKYLELSKNGTEPESFHKVLKGLYEKGRKMDWKVPEPEGQTSPKNAAVFSSVLAL

SEQ ID NO: 43740 - protein, 1202 aa, Homo sapiens
MNCELLATCSALGYLEGDTYHKEPDCLESVKDLIRYLRHEDETRDVRQQLGAAQILQSDLLPILTQHHQDKPLFDAVIRLMVNLTQPALLCFGNLPKEPSFRHHFLQVLTYLQAYKEAFASEKAFGVLSETLYELLQLGWEERQEEDNLLIERILLLVRNILHVPADLDQEKIDDDASAHDQLLWAIHLSGLDDLLLFLASSSAEEQWSLHVLEIVSLMFRDQNPEQLAGVGQGRLAQERSADFAELEVLRQREMAEKKTRALQRGNRHSRFGGSYIVQGLKSIGERDLIFHKGLHNLRNYSSDLGKQPKKVPKRRQAARELSIQRRSALNVRLFLRDFCSEFLENCYNRLMGSVKDHLLREKAQQHDETYYMWALAFFMAFNRAASFRPGLVSETLSVRTFHFIEQNLTNYYEMMLTDRKEAASWARRMHLALKAYQELLATVNEMDISPDEAVRESSRIIKNNIFYVMEYRELFLALFRKFDERCQPRSFLRDLVETTHLFLKMLERFCRSRGNLVVQNKQKKRRKKKKKVLDQAIVSGNVPSSPEEVEAVWPALAEQLQCCAQNSELSMDSVVPFDAASEVPVEEQRAEAMVRIQDCLLAGQAPQALTLLRSAREVWPEGDVFGSQDISPEEEIQLLKQILSAPLPRQQGPEERGAEEEEEEEEEEEEELQVVQVSEKEFNFLDYLKRFACSTVVRAYVLLLRSYQQNSAHTNHCIVKMLHRLAHDLKMEALLFQLSVFCLFNRLLSDPAAGAYKELVTFAKYILGKFFALAAVNQKAFVELLFWKNTAVVREMTEGYGSLDDRSSSRRAPTWSPEEEAHLRELYLANKDVEGQDVVEAILAHLNTVPRTRKQIIHHLVQMGLADSVKDFQRKGTHIVLWTGDQELELQRLFEEFRDSDDVLGHIMKNITAKRSRARIVDKLLALGLVAERRELYKKRQKKLASSILPNGAESLKDFCQEDLEEEENLPEEDSEEEEEGGSEAEQVQGSLVLSNENLGQSLHQEGFSIPLLWLQNCLIRAADDREEDGCSQAVPLVPLTEENEEAMENEQFQQLLRKLGVRPPASGQETFWRIPAKLSPTQLRRAAASLSQPEEEQKLQPELQPKVPGEQGSDEEHCKEHRAQALRALLLAHKKKAGLASPEEEDAVGKEPLKAAPKKRQLLDSDEEQEEDEGRNRAPELGAPGIQKKKRYQIEDDEDD

SEQ ID NO: 43741 - protein, 273 aa, Homo sapiens
MLFFCGDLLSRSQIFYYSTGMTVGIVASLLIIIFILSKFMPKKSPIYVILVGGWSFSLYLIQLVFKNLQEIWRCYWQYLLSYVLTVGFMSFAVCYKYGPLENERSINLLTWTLQLMGLCFMYSGIQIPHIALAIIIIALCTKNLEHPIQWLYITCRKVCKGAEKPVPPRLLTEEEYRIQGEVETRKALEELREFCNSPDCSAWKTVSRIQSPKRFADFVEGSSHLTPNEVSVHEQEYGLGSIIAQDEIYEEASSEEEDSYSRCPAITQNNFLT

SEQ ID NO: 43742 - protein, 314 aa, Homo sapiens
MLGEGLGVKETPQQKYQRLLHEVQELTTEVEKIKTTVKESATEEKLTPVLLAKQLAALKQQLVASHLEKLLGPDAAINLTDPDGALAKRLLLQLEATKNSKGGSGGKTTGTPPDSSLVTYELHSRPEQDKFSQAAKVAELEKRLTELETAVRCDQDAQNPLSAGLQGACLMETVELLQAKVSALDLAVLDQVEARLQSVLGKVNEIAKHKASVEDADTQSKVHQLYETIQRWSPIASTLPELVQRLVTIKQLHEQAMQFGQLLTHLDTTQQMIANSLKDNTTLLTQVQTTMRENLATVEGNFASIDERMKKLGK

SEQ ID NO: 43743 - protein, 129 aa, Homo sapiens [sequence omitted]

SEQ ID NO: 43744 - protein, 414 aa, Homo sapiens
MLAVMYAGGPVSSVLVNKYGSRPVVIAGGLLCCLGMVLASFSSSVVQLYLTMGFITGLGLAFNLQPALTIIGKYFYRKRPMANGLAMAGSPVFLSSLAPFNQYLFNTFGWKGSFLILGSLLLNACVAGSLMRPLGPNQTTSKSKNKTGKTEDDSSPKKIKTKKSTWEKVNKYLDFSLFKHRGFLIYLSGNVIMFLGFFAPIIFLAPYAKDQGIDEYSAAFLLSVMAFVDMFARPSVGLIANSKYIRPRIQYFFSFAIMFNGVCHLLCPLAQDYTSLVLYAVFFGLGFGSVSSVLFETLMDLVGAPRFSSAVGLVTIVECGPVLLGPPLAGKLVDLTGEYKYMYMSCGAIVVAASVWLLIGNAINYRLLAKERKEENARQKTRESEPLSKSKHSEDVNVKVSNAQSVTSERETNI

SEQ ID NO: 43745 - protein, 129 aa, Homo sapiens
MEGQEPIARKVVEQGMFVKHCKVEVYLTELKLCENGNMNNVVTRRFSKADTIDTIEKEIRKIFSIPDEKETRLWNKYMSNTFEPLNKPDSTIQDAGLYQGQVLVIEQKNEDGTWPRGPSTPKKPLEQSC

SEQ ID NO: 43746 - protein, 421 aa, Homo sapiens
MDSMRLSAGPDAGPSGNSSPWWPLATGAGNTSREAEALGEGNGPPRDVRNEELAKLEIAVLAVTFAVAVLGNSSVLLALHRTPRKTSRMHLFIRHLSLADLAVAFFQVLPQMCWDITYRFRGPDWLCRVVKHLQVFGMFASAYMLVVMTADRYIAVCHPLKTLQQPARRSRLMIAAAWVLSFVLSTPQYFVFSMIEVNNVTKARDCWATFIQPWGSRAYVTWMTGGIFVAPVVILGTCYGFICYNIWCNVRGKTASRQSKGAEQAGVAFQKGFLLAPCVSSVKSISRAKIRTVKMTFVIVTAYIVCWAPFFIIQMWSVWDPMSVWTESENPTITITALLGSLNSCCNPWIYMFFSGHLLQDCVQSFPCCQNMKEKFNKEDTDSMSRRQTFYSNNRSPTNSTGMWKDSPKSSKSIKFIPVST

SEQ ID NO: 43747 - protein, 31 aa, Homo sapiens
MLLQWYQHFKTELKMKFTNILESSFLMNNKS

SEQ ID NO: 43748 - protein, 1045 aa, Homo sapiens
MRVQLLQDLQDFFRKKAEIETEYSRNLEKLAERFMAKTRSTKDHQQYKKDQNLLSPVNCWYLLLNQVRRESKDHATLSDIYLNNVIMRFMQISEDSTRMFKKSKEIAFQLHEDLMKVLNELYTVMKTYHMYHAESISAESKLKEAEKQEEKQIGRSGDPVFHIRLEERHQRRSSVKKIEKMKEKRQAKYSENKLKSIKARNEYLLTLEATNASVFKYYIHDLSDLIDCCDLGYHASLNRALRTYLSAEYNLETSRHEGLDIIENAVDNLEPRSDKQRFMEMYPAAFCPPMKFEFQSHMGDEVCQVSAQQPVQAELMLRYQQLQSRLATLKIENEEVKKTTEATLQTIQDMVTIEDYDVSECFQHSRSTESVKSTVSETYLSKPSIAKRRANQQETEQFYFMKLREYLEGSNLITKLQAKHDLLQRTLGEGHRAEYMTTRPPNVPPKPQKHRKSRPRSQYNTKLFNGDLETFVKDSGQVIPLIVESCIRFINLYGLQHQGIFRVSGSQVEVNDIKNSFERGENPLADDQSNHDINSVAGVLKLYFRGLENPLFPKERFNDLISCIRIDNLYERALHIRKLLLTLPRSVLIVMRYLFAFLNHLSQYSDENMMDPYNLAICFGPTLMPVPEIQDQVSCQAHVNEIIKTIIIHHETIFPDAKELDGPVYEKCMAGDDYCDSPYSEHGTLEEVDQDAGTEPHTSEDECEPIEAIAKFDYVGRSARELSFKKGASLLLYHRASEDWWEGRHNGIDGLVPHQYIVVQDMDDTFSDTLSQKADSEASSGPVTEDKSSSKDMNSPTDRHPDGYLARQRKRGEPPPPVRRPGRTSDGHCPLHPPHALSNSSVDLGSPSLASHPRGLLQNRGLNNDSPERRRRPGHGSLTNISRHDSLKKIDSPPIRRSTSSGQYTGFNDHKPLDPETIAQDIEETMNTALNELRELERQSTAKHAPDVVLDTLEQVKNSPTPATSTESLSPLHNVALRSSEPQIRRSTSSSSDTMSTFKPMVAPRMGVQLKPPALRPKPAVLPKTNPTIGPAPPPQGPTDKSCTM

SEQ ID NO: 43749 - protein, 34 aa, Homo sapiens
MKQNRKTFYGQLWKHSETAALLTLAPVLCFSFCW

SEQ ID NO: 43750 - protein, 65 aa, Homo sapiens
MHRVETSCSQCGAHLGHIFDDGPRPTGKRYCINSAALSFTPADSSGTAEGGSGVASPAQADKAEL

SEQ ID NO: 43751 - protein, 353 aa, Homo sapiens
MRNGTLFDRLQCVGDTAPLPWHIRIGILIGISKAIHYLHNVQPCSVICGSISSANILLDDQFQPKLTDFAMAHFRSHLEHQSCTINMTSSSSKHLWYMPEEYIRQGKLSIKTDVYSFGIVIMEVLTGCRVVLDDPKHIQLRDLLRELMEKRGLDSCLSFLDKKVPPCPRNFSAKLFCLAGRCAATRAKLRPSMDEVLNTLESTQASLYFAEDPPTSLKSFRCPSPLFLENVPSIPVEDDESQNNNLLPSDEGLRIDRMTQKTPFECSQSEVMFLSLDKKPESKRNEEACNMPSSSCEESWFPKYIVPSQDLRPYKVNIDPSSEAPGHSCRSRPVESSCSSKFSWDEYEQYKKE

SEQ ID NO: 43752 - protein, 438 aa, Homo sapiens
MQKLTAFEHHEIFSYPEIYFLGLNAKKRQGMTGGPNNGGYDDDQGSYVQVPHDHVAYRYEVLKVIGKGSFGQVVKAYDHKVHQHVALKMVRNEKRFHRQAAEEIRILEHLRKQDKDNTMNVIHMLENFTFRNHICMTFELLSMNLYELIKKNKFQGFSLPLVRKFAHSILQCLDALHKNRIIHCDLKPENILLKQQGRSGIKVIDFGSSCYEHQRVYTYIQSRFYRAPEVILGARYGMPIDMWSLGCILAELLTGYPLLPGEDEGDQLACMIELLGMPSQKLLDASKRAKNFVSSKGYPRYCTVTTLSDGSVVLNGGRSRRGKLRGPPESREWGNALKGCDDPLFLDFLKQCLEWDPAVRMTPGQALRHPWLRRRLPKPPTGEKTSVKRITESTGAITSISKLPPPSSSASKLRTNLAQMTDANGNIQQRTVLPKLVS

SEQ ID NO: 43753 - protein, 786 aa, Homo sapiens [sequence omitted]

SEQ ID NO: 43754 - protein, 140 aa, Homo sapiens [sequence omitted]

SEQ ID NO: 43755 - protein, 322 aa, Homo sapiens
MITNIVILSLIICISLAFWIISMTASTYYGNLRPISPWRWLFSVVVPVLIVSNGLKKKSLDHSGALGGLVVGFILTIANFSFFTSLLMFFLSSSKLTKWKGEVKKRLDSEYKEGGQRNWVQVFCNGAVPTELALLYMIENGPGEIPVDFSKQYSASWMCLSLLAALACSAGDTWASEVGPVLSKSSPRLITTWEKVPVGTNGGVTVVGLVSSLLGGTFVGIAYFLTQLIFVNDLDISAPQWPIIAFGGLAGLLGSIVDSYLGATMQYTGLDESTGMVVNSPTNKARHIAGKPILDNNAVNLFSSVLIALLLPTAAWGFWPRG

SEQ ID NO: 43756 - protein, 284 aa, Homo sapiens
MITNIVILSLIICISLAFWIISMTASTYYGNLRPISPWRWLFSVVVPVLIVSNGLKKKSLDHSGALGGLVVGFILTIANFSFFTSLLMFFLSSSKLTKWKGEVKKRLDSEYKEGGQRNWVQVFCNGAVPTELALLYMIENGPGEIPVDFSKQYSASWMCLSLLAALACSAGDTWASEVGPVLSKSSPRLITTWEKVPVGTNGGVTVVGLVSSLLGGTFVGIAYFLTQLIFVNDLDISAPQWPIIAFGGLAGLLGSIVDSYLGATMQYTGKNIPSFLQLIGMLKK

SEQ ID NO: 43757 - protein, 575 aa, Homo sapiens
MVNTVSFKRKPHTNGDAPSHRNGKSKWSFLFSLTDLKSIKQNKEGMGWSYLVFCLKDDVVLPALHFHQGDSKLLIESLEKYVVLCESPQDKRTLLVNCQNKSLSQSFENLLDEPAYGLIQKIKKDPYTATMIGFSKVTNYIFDSLRGSDPSTHQRPPSEMADFLSDAIPGLKINQQEEPGFEVITRIDLGERPVVQRREPVSLEEWTKNIDSEGRILNVDNMKQMIFRGGLSHALRKQAWKFLLGYFPWDSTKEERTQLQKQKTDEYFRMKLQWKSISQEQEKRNSRLRDYRSLIEKDVNRTDRTNKFYEGQDNPGLILLHDILMTYCMYDFDLGYVQGMSDLLSPLLYVMENEVDAFWCFASYMDQMHQNFEEQMQGMKTQLIQLSTLLRLLDSGFCSYLESQDSGYLYFCFRWLLIRFKREFSFLDILRLWEVMWTELPCTNFHLLLCCAILESEKQQIMEKHYGFNEILKHINELSMKIDVEDILCKAEAISLQMVKCKELPQAVCEILGLQGSEVTTPDSDVGEDENVVMTPCPTSAFQSNALPTLSASGARNDSPTQIPVSSDVCRLTPA

SEQ ID NO: 43758 - protein, 212 aa, Homo sapiens
MLYMTWDPALAQIAKAWASNCQFSHNTRLKPPHKLHPNFTSLGENIWTGSVPIFSVSSAITNWYDEIQDYDFKTRICKKVCGHYTQVVWADSYKVGCAVQFCPKVSGFDALSNGAHFICNYGPGGNYPTWPYKRGATCSACPNNDKCLDNLCVNRQRDQVKRYYSVVYPGWPIYPRNRYTSLFLIVNSVILILSVIITILVQHKYPNLVLLD

SEQ ID NO: 43759 - protein, 798 aa, Homo sapiens
MSKSKSESKLYNGSEKDSSTSSKLTKKESLKVQKKNYREEKKRATKELLSTITDPSVIVMADWLKIRGTLKSWTKLWCVLKPGVLLIYKTQKNGQWVGTVLLNACEIIERPSKKDGFCFKLFHPLEQSIWAVKGPKGEAVGSITQPLPSSYLIIRATSESDGRCWMDALELALKCSSLLKRTMIREGKEHDLSVSSDSTHVTFYGLLRANNLHSGDNFQLNDSEIERQHFKDQDMYSDKSDKENDQEHDESDNEVMGKSEESDTDTSERQDDSYIEPEPVEPLKETTYTEQSHEELGEAGEASQTETVSEENKSLIWTLLKQVRPGMDLSKVVLPTFILEPRSFLDKLSDYYYHADFLSEAALEENPYFRLKKVVKWYLSGFYKKPKGLKKPYNPILGETFRCLWIHPRTNSKTFYIAEQVSHHPPISAFYVSNRKDGFCLSGSILAKSKFYGNSLSAILEGEARLTFLNRGEDYVMTMPYAHCKGILYGTMTLELGGTVNITCQKTGYSAILEFKLKPFLGSSDCVNQISGKLKLGKEVLATLEGHWDSEVFITDKKTDNSEVFWNPTPDIKQWRLIRHTVKFEEQGDFESEKLWQRVTRAINAKDQTEATQEKYVLEEAQRQAARDRKTKNEEWSCKLFELDPLTGEWHYKFADTRPWDPLNDMIQFEKDGVIQTKVKHRTPMVSVPKMKHKPTRQQKKVAKGYSSPEPDIQDSSGSEAQSVKPSTRRKKGIELGDIQSSIESIKQTQEEIKRNIMALRNHLVSSTPATDYFLQQKDYFIIFLLILLQVIINFMFK

SEQ ID NO: 43760 - protein, 22 aa, Homo sapiens
MEGGLADGEPDRTSQTVTNLSF

SEQ ID NO: 43761 - protein, 1028 aa, Homo sapiens
MADAKQKRNEQLKRWIGSETDLEPPVVKRQKTKVKFDDGAVFLAACSSGDTDEVLKLLHRGADINYANVDGLTALHQACIDDNVDMVKFLVENGANINQPDNEGWIPLHAAASCGYLDIAEFLIGQGAHVGAVNSEGDTPLDIAEEEAMEELLQNEVNRQGVDIEAARKEEERIMLRDARQWLNSGHINDVRHAKSGGTALHVAAAKGYTEVLKLLIQAGYDVNIKDYDGWTPLHAAAHWGKEEACRILVDNLCDMEMVNKVGQTAFDVADEDILGYLEELQKKQNLLHSEKRDKKSPLIESTANMDNNQSQKTFKNKETLIIEPEKNASRIESLEQEKVDEEEEGKKDESSCSSEEDEEDDSESEAETDKTKPLASVTNANTSSTQAAPVAVTTPTVSSGQATPTSPIKKFPTTATKISPKEEERKDESPATWRLGLRKTGSYGALAEITASKEGQKEKDTAGVTRSASSPRLSSSLDNKEKEKDSKGTRLAYVAPTIPRRLASTSDIEEKENRDSSSLRTSSSYTRRKWEDDLKKNSSVNEGSTYHKSCSFGRRQDDLISSSVPSTTSTPTVTSAAGLQKSLLSSTSTTTKITTGSSSAGTQSSTSNRLWAEDSTEKEKDSVPTAVTIPVAPTVVNAAASTTTLTTTTAGTVSSTTEVRERRRSYLTPVRDEESESQRKARSRQARQSRRSTQGVTLTDLQEAEKTIGRSRSTRTREQENEEKEKEEKEKQDKEKQEEKKESETSREDEYKQKYSRTYDETYQRYRPVSTSSSTTPSSSLSTMSSSLYASSQLNRPNSLVGITSAYSRGITKENEREGEKREEEKEGEDKSQPKSIRERRRPREKRRSTGVSFWTQDSDENEQEQQSDTEEGSNKKETQTDSISRYETSSTSAGDRYDSLLGRSGSYSYLEERKPYSSRLEKDDSTDFKKLYEQILAENEKLKAQLHDTNMELTDLKLQLEKATQRQERFADRSLLEMEKRERRALERRISEMEEELKMLPDLKADNQRLKDENGALIRVISKLSK

SEQ ID NO: 43762 - protein, 972 aa, Homo sapiens
MADAKQKRNEQLKRWIGSETDLEPPVVKRQKTKVKFDDGAVFLAACSSGDTDEVLKLLHRGADINYANVDGLTALHQACIDDNVDMVKFLVENGANINQPDNEGWIPLHAAASCGYLDIAEFLIGQGAHVGAVNSEGDTPLDIAEEEAMEELLQNEVNRQGVDIEAARKEEERIMLRDARQWLNSGHINDVRHAKSGGTALHVAAAKGYTEVLKLLIQAGYDVNIKDYDGWTPLHAAAHWGKEEACRILVDNLCDMEMVNKVGQTAFDVADEDILGYLEELQKKQNLLHSEKRDKKSPLIESTANMDNNQSQKTFKNKETLIIEPEKNASRIESLEQEKVDEEEEGKKDESSCSSEEDEEDDSESEAETDKTKPLASVTNANTSSTQAAPVAVTTPTVSSGQATPTSPIKKFPTTATKISPKEEERKDESPATWRLGLRKTGSYGALAEITASKEGQKEKDTAGVTRSASSPRLSSSLDNKEKEKDSKGTRLAYVAPTIPRRLASTSDIEEKENRDSSSLRTSSSYTRRKWEDDLKKNSSVNEGSTYHKSTSNRLWAEDSTEKEKDSVPTAVTIPVAPTVVNAAASTTTLTTTTAGTVSSTTEVRERRRSYLTPVRDEESESQRKARSRQARQSRRSTQGVTLTDLQEAEKTIGRSRSTRTREQENEEKEKEEKEKQDKEKQEEKKESETSREDEYKQKYSRTYDETYQRYRPVSTSSSTTPSSSLSTMSSSLYASSQLNRPNSLVGITSAYSRGITKENEREGEKREEEKEGEDKSQPKSIRERRRPREKRRSTGVSFWTQDSDENEQEQQSDTEEGSNKKETQTDSISRYETSSTSAGDRYDSLLGRSGSYSYLEERKPYSSRLEKDDSTDFKKLYEQILAENEKLKAQLHDTNMELTDLKLQLEKATQRQERFADRSLLEMEKRERRALERRISEMEEELKMLPDLKADNQRLKDENGALIRVISKLSK

SEQ ID NO: 43763 - protein, 414 aa, Homo sapiens
MDSEEKEIVVWVCQEEKLVCGLTKRTTSADVIQALLEEHEATFGEKRFLLGKPSDYCIIEKWRGSERVLPPLTRILKLWKAWGDEQPNMQFVLVKADAFLPVPLWRTAEAKLVQNTEKLWELSPANYMKTLPPDKQKRIVRKTFRKLAKIKQDTVSHDRDNMETLVHLIISQDHTIHQQVKRMKELDLEIEKCEAKFHLDRVENDGENYVQDAYLMPSFSEVEQNLDLQYEENQTLEDLSESDGIEQLEERLKYYRILIDKLSAEIEKEVKSVCIDINEDAEGEAASELESSNLESVKCDLEKSMKAGLKIHSHLSGIQKEIKYSDSLLQMKAKEYELLAKEFNSLHISNKDGCQLKENRAKESEVPSSNGEIPPFTQRVFSNYTNDTDSDTGISSNHSQDSETTVGDVVLLST

SEQ ID NO: 43764 - protein, 222 aa, Homo sapiens
MITLKYVPGMDVLPSHCWISEMVVQLSDSLTDLLDKFSNISEGLSNYSIIDKLVNIVDDLVECVKENSSKDLKKSFKSPEPRLFTPEEFFRIFNRSIDAFKDFVVASETSDCVVSSTLSPEKDSRVSVTKPFMLPPVAASSLRNDSSSSNRKAKNPPGDSSLHWAAMALPALFSLIIGFAFGALYWKKRQPSLTRAVENIQINEEDNEISMLQEKEREFQEV

SEQ ID NO: 43765 - protein, 368 aa, Homo sapiens [sequence omitted]

SEQ ID NO: 43766 - protein, 34 aa, Homo sapiens
MEHVSPALPVFLVSTYTLGTLCQIFTRWKTNCVM

SEQ ID NO: 43767 - protein, 1183 aa, Homo sapiens
MELRSTDALRKIQESYGDVYGICTKLKTSPNEGLSGNPADLERREAVFGKNFIPPKKPKTFLQLVWEALQDVTLIILEIAAIVSLGLSFYQPPEGDNALCGEVSVGEEEGEGETGWIEGAAILLSVVCVVLVTAFNDWSKEKQFRGLQSRIEQEQKFTVIRGGQVIQIPVADITVGDIAQVKYGDLLPADGILIQGNDLKIDESSLTGESDHVKKSLDKDPLLLSGTHVMEGSGRMVVTAVGVNSQTGIIFTLLGAGGEEEEKKDEKKKEKKNKKQDGAIENRNKAKAQDGAAMEMQPLKSEEGGDGDEKDKKKANLPKKEKSVLQGKLTKLAVQIGKAGLLMSAITVIILVLYFVIDTFWVQKRPWLAECTPIYIQYFVKFFIIGVTVLVVAVPEGLPLAVTISLAYSVKKMMKDNNLVRHLDACETMGNATAICSDKTGTLTMNRMTVVQAYINEKHYKKVPEPEAIPPNILSYLVTGISVNCAYTSKILPPEKEGGLPRHVGNKTECALLGLLLDLKRDYQDVRNEIPEEALYKVYTFNSVRKSMSTVLKNSDGSYRIFSKGASEIILKKCFKILSANGEAKVFRPRDRDDIVKTVIEPMASEGLRTICLAFRDFPAGEPEPEWDNENDIVTGLTCIAVVGIEDPVRPEVPDAIKKCQRAGITVRMVTGDNINTARAIATKCGILHPGEDFLCLEGKDFNRRIRNEKGEIEQERIDKIWPKLRVLARSSPTDKHTLVKGIIDSTVSDQRQVVAVTGDGTNDGPALKKADVGFAMGIAGTDVAKEASDIILTDDNFTSIVKAVMWGRNVYDSISKFLQFQLTVNVVAVIVAFTGACITQDSPLKAVQMLWVNLIMDTLASLALATEPPTESLLLRKPYGRNKPLISRTMMKNILGHAFYQLVVVFTLLFAGEKFFDIDSGRNAPLHAPPSEHYTIVFNTFVLMQLFNEINARKIHGERNVFEGIFNNAIFCTIVLGTFVVQIIIVQFGGKPFSCSELSIEQWLWSIFLGMGTLLWGQLISTIPTSRLKFLKEAGHGTQKEEIPEEELAEDVEEIDHAERELRRGQILWFRGLNRIQTQIRVVNAFRSSLYEGLEKPESRSSIHNFMTHPEFRIEDSEPHIPLIDDTDAEDDAPTKRNSSPPPSPNKNNNAVDSGIHLTIEMNKSATSSSPGSPLHSLETSL

SEQ ID NO: 43768 - protein, 1175 aa, Homo sapiens
MDNMTLERERESEKLKDECKKLQSQYASSEATISQLRSELAKGPQEVAVYVQELQKLKSSVNELTQKNQTLTENLLKKEQDYTKLEEKHNEESVSKKNIQATLHQKDLDCQQLQSRLSASETSLHRIHVELSEKGEATQKLKEELSEVETKYQHLKAEFKQLQQQREEKEQHGLQLQSEINQLHSKLLETERQLGEAHGRLKEQRQLSSEKLMDKEQQVADLQLKLSRLEEQLKEKVTNSTELQHQLDKTKQQHQEQQALQQSTTAKLREAQNDLEQVLRQIGDKDQKIQNLEALLQKSKENISLLEKEREDLYAKIQAGEGETAVLNQLQEKNHTLQEQVTQLTEKLKNQSESHKQAQENLHDQVQEQKAHLRAAQDRVLSLETSVNELNSQLNESKEKVSQLDIQIKAKTELLLSAEAAKTAQRADLQNHLDTAQNALQDKQQELNKITTQLDQVTAKLQDKQEHCSQLESHLKEYKEKYLSLEQKTEELEGQIKKLEADSLEVKASKEQALQDLQQQRQLNTDLELRATELSKQLEMEKEIVSSTRLDLQKKSEALESIKQKLTKQEEEKKILKQDFETLSQETKIQHEELNNRIQTTVTELQKVKMEKEALMTELSTVKDKLSKVSDSLKNSKSEFEKENQKGKAAILDLEKTCKELKHQLQVQMENTLKEQKELKKSLEKEKEASHQLKLELNSMQEQLIQAQNTLKQNEKEEQQLQGNINELKQSSEQKKKQIEALQGELKIAVLQKTELENKLQQQLTQAAQELAAEKEKISVLQNNYEKSQETFKQLQSDFYGRESELLATRQDLKSVEEKLSLAQEDLISNRNQIGNQNKLIQELKTAKATLEQDSAKKEQQLQERCKALQDIQKEKSLKEKELVNEKSKLAEIEEIKCRQEKEITKLNEELKSHKLESIKEITNLKDAKQLLIQQKLELQGKADSLKAAVEQEKRNQQILKDQVKKEEEELKKEFIEKEAKLHSEIKEKEVGMKKHEENEAKLTMQITALNENLGTVKKEWQSSQRRVSELEKQTDDLRGEIAVLEATVQNNQDERRALLERCLKGEGEIEKLQTKVLELQRKLDNTTAAVQELGRENQSLQIKHTQALNRKWAEDNEVQNCMACGKGFSVTVRRHHCRQCGNIFCAECSAKNALTPSSKKPVRVCDACFNDLQG

SEQ ID NO: 43769 - protein, 78 aa, Homo sapiens [sequence omitted]

SEQ ID NO: 43770 - protein, 128 aa, Homo sapiens [sequence omitted]

SEQ ID NO: 43771 - protein, 21 aa, Homo sapiens
MSGRFKYIGQCGYIISESWKN

SEQ ID NO: 43772 - protein, 20 aa, Homo sapiens
MKAAEFSTLPILTGSGTHRL

SEQ ID NO: 43773 - protein, 20 aa, Homo sapiens
MHNRGTTKASYKSPTKIPGI

SEQ ID NO: 43774 - protein, 631 aa, Homo sapiens
MLFAFISLLVMLPTWWIVSSWLVWGVILFVYLVIRALRLWRTAKLQVTLKKYSVHLEDMATNSRAFTNLVRKALRLIQETEVISRGFTLVSAACPFNKAGQHPSQHLIGLRKAVYRTLRANFQAARLATLYMLKNYPLNSESDNVTNYICVVPFKELGLGLSEEQISEEEAHNFTDGFSLPALKVLFQLWVAQSSEFFRRLALLLSTANSPPGPLLTPALLPHRILSDVTQGLPHAHSACLEELKRSYEFYRYFETQHQSVPQCLSKTQQKSRELNNVHTAVRSLQLHLKALLNEVIILEDELEKLVCTKETQELVSEAYPILEQKLKLIQPHVQASNNCWEEAISQVDKLLRRNTDKKGKPEIACENPHCTVVPLKQPTLHIADKDPIPEEQELEAYVDDIDIDSDFRKDDFYYLSQEDKERQKREHEESKRVLQELKSVLGFKASEAERQKWKQLLFSDHAVLKSLSPVDPVEPISNSEPSMNSDMGKVSKNDTEEESNKSATTDNEISRTEYLCENSLEGKNKDNSSNEVFPQGAEERMCYQCESEDEPQADGSGLTTAPPTPRDSLQPSIKQRLARLQLSPDFTFTAGLAAEVAARSLSFTTMQEQTFGGEEEEQIIEENKNEIEEK

SEQ ID NO: 43775 - protein, 635 aa, Homo sapiens
MLFAFISLLVMLPTWWIVSSWLVWGVILFVYLVIRALRLWRTAKLQVTLKKYSVHLEDMATNSRAFTNLVRKALRLIQETEVISRGFTLLLDRVSAACPFNKAGQHPSQHLIGLRKAVYRTLRANFQAARLATLYMLKNYPLNSESDNVTNYICVVPFKELGLGLSEEQISEEEAHNFTDGFSLPALKVLFQLWVAQSSEFFRRLALLLSTANSPPGPLLTPALLPHRILSDVTQGLPHAHSACLEELKRSYEFYRYFETQHQSVPQCLSKTQQKSRELNNVHTAVRSLQLHLKALLNEVIILEDELEKLVCTKETQELVSEAYPILEQKLKLIQPHVQASNNCWEEAISQVDKLLRRNTDKKGKPEIACENPHCTVVPLKQPTLHIADKDPIPEEQELEAYVDDIDIDSDFRKDDFYYLSQEDKERQKREHEESKRVLQELKSVLGFKASEAERQKWKQLLFSDHAVLKSLSPVDPVEPISNSEPSMNSDMGKVSKNDTEEESNKSATTDNEISRTEYLCENSLEGKNKDNSSNEVFPQGAEERMCYQCESEDEPQADGSGLTTAPPTPRDSLQPSIKQRLARLQLSPDFTFTAGLAAEVAARSLSFTTMQEQTFGGEEEEQIIEENKNEIEEK

SEQ ID NO: 43776 - protein, 295 aa, Homo sapiens
MSWIKPGMTMIEICEKLEDCSRKLIKENGLNAGLAFPTGCSLNNCAAHYTPNAGDTTVLQYDDICKIDFGTHISGRIIDCAFTVTFNPKYDTLLKAVKDATNTGIKCAGIDVRLCDVGEAIQEVMESYEVEIDGKTYQVKPIRNLNGHSIGQYRIHAGKTVPIVKGGEATRMEEGEVYAIETFGSTGKGVVHDDMECSHYMKNFDVGHVPIRLPRTKHLLNVINENFGTLAFCRRWLDRLGESKYLMALKNLCDLGIVDPYPPLCDIKGSYTAQFEHTILLRPTCKEVVSRGDDY

SEQ ID NO: 43777 - protein, 494 aa, Homo sapiens
MHIPVKTRRLLAALKVLDTKDLTIEKVVINGQEVKYALGERQSYKGSPMEISLPIALSKNQEIVIEISFETSPKSSALQWLTPEQTSGKEHPYLFSQCQAIHCRAILPCQDTPSVKLTYTAEVSVPKELVALMSAIRDGETPDPEDPSRKIYKFIQKVPIPCYLIALVVGALESRQIGPRTLVWSEKEQVEKSAYEFSETESMLKIAEDLGGPYVWGQYDLLVLPPSFPYGGMENPCLTFVTPTLLAGDKSLSNVIAHEISHSWTGNLVTNKTWDHFWLNEGHTVYLERHICGRLFGEKFRHFNALGGWGELQNSVKTFGETHPFTKLVVDLTDIDPDVAYSSVPYEKGFALLFYLEQLLGGPEIFLGFLKAYVEKFSYKSITTDDWKDFLYSYFKDKVDVLNQVDWNAWLYSPGLPPIKPNYDMTLTNACIALSQRWITAKEDDLNSFNATDLKDLSSHQLNEFLAQTLQRMAAALHSIQVGGRNSFGAKDGN

SEQ ID NO: 43778 - protein, 639 aa, Homo sapiens [sequence omitted]

SEQ ID NO: 43779 - protein, 295 aa, Homo sapiens [sequence omitted]

SEQ ID NO: 43780 - protein, 169 aa, Homo sapiens [sequence omitted]

SEQ ID NO: 43781 - protein, 244 aa, Homo sapiens
MEQLKSFQIIAHLKRLQEEINEVKTWSNRITEKQDILNNSLTTLSQDITKVDQSTTSMAKDVGLKITSVKTDIRRISGLVTDVISLTDSVQELENKIEKVEKNTVKNIGDLLSSSIDRTATLRKTASENSQRINSVKKTLTELKSDFDKHTDRFLSLEGDRAKVLKTVTFANDLKPKVYNLKKDFSRLEPLVNDLTLRIGRLVTDLLQREKEIAFLSEKISNLTIVQAEIKDIKDEIAHISDMN

SEQ ID NO: 43782 - protein, 264 aa, Homo sapiens
MSLMTQFEQEVSNLQDIMHDIQNNEEVLTQRMQSLNEKFQNITDFWKRSLEEMNINTDIFKSEAKHIHSQVTVQINSAEQEIKLLTERLKDLEDSTLRNIRTVKRQEEEDLLRVEEQLGSDTKAIEKLEEEQHALFARDEDLTNKLSDYEPKVEECKTHLPTIESAIHSVLRVSQDLIETEKKMEDLTMQMFNMEDDMLKAVSEIMEMQKTLEGIQYDNSILKMQNELDILKEKVHDFIAYSSTGEKGTLKEYNIENKGIGGDF

SEQ ID NO: 43783 - protein, 1147 aa, Homo sapiens
MILKKDNDSYVSFYNALLHEGYKDLAALLHDGIPVVSSSSGKDSVSGITSYVRTVLCEGGVPQRPVVFVTRKKLVNAIQQKLSKLKGEPGWVTIHGMAGCGKSVLAAEAVRDHSLLEGCFPGGVHWVSVGKQDKSGLLMKLQNLCTRLDQDESFSQRLPLNIEEAKDRLRILMLRKHPRSLLILDDVWDSWVLKAFDSQCQILLTTRDKSVTDSVMGPKYVVPVESSLGKEKGLEILSLFVNMKKADLPEQAHSIIKECKGSPLVVSLIGALLRDFPNRWEYYLKQLQNKQFKRIRKSSSYDYEALDEAMSISVEMLREDIKDYYTDLSILQKDVKVPTKVLCILWDMETEEVEDILQEFVNKSLLFCDRNGKSFRYYLHDLQVDFLTEKNCSQLQDLHKKIITQFQRYHQPHTLSPDQEDCMYWYNFLAYHMASAKMHKELCALMFSLDWIKAKTELVGPAHLIHEFVEYRHILDEKDCAVSENFQEFLSLNGHLLGRQPFPNIVQLGLCEPETSEVYQQAKLQAKQEVDNGMLYLEWINKKNITNLSRLVVRPHTDAVYHACFSEDGQRIASCGADKTLQVFKAETGEKLLEIKAHEDEVLCCAFSTDDRFIATCSVDKKVKIWNSMTGELVHTYDEHSEQVNCCHFTNSSHHLLLATGSSDCFLKLWDLNQKECRNTMFGHTNSVNHCRFSPDDKLLASCSADGTLKLWDATSANERKSINVKQFFLNLEDPQEDMEVIVKCCSWSADGARIMVAAKNKIFLWNTDSRSKVADCRGHLSWVHGVMFSPDGSSFLTSSDDQTIRLWETKKVCKNSAVMLKQEVDVVFQENEVMVLAVDHIRRLQLINGRTGQIDYLTEAQVSCCCLSPHLQYIAFGDENGAIEILELVNNRIFQSRFQHKKTVWHIQFTADEKTLISSSDDAEIQVWNWQLDKCIFLRGHQETVKDFRLLKNSRLLSWSFDGTVKVWNIITGNKEKDFVCHQGTVLSCDISHDATKFSSTSADKTAKIWSFDLLLPLHELRGHNGCVRCSAFSVDSTLLATGDDNGEIRIWNVSNGELLHLCAPLSEEGAATHGGWVTDLCFSPDGKMLISAGGYIKWWNVVTGESSQTFYTNGTNLKKIHVSPDFKTYVTVDNLGILYILQTLE

SEQ ID NO: 43784 - protein, 1190 aa, Homo sapiens
MILKKDNDSYVSFYNALLHEGYKDLAALLHDGIPVVSSSSGKDSVSGITSYVRTVLCEGGVPQRPVVFVTRKKLVNAIQQKLSKLKGEPGWVTIHGMAGCGKSVLAAEAVRDHSLLEGCFPGGVHWVSVGKQDKSGLLMKLQNLCTRLDQDESFSQRLPLNIEEAKDRLRILMLRKHPRSLLILDDVWDSWVLKAFDSQCQILLTTRDKSVTDSVMGPKYVVPVESSLGKEKGLEILSLFVNMKKADLPEQAHSIIKECKGSPLVVSLIGALLRDFPNRWEYYLKQLQNKQFKRIRKSSSYDYEALDEAMSISVEMLREDIKDYYTDLSILQKDVKVPTKVLCILWDMETEEVEDILQEFVNKSLLFCDRNGKSFRYYLHDLQVDFLTEKNCSQLQDLHKKIITQFQRYHQPHTLSPDQEDCMYWYNFLAYHMASAKMHKELCALMFSLDWIKAKTELVGPAHLIHEFVEYRHILDEKDCAVSENFQEFLSLNGHLLGRQPFPNIVQLGLCEPETSEVYQQAKLQAKQEVDNGMLYLEWINKKNITNLSRLVVRPHTDAVYHACFSEDGQRIASCGADKTLQVFKAETGEKLLEIKAHEDEVLCCAFSTDDRFIATCSVDKKVKIWNSMTGELVHTYDEHSEQVNCCHFTNSSHHLLLATGSSDCFLKLWDLNQKECRNTMFGHTNSVNHCRFSPDDKLLASCSADGTLKLWDATSANERKSINVKQFFLNLEDPQEDMEVIVKCCSWSADGARIMVAAKNKIFLFDIHTSGLLGEIHTGHHSTIQYCDFSPQNHLAVVALSQYCVELWNTDSRSKVADCRGHLSWVHGVMFSPDGSSFLTSSDDQTIRLWETKKVCKNSAVMLKQEVDVVFQENEVMVLAVDHIRRLQLINGRTGQIDYLTEAQVSCCCLSPHLQYIAFGDENGAIEILELVNNRIFQSRFQHKKTVWHIQFTADEKTLISSSDDAEIQVWNWQLDKCIFLRGHQETVKDFRLLKNSRLLSWSFDGTVKVWNIITGNKEKDFVCHQGTVLSCDISHDATKFSSTSADKTAKIWSFDLLLPLHELRGHNGCVRCSAFSVDSTLLATGDDNGEIRIWNVSNGELLHLCAPLSEEGAATHGGWVTDLCFSPDGKMLISAGGYIKWWNVVTGESSQTFYTNGTNLKKIHVSPDFKTYVTVDNLGILYILQTLE

SEQ ID NO: 43785 - protein, 926 aa, Homo sapiens [sequence omitted]

SEQ ID NO: 43786 - protein, 2666 aa, Homo sapiens
MDFYPHFPEFFLTITSILETQDTELLEWAFTSLSYLYKYLWRLMVKDMSSIYSMYSTLLAHKKLHIRNFAAESFTFLMRKVSDKNALFNLMFLDLDKHPEKVEGVGQLLFEMCKGVRNMFHSCTGQAVKLILRKLGPVTETETQLPWMLIGETLKNMVKSTVSYISKEHFGTFFECLQESLLDLHTKVTKTNCCESSEQIKRLLETYLILVKHGSGTKIPTPADVCKVLSQTLQVASLSTSCWETLLDVISALILGENVSLPETLIKETIEKIFESRFEKRLIFSFSEVMFAMKQFEQLFLPSFLSYIVNCFLIDDAVVKDEALAILAKLILNKAAPPTAGSMAIEKYPLVFSPQMVGFYIKQKKTRSKGRNEQFPVLDHLLSIIKLPPNKDTTYLSQSWAALVVLPHIRPLEKEKVIPLVTGFIEALFMTVDKGSFGKGNLFVLCQAVNTLLSLEESSELLHLVPVERVKNLVLTFPLEPSVLLLTDLYYQRLALCGCKGPLSQEALMELFPKLQANISTGVSKIRLLTIRILNHFDVQLPESMEDDGLSERQSVFAILRQAELVPATVNDYREKLLHLRKLRHDVVQTAVPDGPLQEVPLRYLLGMLYINFSALWDPVIELISSHAHEMENKQFWKVYYEHLEKAATHAEKELQNDMTDEKSVGDESWEQTQEGDVGALYHEQLALKTDCQERLDHTNFRFLLWRALTKFPERVEPRSRELSPLFLRFINNEYYPADLQVAPTQDLRRKGKGMVAEEIEEEPAAGDDEELEEEAVPQDESSQKKKTRRAAAKQLIAHLQVFSKFSNPRALYLESKLYELYLQLLLHQDQMVQKITLDCIMTYKHPHVLPYRENLQRLLEDRSFKEEIVHFSISEDNAVVKTAHRADLFPILMRILYGRMKNKTGSKTQGKSASGTRMAIVLRFLAGTQPEEIQIFLDLLFEPVRHFKNGECHSAVIQAVEDLDLSKVLPLGRQHGILNSLEIVLKNISHLISAYLPKILQILLCMTATVSHILDQREKIQLRFINPLKNLRRLGIKMVTDIFLDWESYQFRTEEIDAVFHGAVWPQISRLGSESQYSPTPLLKLISIWSRNARYFPLLAKQKPGHPECDILTNVFAILSAKNLSDATASIVMDIVDDLLNLPDFEPTETVLNLLVTGCVYPGIAENIGESITIGGRLILPHVPAILQYLSKTTISAEKVKKKKNRAQVSKELGILSKISKFMKDKEQSSVLITLLLPFLHRGNIAEDTEVDILVTVQNLLKHCVDPTSFLKPIAKLFSVIKNKLSRKLLCTVFETLSDFESGLKYITDVVKLNAFDQRHLDDINFDVRFETFQTITSYIKEMQIVDVNYLIPVMHNCFYNLELGDMSLSDNASMCLMSIIKKLAALNVTEKDYREIIHRSLLEKLRKGLKSQTESIQQDYTTILSCLIQTFPNQLEFKDLVQLTHYHDPEMDFFENMKHIQIHRRARALKKLAKQLMEGKVVLSSKSLQNYIMPYAMTPIFDEKMLKHENITTAATEIIGAICKHLSWSAYMYYLKHFIHVLQTGQINQKLGVSLLVIVLEAFHFDHKTLEEQMGKIENEENAIEAIELPEPEAMELERVDEEEKEYTCKSLSDNGQPGTPDPADSGGTSAKESECITKPVSFLPQNKEEIERTIKNIQGTITGDILPRLHKCLASTTKREEEHKLVKSKVVNDEEVVRVPLAFAMVKLMQSLPQEVMEANLPSILLKVCALLKNRAQEIRDIARSTLAKIIEDLGVHFLLYVLKELQTTLVRGYQVHVLTFTVHMLLQGLTNKLQVGDLDSCLDIMIEIFNHELFGAVAEEKEVKQILSKVMEARRSKSYDSYEILGKFVGKDQVTKLILPLKEILQNTTSLKLARKVHETLRRITVGLIVNQEMTAESILLLSYGLISENLPLLTEKEKNPVAPAPDPRLPPQSCLLLPPTPVRGGQKAVVSRKTNMHIFIESGLRLLHLSLKTSKIKSSGECVLEMLDPFVSLLIDCLGSMDVKVITGALQCLIWVLRFPLPSIETKAEQLTKHLFLLLKDYAKLGAARGQNFHLVVNCFKCVTILVKKVKSYQITEKQLQVLLAYAEEDIYDTSRQATAFGLLKAILSRKLLVPEIDEVMRKVSKLAVSAQSEPARVQCRQVFLKYILDYPLGDKLRPNLEFMLAQLNYEHETGRESTLEMIAYLFDTFPQGLLHENCGMFFIPLCLMTINDDSATCKKMASMTIKSLLGKISLEKKDWLFDMVTTWFGAKKRLNRQLAALICGLFVESEGVDFEKRLGTVLPVIEKEIDPENFKDIMEETEEKAADRLLFSFLTLITKLIKECNIIQFTKPAETLSKIWSHVHSHLRHPHNWVWLTAAQIFGLLFASCQPEELIQKWNTKKTKKHLPEPVAIKFLASDLDQKMKSISLASCHQLHSKFLDQSLGEQVVKNLLFAAKVLYLLELYCEDKQSKIKEDLEEQEALEDGVACADEKAESDGEEKEEVKEELGRPATLLWLIQKLSRIAKLEAAYSPRNPLKRTCIFKFLGAVAMDLGIDKVKPYLPMIIAPLFRELNSTYSEQDPLLKNLSQEIIELLKKLVGLESFSLAFASVQKQANEKRALRKKRKALEFVTNPDIAAKKKMKKHKNKSEAKKRKIEFLRPGYKAKRQKSHSLKDLAMVE

SEQ ID NO: 43787 - protein, 1184 aa, Homo sapiens
MPIDVVYTWVNGTDLELLKELQQVREQMEEEQKAMREILGKNTTEPTKKSEKQLECLLTHCIKVPMLVLDPALPANITLKDLPSLYPSFHSASDIFNVAKPKNPSTNVSVVVFDSTKDVEDAHSGLLKGNSRQTVWRGYLTTDKEVPGLVLMQDLAFLSGFPPTFKETNQLKTKLPENLSSKVKLLQLYSEASVALLKLNNPKDFQELNKQTKKNMTIDGKELTISPAYLLWDLSAISQSKQDEDISASRFEDNEELRYSLRSIERHAPWVRNIFIVTNGQIPSWLNLDNPRVTIVTHQDVFRNLSHLPTFSSPAIESHIHRIEGLSQKFIYLNDDVMFGKDVWPDDFYSHSKGQKVYLTWPVPNCAEGCPGSWIKDGYCDKACNNSACDWDGGDCSGNSGGSRYIAGGGGTGSIGVGQPWQFGGGINSVSYCNQGCANSWLADKFCDQACNVLSCGFDAGDCGQDHFHELYKVILLPNQTHYIIPKGECLPYFSFAEVAKRGVEGAYSDNPIIRHASIANKWKTIHLIMHSGMNATTIHFNLTFQNTNDEEFKMQITVEVDTREGPKLNSTAQKGYENLVSPITLLPEAEILFEDIPKEKRFPKFKRHDVNSTRRAQEEVKIPLVNISLLPKDAQLSLNTLDLQLEHGDITLKGYNLSKSALLRSFLMNSQHAKIKNQAIITDETNDSLVAPQEKQVHKSILPNSLGVSERLQRLTFPAVSVKVNGHDQGQNPPLDLETTARFRVETHTQKTIGGNVTKEKPPSLIVPLESQMTKEKKITGKEKENSRMEENAENHIGVTEVLLGRKLQHYTDSYLGFLPWEKKKYFQDLLDEEESLKTQLAYFTDSKNTGRQLKDTFADSLRYVNKILNSKFGFTSRKVPAHMPHMIDRIVMQELQDMFPEEFDKTSFHKVRHSEDMQFAFSYFYYLMSAVQPLNISQVFDEVDTDQSGVLSDREIRTLATRIHELPLSLQDLTGLEHMLINCSKMLPADITQLNNIPPTQESYYDPNLPPVTKSLVTNCKPVTDKIHKAYKDKNKYRFEIMGEEEIAFKMIRTNVSHVVGQLDDIRKNPRKFVCLNDNIDHNHKDAQTVKAVLRDFYESMFPIPSQFELPREYRNRFLHMHELQEWRAYRDKLKFWTHCVLATLIMFTIFSFFAEQLIALKRKIFPRRRIHKEASPNRIRV

SEQ ID NO: 43788 - protein, 231 aa, Homo sapiens [sequence omitted]

SEQ ID NO: 43789 - protein, 158 aa, Homo sapiens
MSVCWHPEETFKLMVAEKNGTIRFYDLLAQQAILSLESEQVPLMSAHWCLKNTFKVGAVAGNDWLIWDITRSSYPQNKRPVHMDRACLFRWSTISENLFATTGYPGKMASQFQIHHLGHPQPILMGSVAVGSGLSWHRTLPLCVIGGDHKLLFWVTEV

SEQ ID NO: 43790 - protein, 127 aa, Homo sapiens [sequence omitted]

SEQ ID NO: 43791 - protein, 169 aa, Homo sapiens
MSSSHLFYLALCLLTFTSSATAGPETLCGAELVDALQFVCGDRGFYFNKPTGYGSSSRRAPQTGIVDECCFRSCDLRRLEMYCAPLKPAKSARSVRAQRHTDMPKTQKYQPPSTNKNTKSQRRKGWPKTHPGGEQKEGTEASLQIRGKKKEQRREIGSRNAECRGKKGK

SEQ ID NO: 43792 - protein, 496 aa, Homo sapiens [sequence omitted]

SEQ ID NO: 43793 - protein, 719 aa, Homo sapiens
MMKLIINSLYKNKEIFLRELISNASDALDKIRLISLTDENALSGNEELTVKIKCDKEKNLLHVTDTGVGMTREELVKNLGTIAKSGTSEFLNKMTEAQEDGQSTSELIGQFGVGFYSAFLVADKVIVTSKHNNDTQHIWESDSNEFSVIADPRGNTLGRGTTITLVLKEEASDYLELDTIKNLVKKYSQFINFPIYVWSSKTETVEEPMEEEEAAKEEKEESDDEAAVEEEEEEKKPKTKKVEKTVWDWELMNDIKPIWQRPSKEVEEDEYKAFYKSFSKESDDPMAYIHFTAEGEVTFKSILFVPTSAPRGLFDEYGSKKSDYIKLYVRRVFITDDFHDMMPKYLNFVKGVVDSDDLPLNVSRETLQQHKLLKVIRKKLVRKTLDMIKKIADDKYNDTFWKEFGTNIKLGVIEDHSNRTRLAKLLRFQSSHHPTDITSLDQYVERMKEKQDKIYFMAGSSRKEAESSPFVERLLKKGYEVIYLTEPVDEYCIQALPEFDGKRFQNVAKEGVKFDESEKTKESREAVEKEFEPLLNWMKDKALKDKIEKAVVSQRLTESPCALVASQYGWSGNMERIMKAQAYQTGKDISTNYYASQKKTFEINPRHPLIRDMLRRIKEDEDDKTVLDLAVVLFETATLRSGYLLPDTKAYGDRIERMLRLSLNIDPDAKVEEEPEEEPEETAEDTTEDTEQDEDEEMDVGTDEEEETAKESTAEKDEL

SEQ ID NO: 43794 - protein, 246 aa, Homo sapiens [sequence omitted]

SEQ ID NO: 43795 - protein, 703 aa, Homo sapiens [sequence omitted]

SEQ ID NO: 43796 - protein, 398 aa, Homo sapiens
MIEAVQNHIGSLNWGYRVALREKKVVYENAYGQFIGPHRIKATNNKGKEKIYSAERFLIATGERPRYLGIPGDKEYCISSDDLFSLPYCPGKTLVVGASYVALECAGFLAGIGLDVTVMVRSILLRGFDQDMANKIGEHMEEHGIKFIRQFVPIKVEQIEAGTPGRLRVVAQSTNSEEIIEGEYNTVMLAIGRDACTRKIGLETVGVKINEKTGKIPVTDEEQTNVPYIYAIGDILEDKVELTPVAIQAGRLLAQRLYAGSTVKCDYENVPTTVFTPLEYGACGLSEEKAVEKFGEENIEVYHSYFWPLEWTIPSRDNNKCYAKIICNTKDNERVVGFHVLGPNAGEVTQGFAAALKCGLTKKQLDSTIGIHPVCAEVFTTLSVTKRSGASILQAGCG

SEQ ID NO: 43797 - protein, 1046 aa, Homo sapiens
MVEGDCQIQMGRFISFLQELSCFVTRCYEVVMNVVHQLAALYISNKIAPKIIETTGVHFQTMYEHLGELLTVLLTLDEIIDNHITLKDHWTMYKRLLKSVHHNPSKFGIQEEKLKPFEKFLLKLEGQLLDGMIFQACIEQQFDSLNGGVSVSKNSTFAEEFAHSIRSIFANVEAKLGEPSEIDQRDKYVGICGLFVLHFQIFRTIDKKFYKSLLDICKKVPAITLTANIIWFPDNFLIQKIPAAAKLLDRKSLQAIKIHRDTFLQQKAQSLTKDVQSYYVFVSSWMMKMESILSKEQRMDKFAEDLTNRCNVFIQGFLYAYSISTIIKTTMNLYMSMQKPMTKTSVKALCRLVELLKAIEHMFYRRSMVVADSVSHITQHLQHQALHSISVAKKRVISDKKYSEQRLDVLSALVLAENTLNGPSTKQRRLIVSLALSVGTQMKTFKDEELFPLQVVMKKLDLISELRERVQTQCDCCFLYWHRAVFPIYLDDVYENAVDAARLHYMFSALRDCVPAMMHARHLESYEILLDCYDKEIMEILNEHLLDKLCKEIEKDLRLSVHTHLKLDDRNPFKVGMKDLALFFSLNPIRFFNRFIDIRAYVTHYLDKTFYNLTTVALHDWATYSEMRNLATQRYGLVMTEAHLPSQTLEQGLDVLEIMRNIHIFVSRYLYNLNNQIFIERTSNNKHLNTINIRHIANSIRTHGTGIMNTTVNFTYQFLKKKFYIFSQFMYDEHIKSRLIKDIRFFREIKDQNDHKYPFDRAEKFNRGIRKLGVTPEGQSYLDQFRQLISQIGNAMGYVRMIRSGGLHCSSNAIRFVPDLEDIVNFEELVKEEGLAEETLKAARHLDSVLSDHTRNSAEGTEYFKMLVDVFAPEFRRPKNIHLRNFYIIVPPLTLNFVEHSISCKEKLNKKNKIGAAFTDDGFAMGVAYILKLLDQYREFDSLHWFQSVREKYLKEIRAVAKQQNVQSASQDEKLLQTMNLTQKRLDVYLQEFELLYFSLSSARIFFRADKTAAEENQEKKEKEEETKTSNGDLSDSTVSADPVVK

SEQ ID NO: 43798 - protein, 493 aa, Homo sapiens
MASLSDYECSRQSFASDSSSKSSSPASTSPPRVVTFDEVMATARNLSNLTLAHEIAVNENFQLKQEALPEKSLAGRVKHIVHQAFWDVLDSELNADPPEFEHAIKLFEEIREILLSFLTPGGNRLRNQICEVLDTDLIRQQAEHSAVDIQGLANYVISTMGKLCAPVRDNDIRELKATGNIVEVLRQIFHVLDLMQMDMANFTIMSLRPHLQRQLVEYERTKFQEILEETPSALDQTTEWIKESVNEELFSLSESALTPGAENTSKPSLSPTLVLNNSYLKLLQWDYQKKELPETLMTDGARLQELTEKLNQLKIIACLSLITNNMVGAITGGLPELASRLTRISAVLLEGMNKETFNLKEVLNSIGIQTCVEVNKTLMERGLPTLNAEIQANLIGQFSSIEEEDNPIWSLIDKRIKLYMRRLLCLPSPQKCMPPMPGGLAVIQQELEALGSQYANIVNLNKQVYGPFYANILRKLLFNEEAMGKVDASPPTN

SEQ ID NO: 43799 - protein, 34 aa, Homo sapiens
MASLSDYECSRQSFASDSSSKSSSPALLYEHLTA

SEQ ID NO: 43800 - protein, 366 aa, Homo sapiens [sequence omitted]

SEQ ID NO: 43801 - protein, 608 aa, Homo sapiens
MENVSRVTSPISTDGMAEELTMDGVAGEHSQIPNGSRSHEPLSVDSVSNNLAADAVGHGGVIPMHGNGLELPVVMETDHIASRVNGMSDSALSDSIHTVAMSTNSVSVALSTSHNLASLESVSLHEVGLSLEPVAVSSITQEVAMGTGHVDVSSDSLSFVSPSLQMEDSNSNKENMATLFTIWCTLCDRAYPSDCPEHGPVTFVPDTPIESRARLSLPKQLVLRQSIVGAEVGVWTGETIPVRTCFGPLIGQQSHSMEVAEWTDKAVNHIWKIYHNGVLEFCIITTDENECNWMMFVRKARNREEQNLVAYPHDGKIFFCTSQDIPPENELLFYYSRDYAQQIGVPEHPDVHLCNCGKECNSYTEFKAHLTSHIHNHLPTQGHSGSHGPSHSKERKWKCSMCPQAFISPSKLHVHFMGHMGMKPHKCDFCSKAFSDPSNLRTHLKIHTGQKNYRCTLCDKSFTQKAHLESHMVIHTGEKNLKCDYCDKLFMRRQDLKQHVLIHTQERQIKCPKCDKLFLRTNHLKKHLNSHEGKRDYVCEKCTKAYLTKYHLTRHLKTCKGPTSSSSAPEEEEEDDSEEEDLADSVGTEDCRINSAVYSADESLSAHK

SEQ ID NO: 43802 - protein, 299 aa, Homo sapiens
MIYNVSWNRNGSLICTASKDKKVRVIDPRKQEIVAEKEKAHEGARPMRAIFLADGNVFTTGFSRMSERQLALWNPKNMQEPIALHEMDTSNGVLLPFYDPDTSIIYLCGKGDSSIRYFEITDESPYVHYLNTFSSKEPQRGMGYMPKRGLDVNKCEIARFFKLHERKCEPIIMTVPRKSDLFQDDLYPDTAGPEAALEAEEWFEGKNADPILISLKHGYIPGKNRDLKVVKKNILDSKPTANKKCDLISIPKKTTDTASVQNEAKLDEILKEIKSIKDTICNQDERISKLEQQMAKIAA

SEQ ID NO: 43803 - protein, 1006 aa, Homo sapiens
MVKGAALFLQQGSSPQGQRSLQHPHKHAGDLPQHLQVMINLLRCEDRIKLAVRLESAWADRVRYMVVVYSSGRQDTEENILLGVDFSSKESKSCTIGMVLRLWSDTKIHLDGDGGFSVSTAGRMHIFKPVSVQAMWSALQVLHKACEVARRHNYFPGGVALIWATYYESCISSEQSCINEWNAMQDLESTRPDSPALFVDKPTEGERTERLIKAKLRSIMMSQDLENVTSKEIRNELEKQMNCNLKELKEFIDNEMLLILGQMDKPSLIFDHLYLGSEWNASNLEELQGSGVDYILNVTREIDNFFPGLFAYHNIRVYDEETTDLLAHWNEAYHFINKAKRNHSKCLVHCKMGVSRSASTVIAYAMKEFGWPLEKAYNYVKQKRSITRPNAGFMRQLSEYEGILDASKQRHNKLWRQQTDSSLQQPVDDPAGPGDFLPETPDGTPESQLPFLDDAAQPGLGPPLPCCFRRLSDPLLPSPEDETGSLVHLEDPEREALLEEAAPPAEVHRPARQPQQGSGLCEKDVKKKLEFGSPKGRSGSLLQVEETEREEGLGAGRWGQLPTQLDQNLLNSENLNNNSKRSCPNGMEDDAIFGILNKVKPSYKSCADCMYPTASGAPEASRERCEDPNAPAICTQPAFLPHITSSPVAHLASRSRVPEKPASGPTEPPPFLPPAGSRRADTSGPGAGAALEPPASLLEPSRETPKVLPKSLLLKNSHCDKNPPSTEVVIKEESSPKKDMKPAKDLRLLFSNESEKPTTNSYLMQHQESIIQLQKAGLVRKHTKELERLKSVPADPAPPSRDGPASRLEASIPEESQDPAALHELGPLVMPSQAGSDEKSEAAPASLEGGSLKSPPPFFYRLDHTSSFSKDFLKTICYTPTSSSMSSNLTRSSSSDSIHSVRGKPGLVKQRTQEIETRLRLAGLTVSSPLKRSHSLAKLGSLTFSTEDLSSEADPSTVADSQDTTLSESSFLHEPQGTPRDPAATSKPSGKPAPENLKSPSWMSKS

SEQ ID NO: 43804 - protein, 649 aa, Homo sapiens
MVKGAALFLQQGSSPQGQRSLQHPHKHAGDLPQHLQVMINLLRCEDRIKLAVRLESAWADRVRYMVVVYSSGRQDTEENILLGVDFSSKESKSCTIGMVLRLWSDTKIHLDGDGGFSVSTAGRMHIFKPVSVQAMWSALQVLHKACEVARRHNYFPGGVALIWATYYESCISSEQSCINEWNAMQDLESTRPDSPALFVDKPTEGERTERLIKAKLRSIMMSQDLENVTSKEIRNELEKQMNCNLKELKEFIDNEMLLILGQMDKPSLIFDHLYLGSEWNASNLEELQGSGVDYILNVTREIDNFFPGLFAYHNIRVYDEETTDLLAHWNEAYHFINKAKRNHSKCLVHCKMGVSRSASTVIAYAMKEFGWPLEKAYNYVKQKRSITRPNAGFMRQLSEYEGILDASKQRHNKLWRQQTDSSLQQPVDDPAGPGDFLPETPDGTPESQLPFLDDAAQPGLGPPLPCCFRRLSDPLLPSPEDETGSLVHLEDPEREALLEEAAPPAEVHRPARQPQQGSGLCEKDVKKKLEFGSPKGRSGSLLQVEETEREEGLGAGRWGQLPTQLDQNLLNSENLNNNSKRSCPNGMEVGRARPAGWHTPSLPSHSNWPTSASVVGTTGTRHHTQLIFFYCLLWAPSSHLQGPEGSFTG

SEQ ID NO: 43805 - protein, 174 aa, Homo sapiens [sequence omitted]

SEQ ID NO: 43806 - protein, 138 aa, Homo sapiens [sequence omitted]

SEQ ID NO: 43807 - protein, 803 aa, Homo sapiens
MKFQGAFRKGVPNPIDLLESTLYESSVVPGPKKAPMDSLFDYGTYRHHSSDNKRWRKKIIEKQPQSPKAPAPQPPPILKVFNRPILFDIVSRGSTADLDGLLPFLLTHKKRLTDEEFREPSTGKTCLPKALLNLSNGRNDTIPVLLDIAERTGNMREFINSPFRDIYYRGQTALHIAIERRCKHYVELLVAQGADVHAQARGRFFQPKDEGGYFYFGELPLSLAACTNQPHIVNYLTENPHKKADMRRQDSRGNTVLHALVAIADNTRENTKFVTKMYDLLLLKCARLFPDSNLEAVLNNDGLSPLMMAAKTGKIGIFQHIIRREVTDEDTRHLSRKFKDWAYGPVYSSLYDLSSLDTCGEEASVLEILVYNSKIENRHEMLAVEPINELLRDKWRKFGAVSFYINVVSYLCAMVIFTLTAYYQPLEGTPPYPYRTTVDYLRLAGEVITLFTGVLFFFTNIKDLFMKKCPGVNSLFIDGSFQLLYFIYSVLVIVSAALYLAGIEAYLAVMVFALVLGWMNALYFTRGLKLTGTYSIMIQKILFKDLFRFLLVYLLFMIGYASALVSLLNPCANMKVCNEDQTNCTVPTYPSCRDSETFSTFLLDLFKLTIGMGDLEMLSSTKYPVVFIILLVTYIILTFVLLLNMLIALMGETVGQVSKESKHIWKLQWATTILDIERSFPVFLRKAFRSGEMVTVGKSSDGTPDRRWCFRVDEVNWSHWNQNLGIINEDPGKNETYQYYGFSHTVGRLRRDRWSSVVPRVVELNKNSNPDEVVVPLDSMGNPRCDGHQQGYPRKWRTDDAPL

SEQ ID NO: 43808 - protein, 435 aa, Homo sapiens
MHAYQREKMKEEKRRSLEARREKLRQLMQEEQDLLARELEELRLSMNLQERRIREQHGKLKSAKEEQRKLIAEQLLYEHWKKNNPKLREMELDLHQKHVVNSWEMQKEEKKQQEATAEQENKRYENEYERARREALERMKAEEERRQLEDKLQAEALLQQMEELKLKEVEATKLKKEQENLLKQRWELERLEEERKQMEAFRQKAELGRFLRHQYNAQLSRRTQQIQEELEADRRILQALLEKEDESQRLHLARREQVMADVAWMKQAIEEQLQLERAREAELQMLLREEAKEMWEKREAEWARERSARDRLMSEVLTGRQQQIQEKIEQNRRAQEESLKHREQLIRNLEEVRELARREKEESEKLKSARKQELEAQVAERRLQAWEADQQEEEEEEEARRVEQLSDALLQQEAETMAEQGYRPKPYGHPKIAWN

SEQ ID NO: 43809 - protein, 508 aa, Homo sapiens [sequence omitted]

SEQ ID NO: 43810 - protein, 430 aa, Homo sapiens
MADRRLSLDLSELAKAAKKKLQSLSNHLFEELAMDVYDEVDRRETDAVWLATQNHSALVTETTVVPFLPVNPEYSSTRNQGRQKLARFNAHEFATLVIDILSDAKRRQQGSSLSGSKDNVELILKTINNQHSVESQDNDQPDYDSVASDEDTDLETTASKTNRQKLQTLQSENSNLRKQATTNVYQVQTGSEYTDTSNHSSLKRRPSARGSRPMSMYETGSGQKPYLPMGEASRPEESRMRLQPFPAHASRLEKQNSTPESDYDNTPNDMEPDGMGSSRKGRQRSMVWPGDGLVPDTAEPHVAPSPTLPSTEDVIRKTEQITKNIQELLRAAQENKHDSYIPCSERIHVAVTEMAALFPKKPKSDMVRTSLRLLTSSAYRLQSECKKTLPGDPGSPTDVQLVTQQVIQCAYDIAKAAKQLVTITTKENNN

SEQ ID NO: 43811 - protein, 457 aa, Homo sapiens
MADSLDLSELAKAAKKKLQSLSNHLFEELAMDVYDEVDRRETDAVWLATQNHSALVTETTVVPFLPVNPEYSSTRNQGRQKLARFNAHEFATLVIDILSDAKRRQQGSSLSGSKDNVELILKTINNQHSVESQDNDQPDYDSVASDEDTDLETTASKTNRQKLQTLQSENSNLRKQATTNVYQVQTGSEYTDTSNHSSLKRRPSARGSRPMSMYETGSGQKPYLPMGEASRPEESRMRLQPFPAHIGRSALVTSSSSLPSFPSTLSWSRDESARRASRLEKQNSTPESDYDNTPNDMEPDGMGSSRKGRQRSMVWPGDGLVPDTAEPHVAPSPTLPSTEDVIRKTEQITKNIQELLRAAQENKHDSYIPCSERIHVAVTEMAALFPKKPKSDMVRTSLRLLTSSAYRLQSECKKTLPGDPGSPTDVQLVTQQVIQCAYDIAKAAKQLVTITTKENNN

SEQ ID NO: 43812 - protein, 170 aa, Homo sapiens
MADSSLDLSELAKAAKKKLQSLSNHLFEELAMDVYDEVDRRETDAVWLATQNHSALVTETTVVPFLPVNPEYSSTRNQGRQKLARFNAHEFATLVIDILSDAKRRQQGSSLSGSKDNVELILKTINNQHSVESQDNDQPDYDSVASDEDTDLETTASKTNRQKLLGKDAN

SEQ ID NO: 43813 - protein, 220 aa, Homo sapiens [sequence omitted]

SEQ ID NO: 43814 - protein, 872 aa, Homo sapiens
MGKVYRQDRKSVQRIKAKDIVPGDIVEIAVGDKVPADIRLTSIKSTTLRVDQSILTGESVSVIKHTDPVPDPRAVNQDKKNMLFSGTNIAAGKAMGVVVATGVNTEIGKIRDEMVATEQERTPLQQKLDEFGEQLSKVISLICIAVWIINIGHFNDPVHGGSWIRGAIYYFKIAVALAVAAIPEGLPAVITTCLALGTRRMAKKNAIVRSLPSVETLGCTSVICSDKTGTLTTNQMSVCRMFILDRVEGDTCSLNEFTITGSTYAPIGEVHKDDKPVNCHQYDGLVELATICALCNDSALDYNEAKGVYEKVGEATETALTCLVEKMNVFDTELKGLSKIERANACNSVIKQLMKKEFTLEFSRDRKSMSVYCTPNKPSRTSMSKMFVKGAPEGVIDRCTHIRVGSTKVPMTSGVKQKIMSVIREWGSGSDTLRCLALATHDNPLRREEMHLEDSANFIKYETNLTFVGCVGMLDPPRIEVASSVKLCRQAGIRVIMITGDNKGTAVAICRRIGIFGQDEDVTSKAFTGREFDELNPSAQRDACLNARCFARVEPSHKSKIVEFLQSFDEITAMTGDGVNDAPALKKAEIGIAMGSGTAVAKTASEMVLADDNFSTIVAAVEEGRAIYNNMKQFIRYLISSNVGEVVCIFLTAALGFPEALIPVQLLWVNLVTDGLPATALGFNPPDLDIMNKPPRNPKEPLISGWLFFRYLAIGCYVGAATVGAAAWWFIAADGGPRVSFYQLSHFLQCKEDNPDFEGVDCAIFESPYPMTMALSVLVTIEMCNALNSLSENQSLLRMPPWENIWLVGSICLSMSLHFLILYVEPLPLIFQITPLNVTQWLMVLKISLPVILMDETLKFVARNYLEPAILE

SEQ ID NO: 43815 - protein, 917 aa, Homo sapiens
MGKVYRQDRKSVQRIKAKDIVPGDIVEIAVGDKVPADIRLTSIKSTTLRVDQSILTGESVSVIKHTDPVPDPRAVNQDKKNMLFSGTNIAAGKAMGVVVATGVNTEIGKIRDEMVATEQERTPLQQKLDEFGEQLSKVISLICIAVWIINIGHFNDPVHGGSWIRGAIYYFKIAVALAVAAIPEGLPAVITTCLALGTRRMAKKNAIVRSLPSVETLGCTSVICSDKTGTLTTNQMSVCRMFILDRVEGDTCSLNEFTITGSTYAPIGEVHKDDKPVNCHQYDGLVELATICALCNDSALDYNEAKGVYEKVGEATETALTCLVEKMNVFDTELKGLSKIERANACNSVIKQLMKKEFTLEFSRDRKSMSVYCTPNKPSRTSMSKMFVKGAPEGVIDRCTHIRVGSTKVPMTSGVKQKIMSVIREWGSGSDTLRCLALATHDNPLRREEMHLEDSANFIKYETNLTFVGCVGMLDPPRIEVASSVKLCRQAGIRVIMITGDNKGTAVAICRRIGIFGQDEDVTSKAFTGREFDELNPSAQRDACLNARCFARVEPSHKSKIVEFLQSFDEITAMTGDGVNDAPALKKAEIGIAMGSGTAVAKTASEMVLADDNFSTIVAAVEEGRAIYNNMKQFIRYLISSNVGEVVCIFLTAALGFPEALIPVQLLWVNLVTDGLPATALGFNPPDLDIMNKPPRNPKEPLISGWLFFRYLAIGCYVGAATVGAAAWWFIAADGGPRVSFYQLSHFLQCKEDNPDFEGVDCAIFESPYPMTMALSVLVTIEMCNALNSLSENQSLLRMPPWENIWLVGSICLSMSLHFLILYVEPLPLIFQITPLNVTQWLMVLKISLPVILMDETLKFVARNYLEPGKECVQPATKSCSFSACTDGISWPFVLLIMPLVIWVYSTDTNFSDMFWS

SEQ ID NO: 43816 - protein, 365 aa, Homo sapiens
MDSGARWQRGRLALRRAPGPDGPDRVLELFDPPKSSRPKLQAACSSIQEVRWCTRLEMPDNLYTFVLKVKDRTDIIFEVGDEQQLNSWMAELSECTGRGLESTEAEMHIPSALEPSTSSSPRGSTDSLNQGASPGGLLDPACQKTDHFLSCYPWFHGPISRVKAAQLVQLQGPDAHGVFLVRQSETRRGEYVLTFNFQGIAKHLRLSLTERGQCRVQHLHFPSVVDMLHHFQRSPIPLECGAACDVRLSSYVVVVSQPPGSCNTVLFPFSLPHWDSESLPHWGSELGLPHLSSSGCPRGLSPEGLPGRSSPPEQIFHLVPSPEELANSLQHLEHEPVNRARDSDYEMDSSSRSHLRAIDNQYTPL

SEQ ID NO: 43817 - protein, 318 aa, Homo sapiens
MMYPVPVSPGVQPLYPIPMTPMPVNQAKTYRAGKVPNMPQQRQDQHHQSAMMHPASAAGPPIAATPPAYSTQYVAYSPQQFPNQPLVQHVPHYQSQHPHVYSPVIQGNARMMAPPTHAQPGLVSSSATQYGAHEQTHAMYACPKLPYNKETSPSFYFAISTGSLAQQYAHPNATLHPHTPHPQPSATPTGQQQSQHGGSHPAPSPVQHHQHQAAQALHLASPQQQSAIYHAGLAPTPPSMTPASNTQSPQNSFPAAQQTVFTIHPSHVQPAYTNPPHMAHVPQYKPTTNSSCKAALEEPKGQIPSSLLLLLPTGSTEN

SEQ ID NO: 43818 - protein, 734 aa, Homo sapiens
MGQPGSGSMPSRSTSHTSDFNPNSGSDQRVVNGVFILSFISFVLSGVPWPSPCPSPSSRPPSRYQSGPNSLPPRAATPTRPPSRPPSRPSRPPSHPSAHGSPAPVSTMPKRMSSEGPPRMSPKAQRHPRNHRVSAGRGSISSGLEFVSHNPPSEAATPPVARTSPSGGTWSSVVSGAASPTPASPASNRAVTPSSEAKDSRLQDQRQNSPAGNKENIKPNETSPSFSKAENKGISPVVSEHRKQIDDLKKFKNDFRLQPSSTSESMDQLLNKNREGEKSRDLIKDKIEPSAKDSFIENSSSNCTSGSSKPNSPSISPSILSNTEHKRGPEVTSQGVQTSSPACKQEKDDKEEKKDAAEQVRKSTLNPNAKEFNPRSFSQPKPSTTPTSPRPQAQPSPSMVGHQQPTPVYTQPVCFAPNMMYPVPVSPGVQPLYPIPMTPMPVNQAKTYRAVPNMPQQRQDQHHQSAMMHPASAAGPPIAATPPAYSTQYVAYSPQQFPNQPLVQHVPHYQSQHPHVYSPVIQGNARMMAPPTHAQPGLVSSSATQYGAHEQTHAMYACPKLPYNKETSPSFYFAISTGSLAQQYAHPNATLHPHTPHPQPSATPTGQQQSQHGGSHPAPSPVQHHQHQAAQALHLASPQQQSAIYHAGLAPTPPSMTPASNTQSPQNSFPAAQQTVFTIHPSHVQPAYTNPPHMAHVPQYKPTTNSSCKAALEEPKGQIPSSLLLLLPTGSTEN

SEQ ID NO: 43819 - protein, 726 aa, Homo sapiens
MGQPGSGSMPSRSTSHTSDFNPNSGSDQRVVNGVFILSFISFVLSGVPWPSPCPSPSSRPPSRYQSGPNSLPPRAATPTRPPSRPPSRPSRPPSHPSAHGSPAPVSTMPKRMSSEGPPRMSPKAQRHPRNHRVSAGRGSISSGLEFVSHNPPSEAATPPVARTSPSGGTWSSVVSGAKDSRLQDQRQNSPAGNKENIKPNETSPSFSKAENKGISPVVSEHRKQIDDLKKFKNDFRLQPSSTSESMDQLLNKNREGEKSRDLIKDKIEPSAKDSFIENSSSNCTSGSSKPNSPSISPSILSNTEHKRGPEVTSQGVQTSSPACKQEKDDKEEKKDAAEQVRKSTLNPNAKEFNPRSFSQPKPSTTPTSPRPQAQPSPSMVGHQQPTPVYTQPVCFAPNMMYPVPVSPGVQPLYPIPMTPMPVNQAKTYRAVPNMPQQRQDQHHQSAMMHPASAAGPPIAATPPAYSTQYVAYSPQQFPNQPLVQHVPHYQSQHPHVYSPVIQGNARMMAPPTHAQPGLVSSSATQYGAHEQTHAMYVSTGSLAQQYAHPNATLHPHTPHPQPSATPTGQQQSQHGGSHPAPSPVQHHQHQAAQALHLASPQQQSAIYHAGLAPTPPSMTPASNTQSPQNSFPAAQQTVFTIHPSHVQPAYTNPPHMAHVPQAHVQSGMVPSHPTAHAPMMLMTTQPPGGPQAALAQSALQPIPVSTTAHFPYMTHPSVQAHHQQQL

SEQ ID NO: 43820 - protein, 524 aa, Homo sapiens [sequence omitted]

SEQ ID NO: 43821 - protein, 404 aa, Homo sapiens
MCATHPNIVQIIEVFANSVQFPHESSPRARLLIVMEMMEGGELFHRISQHRHFTEKQASQVTKQIALALRHCHLLNIAHRDLKPENLLFKDNSLDAPVKLCDFGFAKIDQGDLMTPQFTPYYVAPQVLEAQRRHQKEKSGIIPTSPTPYTYNKSCDLWSLGVIIYVMLCGYPPFYSKHHSRTIPKDMRRKIMTGSFEFPEEEWSQISEMAKDVVRKLLKVKPEERLTIEGVLDHPWLNSTEALDNVLPSAQLMMDKAVVAGIQQAHAEQLANMRIQDLKVSLKPLHSVNNPILRKRKLLGTKPKDSVYIHDHENGAEDSNVALEKLRDVIAQCILPQAGENEDEKLNEVMQEAWKYNRECKLLRDTLQSFSWNGRGFTDKVDRLKLAEIVKQVIEEQTTSHESQ

SEQ ID NO: 43822 - protein, 209 aa, Homo sapiens
MTPVFCLGNTSECFQNFSQSHKCILMHSPPSAMAELPPSANTSVCSTLYFYGIAIFLGSFVLSLLTIMVLLIRAQTLYKKFVKSTGFLGSEQWAVIHIVDQRVRFYPVAFFCCWGPAVILMIIKLTKPQDTKLHMALYVLQALTATSQGLLNCGVYGWTQHKFHQLKQEARRDADTQTPLLCSQKRFYSRGLNSLESTLTFPASTSTIF

SEQ ID NO: 43823 - protein, 49 aa, Homo sapiens
MAAAVPRAAFLSPLLPLLLGFLLLSAPHGGSGLHTKGALPLDTVTFYKN

SEQ ID NO: 43824 - protein, 4272 aa, Homo sapiens
MGLLLVFPLIQSQSRTDPSLCNITAEVLLNCLRDCQPLSLTKEPADCLNGIETLLCSWLEETSDTGRHIPHKQKENAAAALVALACARGSLKTFVHTVHLLQKQTDLGSLPVADVLYRLLLLEGGPGSPSCLLGGKHIVSWGYEDMLPAPDSNTGSSSENKDADLGRCLTADGLYLYTTNSVGRGVSKLGSGLHGTLRGFVYCRNEELEPGWVAFGSGSLLHRPVSFDNKPHSLFQVIDQNTLQVCQVVPMPANHLPIGSTMSTVHLSSDGTYFYWIWSPASLNEKTPKGHSVFMDIFELVVENGVFVANPLQERTILMRKEGESAKSINEMLLSRLSRYRASPSATLAALTGSTISNTLKEDQAANTSCGLPLKMLRKTPIYTCGTYLVMLVPPPGGSGSSATRSLFGGTSGLSSLKILASSLVYNISDGQFTSRADLIDAAGSSLGRGALVPGLGACYDTVNNMLWTCSNDYIDQWCNPGNQAFHYVCQRLGVSHIITEPKEEAITTNEVINQLLHHVGAMCIHQLNLLATNPNLPITSVLGKQHPIEAHHLSSICDIMEKAMVNGDTCIIRCILVVFQVVFKFFFSPQTERNRDIIRRSGLLLWQLLMAPKDQICPEIQKEVCLAISSGLNILYPGETEINNLLKLVLTEGERNSGLSQLRDVILTNLAEQLQNNRFGSDEDDHYRLNDELLHYILKIVVRESCILITKCQTVSKDDFQKLLSTVPAASSCLRYLMAVQNHLLSNTILIKPDENDDSDSSLQGETLKELKVSILALATQILTGCDEVLEMLQQVTTALINSDIADREQRLKGLEQVTKATMLGHLLPVLLTSLMHPNLQTLIMADALMPQLVQLVLYTSQTALLLKTQCPVFAEVGCSPCGAPDQKCRLFPDERMLEEKEEPGFLTGLKIPAPWAAGKTVETVHPVRDNYKFKETVHIPGARCLYLRFDSRCSSQYDYDKLVIYAGPNTNSRKVAEYGGNTLGYGSRSVLGTGWPKDLVKVEGDTVTFSFEMRSGREHNTPDKAMWGFACTVRAQESSEDVSGGLPFLVDLALGLSVLACSMLRILYNGPEITKEEEACQELLRSKLLQRCQWQVEANGVISPALTPSPSPLPLTIEEDREFTYPSDVLVPPVGNYFDLPRIRLPPGIMIKLREISGRARPQFRPSIKEVIQPDVMEEMVVSCVIKHLNLVDALQSLINFQYQEEHAEEYDLLCKIMGETFKKLNAMERQLQSVAELEQKWQSEVDDAMQGKLENNMPFFYDYHFNENKMKELELLCSMKEVSFDGNDLENMVLSLREKFLQEVNSLIQKPSHPLAKTKTLVKSLMNRAELLLHVTIAAQSGLTRSISGTPAETPACKSASETKVISHAVRQPVFLRSMSAPSDLEMIGNEDLEFTRANQRRRHVTSHRSSSFTLLQSLAIEDSRDKPTYSVLLGQLFAFIGTNPDQAVSSSSFLLAAQTRWRRGNTRKQALVHMRELLTAAVRVGGVTHLVGPVTMVLQGGPRIEELTCGGMVEQVQEAFGETMTSVVSLCARYPIACANSIGLLCTIPYTRSEEKCLVRSGLVQLMDRLCSLSNQTESSSSEKQTKKQKVATMAWAAFQVLANRCVEWEKEEGGSTEAVHSGLARQVSSLLTNHLARATECCGNQAAGNDALQDVLSLLNDLSRSHIGKAILSQPACVSKLLSLLLDQRPSPKLVLIILQLCRAALPLMSVEDCGNVELPPWSYSVPSLNSEQEDPSDPASKIASLLLAKLADYVVPGCQTVLSPTASEPDTTLTKTSPKNSLKGDKDPGEESEAVDGKLSIFIHKREDQSSHEVLQPLLSSSEGRPFRLGTGANMEKVVKMDRDMTKGGCCEVITEEAAAALRKATKWAQSGLIVSIGPPVESINPETVSGLSTGDKKKTAQTSICRERNSELARTDPVRPFISGHVANSMAAEVIALLHSLLMAPESNAAQIWTTTAEKVLSRALMYIPQLGKYAESILENGSSSGRKLAKLQRIARQAVAALCALGGFKETIKIGSEVQVLGRGISGSIGVVASINEQEGIATVRFPPIDCRKTSQASDTLTIPLSRLCVPRSEALPLHKLSITEKVVQAVQSMLLPQEGSLSIHTSLPATGDGSAPVMAVVRLLAEIRTRACLVMAQLLEDSLFCEEFIQQCPAAVEVLNLVAQECSAGERLAVVEVQCERLRMLYRDCARPPPPPLQADRRQPKEITWSPSRVFPPVRACMFSSHLTSVTFLADPSAGGGLPRGTFIYATSPLPVQAPSFYWEIEIVSYGDTDDDTGPIVSFGFTTEAEKRDGAWTNPVGTCLFHNNGRAVHYNGSSLLQWKSVRLDVTLSPGDVAGIGWERTEGTPPPPGQPAKGRVYFTYCGQRLSPYLEDVSGGMWPVVHIQKKNTKTRANFGSRPFAYAEGQAHRNAADLCTDLAEEISANFEALPFAMASDSDNDAGTSIASDPGTHGPPCRIAAVATAQQQYDSDTSCHYKVELSYENFITSGPDPHPPPIADDESDDDDDDDIPQEDHYALLVKAWETKVFPTIRRRFRNEAERKSGLDQIKGALQLGMVDIARQTVEFLYEENGGIPRDLYLPTIEDIKDEANKFTIDKVRKGLTVVTRSPDSNNVASSAVGTALPKFAIRGMLKTFGLHGVVLDVDSVNELVQVETYLRSEGVLVRYWYPIDMLERPPAGYRRTATNGLVTLDNTNLQIHRELLRCEAALARLYCRMALLNIFAPKLPHLFTRLFHIPAIRDITLEHLQLLSNQLLAPPLPDGTISSSSILLAQSLQHCIHSQNCSATDLFYQGNSQTVREWLNVAITRTLHQGEESLLELTKQICSFLQTAPEQFPSEEFPISESKVNMDVNFPGAAFVVVSCKESQSGFRKDSSLYKAPWARVLVYGLGHKVKRNGQLNLIEAACYPRDASPANTGLAPPPTADQYPSVVLSTDRVHIKLGVSPPPGAVLVLHSLPLEFPLAMAFAEQLLSWKSEDSEGKSEDEPDTIPTSVLLQVVELLGNFLWTTDMAACVKELVFHLLAELLRTVHTLEQRRHPAGLSSSIALQLNPCLAMLMALQSELHKLYDEETQNWVSGGACGGSGGAAAGDQGRFSTYFHALMEGCLAVAEVTLPTNMSVTASGVTSATAPNLSDSSSSSSSSPGQTPQSPSLLSKRKKVKMKREKASSSGKRQSSRTVDSDPTVLSIGGSKPEDMLWFHRALTLLIILRHLTRKDPQGLGVTSDAIADACQALVGPTAHSRLLVISGIPTHLDEGVVRGAIRKACNAHGGVFKDEIYIPLQEEDTKKPKDKAEGGDGKVEPEKTLAFPGTDSMEVSTSSSLTPAMSISASASTSQASICSSQGISQTVSDLSVDPLPAGLELPIPPGLLEPHAVSSQESLDISLCSTGSLGSLGSLGEPLDNAETASVSDMGSMYTVTSLDNQPLAARPIKGFAVVEIRSRAKIEKIRASLFNNNDLIGLSSLDGEDELMEMSTEEILTVSVVNQSLFDTQGSPGLEDYFNDKSIKGEKLVPGAREVLTEIFKSCAHSEQTLSLTPAKPIRVSDIYLSKEQINSQTPGNLLHLFFTNVRPPKKVLEDQLTQILRKYGVPKPKFDKSKYSKAGKEQHPVKVVSTKRPITKPPAKDKAVLNSVSRTALSEKKPTVKPKSPEKSKPDEKDPEKSPTKKQEVPEEKYLTLEGFHKFVIDRARQDIRSVWRAILSCGYDLHFERCACIDVRHAQKASRKWTLEMDVALVQYINQLCRHLAITPARLHPHEVYLDPADAADPRVACLLNVPIESLRLRFALLQSLNTTLETFFLPLVELRQTPMYTHSIAALLKEAKGLIFYDTKVTVMNRVLNATVQRTADHAAPEITLDPLEIVGGEIRASENSYFCQAARQLASVPSSQLCVKLASGGDPTYAFNIRFTGEEVHGTSGSFRHFLWQVCKELQSSSLSLLLLCPSSAVNKNKGKYILTPSPITYGEEQLLHFLGQLLGIAIRADVPLPLDLLPSFWKTLVGEPLDPEQDLQEADILTYNYVKKFESINDETELEALCAEIASQHLATESPDSPNKPCCRFTYLTMTGEEVELCSRGRHILVAWENKDIYAAAIRSLRLRELQNVECVTAVRAGLGSIIPLQLLTMLSPLEMELRTCGLPYINLEFLKAHTMYQVGLMETDQHIEFFWGALEMFTQEELCKFIKFACNQERIPFTCPCKDGGPDTAHVPPYPMKIAPPDGTAGSPDSRYIRVETCMFMIKLPQYSSLEIMLEKLRCAIHYREDPLSG

SEQ ID NO: 43825 - protein, 617 aa, Homo sapiens
MEKAMVNGDTCIIRCILVVFQVVFKFFFSPQTERNRDIIRRSGLLLWQLLMAPKDQICPEIQKEVCLAISSGLNILYPGETEINNLLKLVLTEGERNSGLSQLRDVILTNLAEQLQNNRFGSDEDDHYRLNDELLHYILKIVVRESCILITKCQTVSKDDFQKLLSTVPAASSCLRYLMAVQNHLLSNTILIKPDENDDSDSSLQGETLKVQELKVSILALATQILTGCDEVLEMLQQVTTALINSDIADREQRLKGLEQVTKATMLGHLLPVLLTSLMHPNLQTLIMADALMPQLVQLVLYTSQTALLLKTQCPVFAEVGCSPCGAPDQKCRLFPDERMLEEKEEPGFLTGLKIPAPWAAGKTVETVHPVRDNYKFKETVHIPGARCLYLRFDSRCSSQYDYDKLVIYAGPNTNSRKVAEYGGNTLGYGSRSVLGTGWPKDLVKVEGDTVTFSFEMRSGREHNTPDKAMWGFACTVRAQESSEDVSGGLPFLVDLALGLSVLACSMLRILYNGPEITKEEEACQELLRSKLLQRCQWQVEANGVISPALTPSPSPLPLTIEEDREFTYPSDVLVPPVGNYFDLPRIRLPPGIMIKLREISGRARPQFRPSIKYVAV

SEQ ID NO: 43826 - protein, 423 aa, Homo sapiens [sequence omitted]

SEQ ID NO: 43827 - protein, 427 aa, Homo sapiens
MIRCQELKYDVGGGERFDSLTDLVEHYKKNPMVETLGTVLQLKQPLNTTRINAAEIESRVRELSKLAETTDKVKQGFWEEFETLQQQECKLLYSRKEGQRQENKNKNRYKNILPFDHTRVVLHDGDPNEPVSDYINANIIMPEFETKCNNSKPKKSYIATQGCLQNTVNDFWRMVFQENSRVIVMTTKEVERGKSKCVKYWPDEYALKEYGVMRVRNVKESAAHDYTLRELKLSKVGQALLQGNTERTVWQYHFRTWPDHGVPSDPGGVLDFLEEVHHKQESIMDAGPVVVHCSAGIGRTGTFIVIDILIDIIREKGVDCDIDVPKTIQMVRSQRSGMVQTEAQYRFIYMAVQHYIETLQRRIEEEQKSKRKGHEYTNIKYSLADQTSGDQSPLPPCTPTPPCAEMREDSARVYENVGLMQQQKSFR

SEQ ID NO: 43828 - protein, 987 aa, Homo sapiens [sequence omitted]

SEQ ID NO: 43829 - protein, 565 aa, Homo sapiens [sequence omitted]

SEQ ID NO: 43830 - protein, 739 aa, Homo sapiens [sequence omitted]

SEQ ID NO: 43831 - protein, 719 aa, Homo sapiens [sequence omitted]

SEQ ID NO: 43832 - protein, 2076 aa, Homo sapiens
MDKNFVRIGKWFVRPYEKDEKPVNKSEHLSCAFTFFLHGESNVCTSVEIAQHQPIYLINEEHIHMAQSSPAPFQVLVSPYGLNGTLTGQAYKMSDPATRKLIEEWQYFYPMVLKKKEESKEEDELGYDDDFPVAVEVIVGGVRMVYPSAFVLISQNDIPVPQSVASAGGHIAVGQQGLGSVKDPSNCGMPLTPPTSPEQAILGESGGMQSAASHLVSQDGGMITMHSPKRSGKIPPKLHNHMVHRVWKECILNRTQSKRSQMSTPTLEEEPASNPATWDFVDPTQRVSCSCSRHKLLKRCAVGPNRPPTVSQPGFSAGPSSSSSLPPPASSKHKTAERQEKGDKLQKRPLIPFHHRPSVAEELCMEQDTPGQKLGLAGIDSSLEVSSSRKYDKQMAVPSRNTSKQMNLNPMDSPHSPISPLPPTLSPQPRGQETESLDPPSVPVNPALYGNGLELQQLSTLDDRTVLVGQRLPLMAEVSETALYCGIRPSNPESSEKWWHSYRLPPSDDAEFRPPELQGERCDAKMEVNSESTALQRLLAQPNKRFKIWQDKQPQLQPLHFLDPLPLSQQPGDSLGEVNDPYTFEDGDIKYIFTANKKCKQGTEKDSLKKNKSEDGFGTKDVTTPGHSTPVPDGKNAMSIFSSATKTDVRQDNAAGRAGSSSLTQVTDLAPSLHDLDNIFDNSDDDELGAVSPALRSSKMPAVGTEDRPLGKDGRAAVPYPPTVADLQRMFPTPPSLEQHPAFSPVMNYKDGISSETVTALGMMESPMVSMVSTQLTEFKMEVEDGLGSPKPEEIKDFSYVHKVPSFQPFVGSSMFAPLKMLPSHCLLPLKIPDACLFRPSWAIPPKIEQLPMPPAATFIRDGYNNVPSVGSLADPDYLNTPQMNTPVTLNSAAPASNSGAGVLPSPATPRFSVPTPRTPRTPRTPRGGGTASGQGSVKYDSTDQGSPASTPSTTRPLNSVEPATMQPIPEAHSLYVTLILSDSVMNIFKDRNFDSCCICACNMNIKGADVGLYIPDSSNEDQYRCTCGFSAIMNRKLGYNSGLFLEDELDIFGKNSDIGQAAERRLMMCQSTFLPQVEGTKKPQEPPISLLLLLQNQHTQPFASLNFLDYISSNNRQTLPCVSWSYDRVQADNNDYWTECFNALEQGRQYVDNPTGGKVDEALVRSATVHSWPHSNVLDISMLSSQDVVRMLLSLQPFLQDAIQKKRTGRTWENIQHVQGPLTWQQFHKMAGRGTYGSEESPEPLPIPTLLVGYDKDFLTISPFSLPFWERLLLDPYGGHRDVAYIVVCPENEALLEGAKTFFRDLSAVYEMCRLGQHKPICKVLRDGIMRVGKTVAQKLTDELVSEWFNQPWSGEENDNHSRLKLYAQVCRHHLAPYLATLQLDSSLLIPPKYQTPPAAAQGQATPGNAGPLAPNGSAAPPAGSAFNPTSNSSSTNPAASSSASGSSVPPVSSSASAPGISQISTTSSSGFSGSVGGQNPSTGGISADRTQGNIGCGGDTDPGQSSSQPSQDGQESVTERERIGIPTEPDSADSHAHPPAVVIYMVDPFTYAAEEDSTSGNFWLLSLMRCYTEMLDNLPEHMRNSFILQIVPCQYMLQTMKDEQVFYIQYLKSMAFSVYCQCRRPLPTQIHIKSLTGFGPAASIEMTLKNPERPSPIQLYSPPFILAPIKDKQTELGETFGEASQKYNVLFVGYCLSHDQRWLLASCTDLHGELLETCVVNIALPNRSRRSKVSARKIGLQKLWEWCIGIVQMTSLPWRVVIGRLGRLGHGELKDWSILLGECSLQTISKKLKDVCRMCGISAADSPSILSACLVAMEPQGSFVVMPDAVTMGSVFGRSTALNMQSSQLNTPQDASCTHILVFPTSSTIQVAPANYPNEDGFSPNNDDMFVDLPFPDDMDNDIGILMTGNLHSSPNSSPVPSPGSPSGIGVGSHFQHSRSQGERLLSREAPEELKQQPLALGYFVSTAKAENLPQWFWSSCPQAQNQCPLFLKASLHHHISVAQTDELLPARNSQRVPHPLDSKTTSDVLRFVLEQYNALSWLTCNPATQDRTSCLPVHFVVLTQLYNAIMNIL

SEQ ID NO: 43833 - protein, 619 aa, Homo sapiens
MEVVPALAEEAAPEVAGLSCLVNLPGEVLEYILCCGSLTAADIGRVSSTCRRLRELCQSSGKVWKEQFRVRWPSLMKHYSPTDYVNWLEEYKVRQKAGLEARKIVASFSKRFFSEHVPCNGFSDIENLEGPEIFFEDELVCILNMEGRKALTWKYYAKKILYYLRQQKILNNLKAFLQQPDDYESYLEGAVYIDQYCNPLSDISLKDIQAQIDSIVELVCKTLRGINSRHPSLAFKAGESSMIMEIELQSQVLDAMNYVLYDQLKFKGNRMDYYNALNLYMHQVLIRRTGIPISMSLLYLTIARQLGVPLEPVNFPSHFLLRWCQGAEGATLDIFDYIYIDAFGKGKQLTVKECEYLIGQHVTAALYGVVNVKKVLQRMVGNLLSLGKREGIDQSYQLLRDSLDLYLAMYPDQVQLLLLQARLYFHLGIWPEKSFCLVLKVLDILQHIQTLDPGQHGAVGYLVQHTLEHIERKKEEVGVEVKLRSDEKHRDVCYSIGLIMKHKRYGYNCVIYGWDPTCMMGHEWIRNMNVHSLPHGHHQPFYNVLVEDGSCRYAAQENLEYNVEPQEISHPDVGRYFSEFTGTHYIPNAELEIRYPEDLEFVYETVQNIYSAKKENIDE

SEQ ID NO: 43834 - protein, 477 aa, Homo sapiens
MKHYSPTDYVNWLEEYKVRQKAGLEARKIVASFSKRFFSEHVPCNGFSDIENLEGPEIFFEDELVCILNMEGRKALTWKYYAKKILYYLRQQKILNNLKAFLQQPDDYESYLEGAVYIDQYCNPLSDISLKDIQAQIDSIVELVCKTLRGINSRHPSLAFKAGESSMIMEIELQSQVLDAMNYVLYDQLKFKGNRMDYYNALNLYMHQVLIRRTGIPISMSLLYLTIARQLGVPLEPVNFPSHFLLRWCQGAEGEGIDQSYQLLRDSLDLYLAMYPDQVQLLLLQARLYFHLGIWPEKVLDILQHIQTLDPGQHGAVGYLVQHTLEHIERKKEEVGVEVKLRSDEKHRDVCYSIGLIMKHKRYGYNCVIYGWDPTCMMGHEWIRNMNVHSLPHGHHQPFYNVLVEDGSCRYAAQENLEYNVEPQEISHPDVGRYFSEFTGTHYIPNAELEIRYPEDLEFVYETVQNIYSAKKENIDE

SEQ ID NO: 43835 - protein, 612 aa, Homo sapiens [sequence omitted]

SEQ ID NO: 43836 - protein, 1942 aa, Homo sapiens
MKKKALLAQEQVSFFEEERNILSRSTSPWIPQLQYAFQDKNHLYLVMEYQPGGDLLSLLNRYEDQLDENLIQFYLAELILAVHSVHLMGYVHRDIKPENILVDRTGHIKLVDFGSAAKMNSNKMVNAKLPIGTPDYMAPEVLTVMNGDGKGTYGLDCDWWSVGVIAYEMIYGRSPFAEGTSARTFNNIMNFQRFLKFPDDPKVSSDFLDLIQSLLCGQKERLKFEGLCCHPFFSKIDWNNIRNSPPPFVPTLKSDDDTSNFDEPEKNSWVSSSPCQLSPSGFSGEELPFVGFSYSKALGILGRSESVVSGLDSPAKTSSMEKKLLIKSKELQDSQDKCHKMEQEMTRLHRRVSEVEAVLSQKEVELKASETQRSLLEQDLATYITECSSLKRSLEQARMEVSQEDDKALQLLHDIREQSRKLQEIKEQEYQAQVEEMRLMMNQLEEDLVSARRRSDLYESELRESRLAAEEFKRKATECQHKLLKAKDQGKPEVGEYAKLEKINAEQQLKIQELQEKLEKAVKASTEATELLQNIRQAKERAERELEKLQNREDSSEGIRKKLVEAEERRHSLENKVKRLETMERRENRLKDDIQTKSQQIQQMADKILELEEKHREAQVSAQHLEVHLKQKEQHYEEKIKVLDNQIKKDLADKETLENMMQRHEEEAHEKGKILSEQKAMINAMDSKIRSLEQRIVELSEANKLAANSSLFTQRNMKAQEEMISELRQQKFYLETQAGKLEAQNRKLEEQLEKISHQDHSDKNRLLELETRLREVSLEHEEQKLELKRQLTELQLSLQERESQLTALQAARAALESQLRQAKTELEETTAEAEEEIQALTAHRDEIQRKFDALRNSCTVITDLEEQLNQLTEDNAELNNQNFYLSKQLDEASGANDEIVQLRSEVDHLRREITEREMQLTSQKQTMEALKTTCTMLEEQVMDLEALNDELLEKERQWEAWRSVLGDEKSQFECRVRELQRMLDTEKQSRARADQRITESRQVVELAVKEHKAEILALQQALKEQKLKAESLSDKLNDLEKKHAMLEMNARSLQQKLETERELKQRLLEEQAKLQQQMDLQKNHIFRLTQGLQEALDRADLLKTERSDLEYQLENIQVLYSHEKVKMEGTISQQTKLIDFLQAKMDQPAKKKKGLFSRRKEDPALPTQVPLQYNELKLALEKEKARCAELEEALQKTRIELRSAREEAAHRKATDHPHPSTPATARQQIAMSAIVRSPEHQPSAMSLLAPPSSRRKESSTPEEFSRRLKERMHHNIPHRFNVGLNMRATKCAVCLDTVHFGRQASKCLECQVMCHPKCSTCLPATCGLPAEYATHFTEAFCRDKMNSPGLQTKEPSSSLHLEGWMKVPRNNKRGQQGWDRKYIVLEGSKVLIYDNEAREAGQRPVEEFELCLPDGDVSIHGAVGASELANTAKADVPYILKMESHPHTTCWPGRTLYLLAPSFPDKQRWVTALESVVAGGRVSREKAEADAKLLGNSLLKLEGDDRLDMNCTLPFSDQVVLVGTEEGLYALNVLKNSLTHVPGIGAVFQIYIIKDLEKLLMIAGEERALCLVDVKKVKQSLAQSHLPAQPDISPNIFEAVKGCHLFGAGKIENGLCICAAMPSKVVILRYNENLSKYCIRKEIETSEPCSCIHFTNYSILIGTNKFYEIDMKQYTLEEFLDKNDHSLAPAVFAASSNSFPVSIVQVNSAGQREEYLLCFHEFGVFVDSYGRRSRTDDLKWSRLPLAFAYREPYLFVTHFNSLEVIEIQARSSAGTPARAYLDIPNPRYLGPAISSGAIYLASSYQDKLRVICCKGNLVKESGTEHHRGPSTSRSSPNKRGPPTYNEHITKRVASSPAPPEGPSHPREPSTPHRYREGRTELRRDKSPGRPLEREKSPGRMLSTRRERSPGRLFEDSSRGRLPAGAVRTPLSQVNKVWDQSSV

SEQ ID NO: 43837 - protein, 255 aa, Homo sapiens [sequence omitted]

SEQ ID NO: 43838 - protein, 73 aa, Homo sapiens
MVEYLRKEDMEYALRKLDDTKFRSHEGETSYIRVYPERSTSYGYSRSRSGSRGRDSPYQSRGSPHYFSPFRPY

SEQ ID NO: 43839 - protein, 307 aa, Homo sapiens [sequence omitted]

SEQ ID NO: 43840 - protein, 722 aa, Homo sapiens
MPPQRGGGSSKLFSSSFNGGRRDEVAEAQRAEFSPAQFSGPKKINLNHLLNFTFEPRGQTGHFEGSGHGSWGKRNKWGHKPFNKELFLQANCQFVVSEDQDYTAHFADPDTLVNWDFVEQVRICSHEVPSCPICLYPPTAAKITRCGHIFCWACILHYLSLSEKTWSKCPICYSSVHKKDLKSVVATESHQYVVGDTITMQLMKREKGVLVALPKSKWMNVDHPIHLGDEQHSQYSKLLLASKEQVLHRVVLEEKVALEQQLAEEKHTPESCFIEAAIQELKTREEALSGLAGSRREVTGVVAALEQLVLMAPLAKESVFQPRKSLLQQGVLEYLSAFDEETTEVCSLDTPSRPLALPLVEEEEAVSEPEPEGLPEACDDLELADDNLKEGTICTESSQQEPITKSGFTRLSSSPCYYFYQAEDGQHMFLHPVNVRCLVREYGSLERSPEKISATVVEIAGYSMSEDVRQRHRYLSHLPLTCEFSICELALQPPVVSKETLEMFSDDIEKRKRQRQKKAREERRRERRIEIEENKKQGKYPEVHIPLENLQQFPAFNSYTCSSDSALGPTSTEGHGALSISPLSRSPGSHADFLLTPLSPTASQGSPSFCVGSLEEDSPFPSFAQMLRVGKAKADVWPKTAPKKDENSLVPPAPVDSDGESDNSDRVPVPSFQNSFSQAIEAAFMKLDTPATSDPLSEEKGGKKRKKQKQKLLFSTSVVHTK

SEQ ID NO: 43841 - protein, 1219 aa, Homo sapiens
MPDPDFTVRDVKLLVGSRRLVDVMDVNTQKGTEMSMSQFVRYYETPEAQRDKLYNVISLEFSHTKLEHLVKRPTVVDLVDWVDNMWPQHLKEKQTEATNAIAEMKYPKVKKYCLMSVKGCFTDFHIDFGGTSVWYHVFRGGKIFWLIPPTLHNLALYEEWVLSGKQSDIFLGDRVERCQRIELKQGYTFFIPSGWIHAVYTPVDSLVFGGNILHSFNVPMQLRIYEIEDRTRVQPKFRYPFYYEMCWYVLERYVYCVTQRSHLTQEYQRESMLIDAPRKPSIDGFSSDSWLEMEEEACDQQPQEEEEKDEEGEGRDRAPKPPTDGSTSPTSTPSEDQEALGKKPKAPALRFLKRTLSNESEESVKSTTLAVDYPKTPTGSPATEVSAKWTHLTEFELKGLKALVEKLESLPENKKCVPEGIEDPQALLEGVKNVLKEHADDDPSLAITGVPVVTWPKKTPKNRAVGRPKGKLGPASAVKLAANRTTAGARRRRTRCRKCEACLRTECGECHFCKDMKKFGGPGRMKQSCIMRQCIAPVLPHTAVCLVCGEAGKEDTVEEEEGKFNLMLMECSICNEIIHPGCLKIKESEGVVNDELPNCWECPKCNHAGKTGKQKRGPGFKYASNLPGSLLKEQKMNRDNKEGQEPAKRRSECEEAPRRRSDEHSKKVPPDGLLRRKSDDVHLRKKRKYEKPQELSGRKRASSLQTSPGSSSHLSPRPPLGSSLSPWWRSSLTYFQQQLKPGKEDKLFRKKRRSWKNAEDRMALANKPLRRFKQEPEDELPEAPPKTRESDHSRSSSPTAGPSTEGAEGPEEKKKVKMRRKRRLPNKELSRELSKELNHEIQRTENSLANENQQPIKSEPESEGEEPKRPPGICERPHRFSKGLNGTPRELRHQLGPSLRSPPRVISRPPPSVSPPKCIQMERHVIRPPPISPPPDSLPLDDGAAHVMHREVWMAVFSYLSHQDLCVCMRVCRTWNRWCCDKRLWTRIDLNHCKSITPLMLSGIIRRQPVSLDLSWTNISKKQLSWLINRLPGLRDLVLSGCSWIAVSALCSSSCPLLRTLDVQWVEGLKDAQMRDLLSPPTDNRPGQMDNRSKLRNIVELRLAGLDITDASLRLIIRHMPLLSKLHLSYCNHVTDQSINLLTAVGTTTRDSLTEINLSDCNKVTDQCLSFFKRCGNICHIDLRYCKQVTKEGCEQFIAEMSVSVQFGQVEEKLLQKLS

SEQ ID NO: 43842 - protein, 231 aa, Homo sapiens
MQALSWRKLYLSRAKLKASSRTSALLSGFAMVAMVEVQLDADHDYPPGLLIAFSACTTVLVAVHLFALMISTCILPNIEAVSNVHNLNSVKESPHERMHRHIELAWAFSTVIGTLLFLAEVVLLCWVKFLPLKKQPGQPRPTSKPPASGAAANVSTSGITPGQAAAIASTTIMVPFGLIFIVFAVHFYRSLVSHKTDRQFQELNELAEFARLQDQLDHRGDHPLTPGSHYA

SEQ ID NO: 43843 - protein, 753 aa, Homo sapiens
MPQDELGQERRDLEPENREEGQERRVSDIQSKAGISRESLVSSTTEDILFQKDKSTPVYPLTMTWSFGWNSSLPVYYIREERQRVLLYVCAHTAIIYNVFRNNQYHLQGHANIISCLCVSEDRRWIATADKGPDCLVIIWDSFTGIPVHTIFDSCPEGNGIMAMAMTHDAKYLATISDAEVQKVCIWKWTLAVETPACTLELPTEYGVQNYVTFNPTNNKELVSNSKTRAIYYAWYEERDTLAHSAPLLTEKTFNKLVGKFSQSIFHLNLTQILSATMEGKLVVWDIHRPPSSASTFLGFPYIKPCKLVHLQKEGITVLTTIDSYIVTGDIKGNIKFYDHTLSIVNWYSHLKLGAIRTLSFSKTPATPPTEKSNYPPDCTLKGDLFVLRNFIIGTSDAAVYHLTTDGTKLEKLFVEPKDAICAISCHPYQPLIAIGSICGMIKVWNYENKQYLFSRVFEKGLGVQSLTYNPEGALLGAGFTEGTVYILDAMSLENESPEPFKYSRTSVTHISFSHDSQYMATADRSFTVAVYMLVVRNGQRVWEYLARLRSHRKSIRSLLFGVYLDSNEPRLLSLGTDRLLIEYDLLRSYKDHLEVLDIHHTDQGCYPTCMVWYPPLTRELFLLICNSGYKVKLFNATTKMCRKTLLGPAYGSPIEQTQVLPVRSMAELQKRYLVFINRDKVGLQILPVDGNPHKTSAIVCHPNGVAGMAVSYDGCYAFTAGGHDRSVVQWKITLSHPGSQAPILSPSDTSRS

SEQ ID NO: 43844 - protein, 363 aa, Homo sapiens
MEEDPLLDTDMLMSEFSDTLFSTLSSHQPVAWPNPREIAHLGNADMIQPGLIPLQPNLDFMDTFEPFQDLFSSSRSIFGSMLPASASAPVPDPNNPPAQESILPTTALPTVSLPDSLIAPPTAPSLAHMDEQGCEHTSRTEDPFIQPTDFGPSEPPLSVPQPFLPVFTMPLLSPSPAPPPISPVLPLVPPPATALNPPAPPTFHQPQKFAGVNKAPSVITHTASATLTHDAPATTFSQSQGLVITTHHPAPSAAPCGLALSPVTRPPQPRLTFVHPKPVSLTGGRPKQPHKIVPAPKPEPVSLVLKNARIAPGEPGGETQCGAPPDPEGCFPIPKAFKLVTTTTTLVCTCMRTHIHLNETKVS

SEQ ID NO: 43845 - protein, 1237 aa, Homo sapiens
MVSSSPSTPSNIPQKPSQPAAKEPSATPPISNLTKTASESISNLSEAGSIKKGERELKIGDRVLVGGTKAGVVRFLGETDFAKGEWCGVELDEPLGKNDGAVAGTRYFQCQPKYGLFAPVHKVTKIGFPSTTPAKAKANAVRRVMATTSASLKRSPSASSLSSMSSVASSVSSRPSRTGLLTETSSRYARKISGTTALQEALKEKQQHIEQLLAERDLERAEVAKATSHVGEIEQELALARDGHDQHVLELEAKMDQLRTMVEAADREKVELLNQLEEEKRKVEDLQFRVEEESITKGDLEVATVSEKSRIMELEKDLALRVQEVAELRRRLESNKPAGDVDMSLSLLQEISSLQEKLEVTRTDHQREITSLKEHFGAREETHQKEIKALYTATEKLSKENESLKSKLEHANKENSDVIALWKSKLETAIASHQQAMEELKVSFSKGLGTETAEFAELKTQIEKMRLDYQHEIENLQNQQDSERAAHAKEMEALRAKLMKVIKEKENSLEAIRSKLDKAEDQHLVEMEDTLNKLQEAEIKVKELEVLQAKCNEQTKVIDNFTSQLKATEEKLLDLDALRKASSEGKSEMKKLRQQLEAAEKQIKHLEIEKNAESSKASSITRELQGRELKLTNLQENLSEVSQVKETLEKELQILKEKFAEASEEAVSVQRSMQETVNKLHQKEEQFNMLSSDLEKLRENLADMEAKFREKDEREEQLIKAKEKLENDIAEIMKMSGDNSSQLTKMNDELRLKERDVEELQLKLTKANENASFLQKSIEDMTVKAEQSQQEAAKKHEEEKKELERKLSDLEKKMETSHNQCQELKARYERATSETKTKHEEILQNLQKTLLDTEDKLKGAREENSGLLQELEELRKQADKAKAAQTAEDAMQIMEQMTKEKTETLASLEDTKQTNAKLQNELDTLKENNLKNVEELNKSKELLTVENQKMEEFRKEIETLKQAAAQKSQQLSALQEENVKLAEELGRSRDEVTSHQKLEEERSVLNNQLLEMKKRESKFIKDADEEKASLQKSISITSALLTEKDAELEKLRNEVTVLRGENASAKSLHSVVQTLESDKVKLELKVKNLELQLKENKRQLSSSSGNTDTQADEDERAQESQIDFLNSVIVDLQRKNQDLKMKVEMMSEAALNGNGDDLNNYDSDDQEKQSKKKPRLFCDICDCFDLHDTEDCPTQAQMSEDPPHSTHHGSRGEERPYCEICEMFGHWATNCNDDETF

SEQ ID NO: 43846 - protein, 152 aa, Homo sapiens
MPDVAKCRQWLEKNFPNEFAKLTVENSPKQEAGISEGQGTAGEEEEKKKQKRGGRGQIKQKKKTVPQKVTIAKIPRAKKKYVTRVCGLATFEIDLKEAQRFFAQKFSCGASVTGEDEIIIQGDFTDDIIDVIQEKWPEVDDDSIEDLGEVKK

SEQ ID NO: 43847 - protein, 1320 aa, Homo sapiens
MIQKKSRNETYGEGSGVEILENRPYTDGPGGSGQYTHKVYHVGMHIPSWFRSILPKAALRVVEESWNAYPYTRTRFTCPFVEKFSIDIETFYKTDAGENPDVFNLSPVEKNQLTIDFIDIVKDPVPHNEYKTEEDPKLFQSTKTQRGPLSENWIEEYKKQVFPIMCAYKLCKVEFRYWGMQSKIERFIHDTGLRRVMVRAHRQAWCWQDEWYGLSMENIRELEKEAQLMLSRKMAQFNEDGEEATELVKHEAVSDQTSGEPPEPSSSNGEPLVGRGLKKQWSTSSKSSRSSKRGASPSRHSISEWRMQSIARDSDESSDDEFFDAHEDLSDTEEMFPKDITKWSSNDLMDKIESPEPEDTQDGLYRQGAPEFRVASSVEQLNIIEDEVSQPLAAPPSKIHVLLLVLHGGTILDTGAGDPSSKKGDANTIANVFDTVMRVHYPSALGRLAIRLVPCPPVCSDAFALVSNLSPYSHDEGCLSSSQDHIPLAALPLLATSSPQYQEAVATVIQRANLAYGDFIKSQEGMTFNGQVCLIGDCVGGILAFDALCYSNQPVSESQSSSRRGSVVSMQDNDLLSPGILMNAAHCCGGGGGGGGGGGSSGGGGSSGGSSLESSRHLSRSNVDIPRSNGTEDPKRQLPRKRSDSSTYELDTIQQHQAFLSSLHASVLRTEPCSRHSSSSTMLDGTGALGRFDFEITDLFLFGCPLGLVLALRKTVIPALDVFQLRPACQQVYNLFHPADPSASRLEPLLERRFHALPPFSVPRYQRYPLGDGCSTLLVETVQRNPELVLEGGPLAPLPHGDGFLETSMPVPAPTWQDGPRPGCAESDVLQTHNAAFQEHGAPSSPGTAPASRGFRRASEISIASQVSGMAESYTASSIAQIAAKWWGQKRIDYALYCPDALTAFPTVALPHLFHASYWESTDVVSFLLRQVMRHDNSSILELDGKEVSVFTPSKPREKWQRKRTHVKLRNVTANHRINDALANEDGPQVLTGRFMYGPLDMVTLTGEKVDVHIMTQPPSGEWLYLDTLVTNNSGRVSYTIPESHRLGVGVYPIKMVVRGDHTFADSYITVLPKGTEFVVFSIDGSFAASVSIMGSDPKVRAGAVDVVRHWQDLGYLIIYVTGRPDMQKQRVVAWLAQHNFPHGVVSFCDGLVHDPLRHKANFLKLLISELHLRVHAAYGSTKDVAVYSAISLSPMQIYIVGRPTKKLQQQCQFITDGYAAHLAQLKYSHRARPARNTATRMALRKGSFGLPGQGDFLRSRNHLLRTISAQPSGPSHRHERTQSQADGEQRGQRSMSVAAGCWGRAMTGRLEPGAAAGPK

SEQ ID NO: 43848 - protein, 1031 aa, Homo sapiens
MGFFSLSSERNESVIHYPESTEPEIQQEMSTSQPDCNVDSCSVSSGYGTFCISELNLYKSKDPKEFMEHIDVPKGQYVAPAVPAESLVDGVKNENFYIQTPEECHVSLKEDVSISPGEFEHNFLGENKVSEVYSGKTNSNAITSWAQKLKQNQPKRAHVEDGGSRSKQGNEQSKKTPIEKSDFAAATHPRAFYLSKPDETPNAWMSDSGTGLTYWKLEEKDMHHSLPETLEKTFISLSSTDVSPNQSNTSNEMKLPSLKDIYYKKQRENKQLPERNLTSASNPNHPPEVLTLDPTLHMKPKQQISGIQPHGLPNALDDRISFSPDSVLEPSMSSPSDIDSFSQASNVTSQLPGFPKYPSHTKASPVDSWKNQTFQNESRTSSTFPSVYTITSNDISVNTVDEENTVMVASASVSQSQLPGTANSVPECISLTSLEDPVILSKIRQNLKEKHARHIADLRAYYESEINSLKQKLEAKEISGVEDWKITNQILVDRCGQLDSALHEATSRVRTLENKNNLLEIEVNDLRERFSAASSASKILQERIEEMRTSSKEKDNTIIRLKSRLQDLEEAFENAYKLSDDKEAQLKQENKMFQDLLGEYESLGKEHRRVKDALNTTENKLLDAYTQISDLKRMISKLEAQVKQVEHENMLSLRHNSRIHVRPSRANTLATSDVSRRKWLIPGAEYSIFTGQPLDTQDSNVDNQLEETCSLGHRSPLEKDSSPGSSSTSLLIKKQRETSDTPIMRALKELDEGKIFKNWGTQTEKEDTSNINPRQTETSVNASRSPEKCAQQRQKRLNSASQRSSSLPPSNRKSSTPTKREIMLTPVTVAYSPKRSPKENLSPGFSHLLSKNESSPIRFDILLDDLDTVPVSTLQRTNPRKQLQFLPLDDSEEKTYSEKATDNHVNHSSCPEPVPNGVKKVSVRTAWEKNKSVSYEQCKPVSVTPQGNDFEYTAKIRTLAETERFFDELTKEKDQIEAALSRMPSPGGRITLQTRLNQEALEDRLERINRELGSVRMTLKKFHVLRTSANL

SEQ ID NO: 43849 - protein, 350 aa, Homo sapiens
MPKVVRVLEILEVLVSRHHVAPELDELRLELDRLRLERMDRIEKERKHQKELELVEDVWRGEAQDLLSQIAQLQEENKQLMTNLSHKDVNFSEEEFQKHEGMSERERQVMKKLKEVVDKQRDEIRAKDRELGLKNEDVEALQQQQTRLMKINHDLRHRVTVVEAQGKALIEQKVELEADLQTKEQEMGSLRAELGKLRERLQGEHSQNGEEEPETEPVGEESISDAEKVAMDLKDPNRPRFTLQELRDVLHERNELKSKVFLLQEELAYYKSEEMEEENRIPQPPPIAHPRTSPQPESGIKRLFSFFSRDKKRLANTQRNVHIQESFGQWANTHRDDGYTEQGQEALQHL

SEQ ID NO: 43850 - protein, 2011 aa, Homo sapiens
MPRSSQEEKDEKEKEKEAEKEEEKPEVENDKEDLLKEKTDDTSGEDNDEKEAVASKGRKTANSQGRRKGRITRSMANEANSEEAITPQQSAELASMELNESSRWTEEEMETAKKGLLEHGRNWSAIARMVGSKTVSQCKNFYFNYKKRQNLDEILQQHKLKMEKERNARRKKKKAPAAASEEAAFPPVVEDEEMEASGVSGNEEEMVEEAEALHASGNEVPRGECSGPATVNNSSDTESIPSPHTEAAKDTGQNGPKPPATLGADGPPPGPPTPPPEDIPAPTEPTPASEATGAPTPPPAPPSPSAPPPVVPKEEKEEETAAAPPVEEGEEQKPPAAEELAVDTGKAEEPVKSECTEEAEEGPAKGKDAEAAEATAEGALKAEKKEGGSGRATTAKSSGAPQDSDSSATCSADEVDEAEGGDKNRLLSPRPSLLTPTGDPRANASPQKPLDLKQLKQRAAAIPPIQVTKVHEPPREDAAPTKPAPPAPPPPQNLQPESDAPQQPGSSPRGKSRSPAPPADKEAEKPVFFPAFAAEAQKLPGDPPCWTSGLPFPVPPREVIKASPHAPDPSAFSYAPPGHPLPLGLHDTARPVLPRPPTISNPPPLISSAKHPSVLERQIGAISQGMSVQLHVPYSEHAKAPVGPVTMGLPLPMDPKKLAPFSGVKQEQLSPRGQAGPPESLGVPTAQEASVLRGTALGSVPGGSITKGIPSTRVPSDSAITYRGSITHGTPADVLYKGTITRIIGEDSPSRLDRGREDSLPKGHVIYEGKKGHVLSYEGGMSVTQCSKEDGRSSSGPPHETAAPKRTYDMMEGRVGRAISSASIEGLMGRAIPPERHSPHHLKEQHHIRGSITQGIPRSYVEAQEDYLRREAKLLKREGTPPPPPPSRDLTEAYKTQALGPLKLKPAHEGLVATVKEAGRSIHEIPREELRHTPELPLAPRPLKEGSITQGTPLKYDTGASTTGSKKHDVRSLIGSPGRTFPPVHPLDVMADARALERACYEESLKSRPGTASSSGGSIARGAPVIVPELGKPRQSPLTYEDHGAPFAGHLPRGSPVTTREPTPRLQEGSLSSSKASQDRKLTSTPREIAKSPHSTVPEHHPHPISPYEHLLRGVSGVDLYRSHIPLAFDPTSIPRGIPLDAAAAYYLPRHLAPNPTYPHLYPPYLIRGYPDTAALENRQTIINDYITSQQMHHNAATAMAQRADMLRGLSPRESSLALNYAAGPRGIIDLSQVPHLPVLVPPTPGTPATAMDRLAYLPTAPQPFSSRHSSSPLSPGGPTHLTKPTTTSSSERERDRDRERDRDREREKSILTSTTTVEHAPIWRPGTEQSSGSSGGGGGSSSRPASHSHAHQHSPISPRTQDALQQRPSVLHNTGMKGIITAVEPSTPTVLRSTSTSSPVRPAATFPPATHCPLGGTLDGVYPTLMEPVLLPKEAPRVARPERPRADTGHAFLAKPPARSGLEPASSPSKGSEPRPLVPPVSGHATIARTPAKNLAPHHASPDPPAPPASASDPHREKTQSKPFSIQELELRSLGYHGSSYSPEGVEPVSPVSSPSLTHDKGLPKHLEELDKSHLEGELRPKQPGPVKLGGEAAHLPHLRPLPESQPSSSPLLQTAPGVKGHQRVVTLAQHISEVITQDYTRHHPQQLSAPLPAPLYSFPGASCPVLDLRRPPSDLYLPPPDHGAPARGSPHSEGGKRSPEPNKTSVLGGGEDGIEPVSPPEGMTEPGHSRSAVYPLLYRDGEQTEPSRMGSKSPGNTSQPPAFFSKLTESNSAMVKSKKQEINKKLNTHNRNEPEYNISQPGTEIFNMPAITGTGLMTYRSQAVQEHASTNMGLEAIIRKALMGKYDQWEESPPLSANAFNPLNASASLPAAMPITAADGRSDHTLTSPGGGGKAKVSGRPSSRKAKSPAPGLASGDRPPSVSSVHSEGDCNRRTPLTNRVWEDRPSSAGSTPFPYNPLIMRLQAGVMASPPPPGLPAGSGPLAGPHHAWDEEPKPLLCSQYETLSDSE

SEQ ID NO: 43851 - protein, 452 aa, Homo sapiens
MWKEIPIPFYLSVYFFDVMNPSEILKGEKPQVRERGPYVYREFRHKSNITFNNNDTVSFLEYRTFQFQPSKSHGSESDYIVMPNILVLGAAVMMENKPMTLKLIMTLAFTTLGERAFMNRTVGEIMWGYKDPLVNLINKYFPGMFPFKDKFGLFAELNNSDSGLFTVFTGVQNISRIHLVDKWNGLSKVDFWHSDQCNMINGTSGQMWPPFMTPESSLEFYSPEACRSMKLMYKESGVFEGIPTYRFVAPKTLFANGSIYPPNEGFCPCLESGIQNVSTCRFSAPLFLSHPHFLNADPVLAEAVTGLHPNQEAHSLFLDIHPVTGIPMNCSVKLQLSLYMKSVAGIGQTGKIEPVVLPLLWFAESGAMEGETLHTFYTQLVLMPKVMHYAQYVLLALGCVLLLVPVICQIRSQGPEDTVSQPGLAAGPDRPPSPYTPLLPDSPSGQPPSPTA

SEQ ID NO: 43852 - protein, 455 aa, Homo sapiens
MWKEIPIPFYLSVYFFDVMNPSEILKGEKPQVRERGPYVYREFRHKSNITFNNNDTVSFLEYRTFQFQPSKSHGSESDYIVMPNILVLGAAVMMENKPMTLKLIMTLAFTTLGERAFMNRTVGEIMWGYKDPLVNLINKYFPGMFPFKDKFGLFAELNNSDSGLFTVFTGVQNISRIHLVDKWNGLSKVDFWHSDQCNMINGTSGQMWPPFMTPESSLEFYSPEACRSMKLMYKESGVFEGIPTYRFVAPKTLFANGSIYPPNEGFCPCLESGIQNVSTCRFSAPLFLSHPHFLNADPVLAEAVTGLHPNQEAHSLFLDIHPVTGIPMNCSVKLQLSLYMKSVAGIGQTGKIEPVVLPLLWFAESGAMEGETLHTFYTQLVLMPKVMHYAQYVLLALGCVLLLVPVICQIRSQEKCYLFWSSSKKGSKDKEAIQAYSESLMTSAPKGSVLQEAKL

SEQ ID NO: 43853 - protein, 427 aa, Homo sapiens
MWKEIPIPFYLSVYFFDVMNPSEILKGEKPQVRERGPYVYREFRHKSNITFNNNDTVSFLEYRTFQFQPSKSHGSESDYIVMPNILVLGAAVMMENKPMTLKLIMTLAFTTLGERAFMNRTVGEIMWGYKDPLVNLINKYFPGMFPFKDKFGLFAELNNSDSGLFTVFTGVQNISRIHLVDKWNGLSKVDFWHSDQCNMINGTSGQMWPPFMTPESSLEFYSPEACRSMKLMYKESGVFEGIPTYRFVAPKTLFANGSIYPPNEGFCPCLESGIQNVSTCRFSAPLFLSHPHFLNADPVLAEAVTGLHPNQEAHSLFLDIHPVTGIPMNCSVKLQLSLYMKSVAGIGQTGKIEPVVLPLLWFAESGAMEGETLHTFYTQLVLMPKEKCYLFWSSSKKGSKDKEAIQAYSESLMTSAPKGSVLQEAKL

SEQ ID NO: 43854 - protein, 84 aa, Homo sapiens
MSCVYILHKYEGEPENAVLPLCFVVAVYFMTGPMGFYWRSSPSGPSNPSNPSVEEKLEHLEKQVRLLNIRLNRVLESLDRSKDK

SEQ ID NO: 43855 - protein, 496 aa, Homo sapiens
MGLTYLGSPFGGWLADARLGRARAILLSLALYLLGMLAFPLLAAPATRAALCGSARLLNCTAPGPDAAARCCSPATFAGLVLVGLGVATVKANITPFGADQVKDRGPEATRRFFNWFYWSINLGAILSLGGIAYIQQNVSFVTGYAIPTVCVGLAFVVFLCGQSVFITKPPDGSAFTDMFKILTYSCCSQKRSGERQSNGEGIGVFQQSSKQSLFDSCKMSHGGPFTEEKVEDVKALVKIVPVFLALIPYWTVYFQMQTTYVLQSLHLRIPEISNITTTPHTLPAAWLTMFDAVLILLLIPLKDKLVDPILRRHGLLPSSLKRIAVGMFFVMCSAFAAGILESKRLNLVKEKTINQTIGNVVYHAADLSLWWQVPQYLLIGISEIFASIAGLEFAYSAAPKSMQSAIMGLFFFFSGVGSFVGSGLLALVSIKAIGWMSSHTDFGNINGCYLNYYFFLLAAIQGATLLLFLIISVKYDHHRDHQRSRANGVPTSRRA

SEQ ID NO: 43856 - protein, 211 aa, Homo sapiens
MGLTYLGSPFGGWLADARLGRARAILLSLALYLLGMLAFPLLAAPATRAALCGSARLLNCTAPGPDAAARCCSPATFAGLVLVGLGVATVKANITPFGADQVKDRGPEATRRFFNWFYWSINLGAILSLGGIAYIQQNVSFVTGYAIPTVCVGLAFVVFLCGQSVFITKPPDGSAFTDMFKILTYSCCSQKRSGERQSNGCRQHMFYRVFI

SEQ ID NO: 43857 - protein, 259 aa, Homo sapiens
MDDFFHQVEEIRNSIDKITQYVEEVKKNHSIILSAPNPEGKIKEELEDLNKEIKKTANKIRAKLKAIEQSFDQDESGNRTSVDLRIRRTQHSVLSRKFVEAMAEYNEAQTLFRERSKGRIQRQLEITGRTTTDDELEEMLESGKPSIFTSDIISDSQITRQALNEIESRHKDIMKLETSIRELHEMFMDMAMFVETQGEMINNIERNVMNATDYVEHAKEETKKAIKYQSKARRKLMFIIICVIVLLVILGIILATTLS

SEQ ID NO: 43858 - protein, 531 aa, Homo sapiens
MLENYKNLVSLGYQLTKPDVILRLEKGEEPWLVEREIHQETHPDSETAFEIKSSVSSRSIFKDKQSCDIKMEGMARNDLWYLSLEEVWKCRDQLDKYQENPERHLRQVAFTQKKVLTQERVSESGKYGGNCLLPAQLVLREYFHKRDSHTKSLKHDLVLNGHQDSCASNSNECGQTFCQNIHLIQFARTHTGDKSYKCPDNDNSLTHGSSLGISKGIHREKPYECKECGKFFSWRSNLTRHQLIHTGEKPYECKECGKSFSRSSHLIGHQKTHTGEEPYECKECGKSFSWFSHLVTHQRTHTGDKLYTCNQCGKSFVHSSRLIRHQRTHTGEKPYECPECGKSFRQSTHLILHQRTHVRVRPYECNECGKSYSQRSHLVVHHRIHTGLKPFECKDCGKCFSRSSHLYSHQRTHTGEKPYECHDCGKSFSQSSALIVHQRIHTGEKPYECCQCGKAFIRKNDLIKHQRIHVGEETYKCNQCGIIFSQNSPFIVHQIAHTGEQFLTCNQCGTALVNTSNLIGYQTNHIRENAY

SEQ ID NO: 43859 - protein, 646 aa, Homo sapiens
MATSLMDIGDSFGHPACPLVSRSRNSPVEDDDDDDDVVFIESIQPPSISAPAIADQRNFIFASSKNEKPQGNYSVIPPSSRDLASQKGNISETIVIDDEEDIETNGGAEKKSSCFIEWGLPGTKNKTNDLDFSTSSLSRSKTKTGVRPFNPGRMNVAGDLFQNGEFATHHSPDSWISQSASFPSNQKQPGVDSLSPVALLRKQNFQPTAQQQLTKPAKITCANCKKPLQKGQTAYQRKGSAHLFCSTTCLSSFSHKRTQNTRSIICKKDASTKKANVILPVESSKSFQEFYSTSCLSPCENNWNLKKGVFNKSRCTICSKLAEIRHEVSVNNVTHKLCSNHCFNKYRLANGLIMNCCEHCGEYMPSKSTGNNILVIGGQQKRFCCQSCINEYKQMMETKSKKLTASENRKRNAFREENEKQLYGSSNTLLKKIEGIPEKKEKTSQLQLSVECGTDTLLIQENVNLPPSSTSTIADTFQEQLEEKNFEDSIVPVVLSADPGTWPRILNIKQRDTLVENVPPQVRNFNFPKDNTGRKFSETYYTRILPNGEKTTRSWLLYSTSKDSVFCLYCKLFGEGKNQLKNENGCKDWQHLSHILSKHEESEMHVNNSVKYSKLKSDLKKNKAIDAAEHRLYENEKNDGVLLLYT

SEQ ID NO: 43860 - protein, 439 aa, Homo sapiens
MATSLTNVGNSFSGPANPLVSRSNKFQNSSVEDDDDVVFIEPVQPPPPSVPVVADQRTITFTSSKNEELQGNDSKITPSSKELASQKGSVSETIVIDDEEDMETNQGQEKNSSNFIERRPPETKNRTNDVDFSTSSFSRSKTKTGVGPFNPGRMNVAGDVFQNGESATHHNPDSWISQSASFPRNQKQPGVDSLSPVASLPKQIFQPSVQQQPTKPVKVTCANCKKPLQKGQTAYQRKGSAHLFCSTTCLSSFSHKPAPKKLCVMCKKDITTMKGTIVAQVDSSESFQEFCSTSCLSLYEDKQNPTKGALNKSRCTICGKLTEIRHEVSFKNMTHKLCSDHCFNRYRMANGLIMNCCEQCGEYLPSKGAGNNVLVIDGQQKRFCCQSCVSEYKQVGSHPSFLKEVRDHMQDSFLMQPEVSRNVNGVQGLNIFEHCYYCH

SEQ ID NO: 43861 - protein, 1354 aa, Homo sapiens [sequence omitted]

SEQ ID NO: 43862 - protein, 823 aa, Homo sapiens
MQNVHLAPETDEDDLYSGYNDYNPIYDIEELENDAAFQQAVRTSHGRRPPITAKISSTAVTRPIATGYGSKTSLASSIGRPMTGAIQDGVTRPMTAVRAAGFTKAALRGSAFDPLSQSRGPASPLEAKKKDSPEEKIKQLEKEVNELVEESCIANSCGDLKLALEKAKDAGRKERVLVRQREQVTTPENINLDLTYSVLFNLASQYSVNEMYAEALNTYQVIVKNKMFSNAGILKMNMGNIYLKQRNYSKAIKFYRMALDQVPSVNKQMRIKIMQNIGVTFIQAGQYSDAINSYEHIMSMAPNLKAGYNLTICYFAIGDREKMKKAFQKLITVPLEIDEDKYISPSDDPHTNLVTEAIKNDHLRQMERERKAMAEKYIMTSAKLIAPVIETSFAAGYDWCVEVVKASQYVELANDLEINKAVTYLRQKDYNQAVEILKVLEKKDSRVKSAAATNLSALYYMGKDFAQASSYADIAVNSDRYNPAALTNKGNTVFANGDYEKAAEFYKEALRNDSSCTEALYNIGLTYEKLNRLDEALDCFLKLHAILRNSAEVLYQIANIYELMENPSQAIEWLMQVVSVIPTDPQVLSKLGELYDREGDKSQAFQYYYESYRYFPCNIEVIEWLGAYYIDTQFWEKAIQYFERASLIQPTQVKWQLMVASCFRRSGNYQKALDTYKDTHRKFPENVECLRFLVRLCTDLGLKDAQEYARKLKRLEKMKEIREQRIKSGRDGSGGSRGKREGSASGDSGQNYSASSKGERLSARLRALPGTNEPYESSSNKEIDASYVDPLGPQIERPKTAAKKRIDEDDFADEELGDDLLPE

SEQ ID NO: 43863 - protein, 42 aa, Homo sapiens [sequence omitted]

SEQ ID NO: 43864 - protein, 1129 aa, Homo sapiens
MAPPSMVNNEQRQHAEHIFLSFRKSKSPFAVCKHILETSKVDYVLFQAATAIMEAVVREWILLEKGSIESLRTFLLTYVLQRPNLQKYVREQILLAVAVIVKRGSLDKSIDCKSIFHEVSQLISSGNPTVQTLACSILTALLSEFSSSSKTSNIGLSMEFHGNCKRVFQEEDLRQIFMLTVEVLQEFSRRENLNAQMSSVFQRYLALANQVLSWNFLPPNLGRHYIAMFESSQNVLLKPTESWRETLLDSRVMELFFTVHRKIREDSDMAQDSLQCLAQLASLHGPIFPDEGSQVDYLAHFIEGLLNTINGIEIEDSEAVGISSIISNLITVFPRNVLTAIPSELFSSFVNCLTHLTCSFGRSAALEEVLDKDDMVYMEAYDKLLESWLTLVQDDKHFHKGFFTQHAVQVFNSYIQCHLAAPDGTRNLTANGVASREEEEISELQEDDRDQFSDQLASVGMLGRIAAEHCIPLLTSLLEERVTRLHGQLQRHQQQLLASPGSSTVDNKMLDDLYEDIHWLILVTGYLLADDTQGETPLIPPEIMEYSIKHSSEVDINTTLQILGSPGEKASSIPGYNRTDSVIRLLSAILRVSEVESRAIRADLTHLLSPQMGKDIVWFLKRWAKTYLLVDEKLYDQISLPFSTAFGADTEGSQWIIGYLLQKVISNLSVWSSEQDLANDTVQLLVTLVERRERANLVIQCENWWNLAKQFASRSPPLNFLSSPVQRTLMKALVLGGFAHMDTETKQQYWTEVLQPLQQRFLRVINQENFQQMCQQEEVKQEITATLEALCGIAEATQIDNVAILFNFLMDFLTNCIGLMEVYKNTPETVNLIIEVFVEVAHKQICYLGESKAMNLYEACLTLLQVYSKNNLGRQRIDVTAEEEQYQDLLLIMELLTNLLSKEFIDFSDTDEVFRGHEPGQAANRSVSAADVVLYGVNLILPLMSQDLLKFPTLCNQYYKLITFICEIFPEKIPQLPEDLFKSLMYSLELGMTSMSSEVCQLCLEALTPLAEQCAKAQETDSPLFLATRHFLKLVFDMLVLQKHNTEMTTAAGEAFYTLVCLHQAEYSELVETLLSSQQDPVIYQRLADAFNKLTASSTPPTLDRKQKMAFLKSLEEFMANVGGLLCVK

SEQ ID NO: 43865 - protein, 250 aa, Homo sapiens
MTIFTSPASPSKEFYLSNSEKERYEKEFSQERQQEILRRAARALPIYTTSASKTIRYCEKCQLIKPDRAHHCSACDSCILKMDHHCPWVNNCVGFSNYKFFLLFLLYSLLYCLFVAATVLEYFIKFWTNELTDTRAKFHVLFLFFVSAMFFISVLSLFSYHCWLVGKNRTTIESFRAPTFSYGPDGNGFSLGCSKNWRQVFGDEKKYWLLPIFSSLGDGCSFPTRLVGMDPEQASVTNQNEYARRSKLQR

SEQ ID NO: 43866 - protein, 344 aa, Homo sapiens
MQFSSLEHEGEYYMTPRDFLFSVMFEQMERKTSVKKLTKKDIEDTLSGIQTAGCGSTFFRDLGDKGLISYTEYLFLLTILTKPHSGFHVAFKMLDTDGNEMIEKREFFKLQKIISKQDDLMTVKTNETGYQEAIVKEPEINTTLQMRFFGKRGQRKLHYKEFRRFMENLQTEIQEMEFLQFSKGLSFMRKEDFAEWLLFFTNTENKDIYWKNVREKLSAGESISLDEFKSFCHFTTHLEDFAIAMQMFSLAHRPVRLAEFKRAVKVATGQELSNNILDTVFKIFDLDGDECLSHEEFLGVLKNRMHRGLWVPQHQSIQEYWKCVKKESIKGVKEVWKQAGKGLF

SEQ ID NO: 43867 - protein, 566 aa, Homo sapiens
MVEKLNTNVDLYQSLQKLLADKKLVDSLDPETRRVAELFMFDFEISGIHLDKEKRKRAVDLNVKILDLSSTFLMGTNFPNKIEKHLLPEHIRRNFTSAGDHIIIDGLHAESPDDLVREAAYKIFLYPNAGQLKCLEELLSSRDLLAKLVGYSTFSHRALQGTIAKNPETVMQFLEKLSDKLSERTLKDFEMIRGMKMKLNPQNSEVMPWDPPYYSGVIRAERYNIEPSLYCPFFSLGACMEGLNILLNRLLGISLYAEQPAKGEVWSEDVRKLAVVHESEGLLGYIYCDFFQRADKPHQDCHFTIRGGRLKEDGDYQLPVVVLMLNLPRSSRSSPTLLTPSMMENLFHEMGHAMHSMLGRTRYQHVTGTRCPTDFAEVPSILMEYFANDYRVVNQFARHYQTGQPLPKNMVSRLCESKKVCAAADMQLQVFYATLDQIYHGKHPLRNSTTDILKETQEKFYGLPYVPNTAWQLRFSHLVGYGARYYSYLMSRAVASMVWKECFLQDPFNRAAGERYRREMLAHGGGREPMLMVEGMLQKCPSVDDFVSALVSDLDLDFETFLMDSE

SEQ ID NO: 43868 - protein, 1722 aa, Homo sapiens [sequence omitted]

SEQ ID NO: 43869 - protein, 325 aa, Homo sapiens
MSSKAMLKVQEDIKALKQLLSLAANGIQRNTLNIDKLKIETAQELKNAEIALRTQKTPPGLQHEYAAPADYFRILVQQFEVQLQQYRQQIEELENHLATQANNSHITPQDLSMAMQKIYQTFVALAAQLQSIHENVKVLKEQYLGYRKMFLGDAVDVFETRRAEAKKWQNTPRVTTGPTPFSTMPNAAAVAMAATLTQQQQPATGPQPSLGVSFGTPFGSGIGTGLQSSGLGSSNLGGFGTSSGFGCSTTGASTFGFGTTNKPSGSLSAGFGSSSTSGFNFSNPGITASAGLTFGVSNPASAGFGTGGQLLQLKKPPAGNKRGKR

SEQ ID NO: 43870 - protein, 211 aa, Homo sapiens
MSSKAMLKVQEDIKALKQLLSLAANGIQRNTLNIDKLKIETAQELKNAEIALRTQKTPPGLQHEYAAPADYFRILVQQFEVQLQQYRQQIEELENHLATQANNSHITPQDLSMAMQKIYQTFVALAAQLQSIHENVKVLKEQYLGYRKMFLGDAVDVFETRRAEAKKWQNTPRVTTGPTPFSTMPNAAAVAMAATLTQQQQPATGLNAFKL

SEQ ID NO: 43871 - protein, 406 aa, Homo sapiens
MKKAFKSSTVQDQQVVSKNSIPNPVADIYNQSDKPPPLNILTPYRDDKKDGLKFYTDPSYFFDLWKEKMLQDTEDKRKEKRRQKEQKRIDGTTREVKKVRKARNRRQEWNMMAYDKELRPDNRLSQSVYHGASSEGSLSPDTRSHASDVTDYSYPATPNHSLHPQPVTPSYAAGDVPPHGPASQAAEHEYRPPSASARHMALNRPQQPPPPPPPQAPEGSQASAPMAPADYGMLPAQIIEYYNPSGPPPPPPPPVIPSAQTAFVSPLQMPMQPPFPASASSTHAAPPHPPSTGLLVTAPPPPGPPPPPPGPPGPGSSLSSSPMHGPPVAEAKRQEPAQPPISDARSDLLAAIRMGIQLKKVQEQREQEAKREPVGNDVATILSRRIAVEYSDSDDDSEFDENDWSD

SEQ ID NO: 43872 - protein, 403 aa, Homo sapiens
MKKAFKSSTVQDQQVVSKNSIPNPVADIYNQSDKPPPLNILTPYRDDKKDGLKFYTDPSYFFDLWKEKMLQDTEDKRKEKRRQKREKHKLNPNRNQQVNVRKVRTRKEEWERRKMGIEFMSDAKKLEQAGSAKEDRVPSGSHASDVTDYSYPATPNHSLHPQPVTPSYAAGDVPPHGPASQAAEHEYRPPSASARHMALNRPQQPPPPPPPQAPEGSQASAPMAPADYGMLPAQIIEYYNPSGPPPPPPPPVIPSAQTAFVSPLQMPMQPPFPASASSTHAAPPHPPSTGLLVTAPPPPGPPPPPPGPPGPGSSLSSSPMHGPPVAEAKRQEPAQPPISDARSDLLAAIRMGIQLKKVQEQREQEAKREPVGNDVATILSRRIAVEYSDSDDDSEFDENDWSD

SEQ ID NO: 43873 - protein, 567 aa, Homo sapiens [sequence omitted]

SEQ ID NO: 43874 - protein, 61 aa, Homo sapiens [sequence omitted]

SEQ ID NO: 43875 - protein, 388 aa, Homo sapiens
MDISGLIPGLVSTFILLSISDHYGRKFPMILSSVGALATSVWLCLLCYFAFPFQLLIASTFIGAFCGNYTTFWGACFAYIVDQCKEHKQKTIRIAIIDFLLGLVTGLTGLSSGYFIRELGFEWSFLIIAVSLAVNLIYILFFLGDPVKECSSQNVTMSCSEGFKNLFYRTYMLFKNASGKRRFLLCLLLFTVITYFFVVIGIAPIFILYELDSPLCWNEVFIGYGSALGSASFLTSFLGIWLFSYCMEDIHMAFIGIFTTMTGMAMTAFASTTLMMFLARVPFLFTIVPFSVLRSMLSKVVRSTEQGTLFACIAFLETLGGVTAVSTFNGIYSATVAWYPGFTFLLSAGLLLLPAISLCVVKCTSWNEGSYELLIQEESSEDASDRAC

SEQ ID NO: 43876 - protein, 132 aa, Homo sapiens
MTIFTIKMGTAKQAIDQGRSPVIIDNTNIQAWEMKPYVEVAIGKGYRVEFHEPETWWKFDPEELEKRNKHGVSRKKIAQMLDRYEYQMSISIVMNSVEPSHKSTQRPPPPQGRQRWGGSLGSHNRVCVTNNH

SEQ ID NO: 43877 - protein, 1417 aa, Homo sapiens [sequence omitted]

SEQ ID NO: 43878 - protein, 1073 aa, Homo sapiens
MSRILARHQLVTKIQQEIEAKEACDWLRAAGFPQYAQLYEDSQFPINIVAVKNDHDFLEKDLVEPLCRRLNTLNKCASMKLDVNFQRKKGDDSDEEDLCISNKWTFQRTSRRWSRVDDLYTLLPRGDRNGSPGGTGMRNTTSSESVLTDLSEPEVCSIHSESSGGSDSRSQPGQCCTDNPVMLDAPLVSSSLPQPPRDVLNHPFHPKNEKPTRARAKSFLKRMETLRGKGAHGRHKGSGRTGGLVISGPMLQQEPESFKAMQCIQIPNGDLQNSPPPACRKGLPCSGKSSGESSPSEHSSSGVSTPCLKERKCHEANKRGGMYLEDLDVLAGTALPDAGDQSRMHEFHSQENLVVHIPKDHKPGTFPKALSIESLSPTDSSNGVNWRTGSISLGREQVPGAREPRLMASCHRASRVSIYDNVPGSHLYASTGDLLDLEKDDLFPHLDDILQHVNGLQEVVDDWSKDVLPELQTHDTLVGEPGLSTFPSPNQITLDFEGNSVSEGRTTPSDVERDVTSLNESEPPGVRDRRDSGVGASLTRPNRRLRWNSFQLSHQPRPAPASPHISSQTASQLSLLQRFSLLRLTAIMEKHSMSNKHGWTWSVPKFMKRMKVPDYKDKAVFGVPLIVHVQRTGQPLPQSIQQALRYLRSNCLDQVGLFRKSGVKSRIHALRQMNENFPENVNYEDQSAYDVADMVKQFFRDLPEPLFTNKLSETFLHIYQYVSKEQRLQAVQAAILLLADENREVLQTLLCFLNDVVNLVEENQMTPMNLAVCLAPSLFHLNLLKKESSPRVIQKKYATGKPDQKDLNENLAAAQGLAHMIMECDRLFEVPHELVAQSRNSYVEAEIHVPTLEELGTQLEESGATFHTYLNHLIQGLQKEAKEKFKGWVTCSSTDNTDLAFKKVGDGNPLKLWKASVEVEAPPSVVLNRVLRERHLWDEDFVQWKVVETLDRQTEIYQYVLNSMAPHPSRDFVVLRTWKTDLPKGMCTLVSLSVEHEEAQLLGGVRAVVMDSQYLIEPCGSGKSRLTHICRIDLKGHSPEWYSKGFGHLCAAEVARIRNSFQPLIAEGPETKI

SEQ ID NO: 43879 - protein, 301 aa, Homo sapiens
MDNRYEGLEVISPTEFEVVLYLNQMGVFNFVDDGSLPGCAVLKLSDGRKRSMSLWVEFITASGYLSARKIRSRFQTLVAQAVDKCSYRDVVKMVADTSEVKLRIRDRYVVQITPAFKCTGIWPRSAAHWPLPHIPWPGPNRVAEVKAEGFNLLSKECHSLAGKQSSAESDAWVLQFAEAENRLQMGGCRKKCLSILKTLRDRHLELPGQPLNNYHMKTLVSYECEKHPRESDWDESCLGDRLNGILLQLISCLQCRRCPHYFLPNLDLFQGKPHSALENAAKQTWRLAREILTNPKSLEKL

SEQ ID NO: 43880 - protein, 56 aa, Homo sapiens
MLELIEVNGTPGSQLSTPRSGKSPSPSPTSPGSLRKQRDLYRPLSSDDLDSVGDSV

SEQ ID NO: 43881 - protein, 590 aa, Homo sapiens [sequence omitted]

SEQ ID NO: 43882 - protein, 364 aa, Homo sapiens
MQQKMKETLQNVRTRLEILEKGLATSLQNDLQEVPKLYPEFPPKDMCEKLPEPQSFSSAPQHAEVNGNTSTPSAGAVAAPASLSLPSQSCPAEAPPAYTPQAAEGHYTVSYGTDSGEFSSVGEEFYRNHSQPPPLETLGLDADELILIPNGVQIFFVNPAGEVSAPSYPGYLRIVRFLDNSLDTVLNRPPGFLQVCDWLYPLVPDRSPVLKCTAGAYMFPDTMLQAAGCFVGVVLSSELPEDDRELFEDLLRQMSDLRLQANWNRAEEENEFQIPGRTRPSSDQLKEASGTDVKQLDQGNKDVRHKGKRGKRAKDTSSEEVNLSHIVPCEPVPEEKPKELPEWSEKVAHNILSGITVMLIFFPV

SEQ ID NO: 43883 - protein, 416 aa, Homo sapiens [sequence omitted]

SEQ ID NO: 43884 - protein, 242 aa, Homo sapiens [sequence omitted]

SEQ ID NO: 43885 - protein, 937 aa, Homo sapiens
MVLDEIRKAVLTEYKLKAIEYVHGYFSSEQVVDLLRYFSWAEPQLKAMKALQHKMVAVQPTEVVNILNCFTFSKDKLVALELLASNIIDAQNSRPIEDLFRVNMSEKKRCKRILEQAFKGGCKAPHAMISSCGTIPGNPYPKGRPSRINGIFPGTPLKKDGEECTNEGKGIAARILGPSKPPPSTYNPHKPVPYPIPPCRPHATIAPSAYNNAGLVPLANVIAPPPPPYTPNPVGTENEDLSNPSKPIQNQTFSTPASQLFSPHGSNPSTPAATPVPTASPVKAINHPSASAAATVSGMNLLNTVLPVFPGQVSSAVHTPQPSIPNPTVIRTPSLPTAPVTSIHSTTTTPVPSIFSGLVSLPGPSATPTAATPTPGPTPRSTLGSSEAFASTSAPFTSLPFSTSSSAASTSNPNSASLSSVFAGLPLPLPPTSQGLSNPTPVIAGGSTPSVAGPLGVNSPLLSALKGFLTSNDTNLINSSALSSAVTSGLASLSSLTLQNSDSSASAPNKCYAPSAIPTPQRTSTPGLALFPGLPSPVANSTSTPLTLPVQSPLATAASASTSVPVSCGSSASLLRGPHPGTSDLHISSTPAATTLPVMIKTEPTSPTPSAFKGPSHSGNPSHGTLGLSGTLGRAYTSTSVPISLSACLNPALSGLSSLSTPLNGSNPLSSISLPPHGSSTPIAPVFTALPSFTSLTNNFPLTGNPSLNPSVSLPGSLIATSSTAATSTSLPHPSSTAAVLSGLSASAPVSAAPFPLNLSTAVPSLFSVTQGPLSSSNPSYPGFSVSNTPSVTPALPSFPGLQAPSTVAAVTPLPVAATAPSPAPVLPGFASAFSSNFNSALVAQAGLSSGLQAAGSSVFPGLLSLPGIPGFPQNPSQSSLQELQHNAAAQSALLQQVHSASALESYPAQPDGFPSYPSAPGTPFSLQPSLSQSGWQ

SEQ ID NO: 43886 - protein, 512 aa, Homo sapiens
MDSPGPMLDEKRINNNIFSSPEDDMVVAPVTHVSVTLDGIPEVMETQQVQEKYADSPGASSPEQPKRKKGRKTKPPRPDSPATTPNISVKKKNKDGKGNTIYLWEFLLALLQDKATCPKYIKWTQREKGIFKLVDSKAVSRLWGKHKNKPDMNYETMGRALRYYYQRGILAKVEGQRLVYQFKEMPKDLIYINDEDPSSSIESSDPSLSSSATSNRNQTSRSRVSSSPGVKGGATTVLKPGNSKAAKPKDPVEVAQPSEVLRTVQPTQSPYPTQLFRTVHVVQPVQAVPEGEAARTSTMQDETLNSSVQSIRTIQAPTQVPVVVSPRNQQLHTVTLQTVPLTTVIASTDPSAGTGSQKFILQAIPSSQPMTVLKENVMLQSQKAGSPPSIVLGPAQVQQVLTSNVQTICNGTVSVASSPSFSATAPVVTFSPRSSQLVAHPPGTVITSVIKTQETKTLTQEVEKKESEDHLKENTEKTEQQPQPYVMVVSSSNGFTSQVAMKQNELLEPNSF

SEQ ID NO: 43887 - protein, 15 aa, Homo sapiens
MLYYGCCCPTERPSI

SEQ ID NO: 43888 - protein, 29 aa, Homo sapiens
MADGVAPVFKKRRTENGKSRNLRQRGDDQ

SEQ ID NO: 43889 - protein, 78 aa, Homo sapiens
MKRRSSASVSDSSGFSDSESADSLYRNSFSFSDEKLNSPTDSTPALLSATVTPQKAKLGDTKELEAFIADLDKTLASM

SEQ ID NO: 43890 - protein, 1019 aa, Homo sapiens
MEDWISSLKSVQTREPYEVAQFNVEHFSGMHNWYACSHARPTFCNVCRESLSGVTSHGLSCEVCKFKAHKRCAVRATNNCKWTTLASIGKDIIEDEDGVAMPHQWLEGNLPVSAKCAVCDKTCGSVLRLQDWKCLWCKTMVHTACKDLYHPICPLGQCKVSIIPPIALNSTDSDGFCRATFSFCVSPLLVFVNSKSGDNQGVKFLRRFKQLLNPAQVFDLMNGGPHLGLRLFQKFDNFRILVCGGDGSVGWVLSEIDKLNLNKQCQLGVLPLGTGNDLARVLGWGGSYDDDTQLPQILEKLERASTKMLDRWSIMTYELKLPPKASLLPGPPEASEEFYMTIYEDSVATHLTKILNSDEHAVVISSAKTLCETVKDFVAKVEKTYDKTLENAVVADAVASKCSVLNEKLEQLLQALHTDSQAAPVLPGLSPLIVEEDAVESSSEESLGESKEQLGDDVTKPSSQKAVKPREIMLRANSLKKAVRQVIEEAGKVMDDPTVHPCEPANQSSDYDSTETDESKEEAKDDGAKESITVKTAPRSPDARASYGHSQTDSVPGPAVAASKENLPVLNTRIICPGLRAGLAASIAGSSIINKMLLANIDPFGATPFIDPDLDSVDGYSEKCVMNNYFGIGLDAKISLEFNNKREEHPEKCRSRTKNLMWYGVLGTRELLQRSYKNLEQRVQLECDGQYIPLPSLQGIAVLNIPSYAGGTNFWGGTKEDDIFAAPSFDDKILEVVAIFDSMQMAVSRVIKLQHHRIAQCRTVKITIFGDEGVPVQVDGEAWVQPPGIIKIVHKNRAQMLTRDRAFESTLKSWEDKQKCDSGKPVLRTHLYIHHAIDLATEEVSQMQLCSQAAEELITRICDAATIHCLLEQELAHAVNACSHALNKANPRCPESLTRDTATEIAINVKALYNETESLLVGRVPLQLESPHEERVSNALHSVEVELQKLTEIPWLYYILHPNEDEEPPMDCTKRNNRSTVFRIVPKFKKEKVQKQKTSSQPGSGDTESGSCEANSPGN

SEQ ID NO: 43891 - protein, 623 aa, Homo sapiens
MAAAADGLGSIAIDTTQLNMSVTDPTAWATAMNNLGMVPVGLPGQQLVSDSICVPGFDPSLNMMTGITPINPMIPGLGLVPPPPPTEVAVVKEIIHCKSCTLFPQNPNLPPPSTRERPPGCKTVFVGGLPENATEEIIQEVFEQCGDITAIRKSKKNFCHIRFAEEFMVDKAIYLSGYRMRLGSSTDKKDSGRLHVDFAQARDDFYEWECKQRMRAREERHRRKLEEDRLRPPSPPAIMHYSEHEAALLAEKLKDDSKFSEAITVLLSWIERGEVNRRSANQFYSMVQSANSHVRRLMNEKATHEQEMEEAKENFKNALTGILTQFEQIVAVFNASTRQKAWDHFSKAQRKNIDIWRKHSEELRNAQSEQLMGIRREEEMEMSDDENCDSPTKKMRVDESALAAQAYALKEENDSLRWQLDAYRNEVELLKQEKEQLFRTEENLTKDQQLQFLQQTMQGMQQQLLTIQEELNNKKSELEQAKEEQSHTQALLKVLQEQLKGTKELVETNGHSHEDSNEINVLTVALVNQDRENNIEKRSQGLKSEKEALLIGIISTFLHVHPFGANIEYLWSYMQQLDSKISANEIEMLLMRLPRMFKQEFTGVGATLEKRWKLCAFEGIKTT

SEQ ID NO: 43892 - protein, 125 aa, Homo sapiens
MRLKRLQIEESSKPVRLSQQLDKVVTTNYKPVANHQYNIEYERKKKEDGKRARADKQHVLDMLFSAFEKHQYYNLKDLVDITKQPVVYLKEILKEIGVQNVKGIHKNTWELKPEYRHYQGEEKSD

SEQ ID NO: 43893 - protein, 732 aa, Homo sapiens
MEEERIETAQQFFSWFAKLQTQMDQDEGTKYRQMRDYLSGFQEQCDAILNDVNSALQHLESLQKQYLFVSNKTGTLHEACEQLLKEQSELVDLAENIQQKLSYFNELETINTKLNSPTLSVNSDGFIPMLAKLDDCITYISSHPNFKDYPIYLLKFKQCLSKALHLMKTYTVNTLQTLTSQLLKRDPSSVPNADNAFTLFYVKFRAAAPKVRTLIEQIELRSEKIPEYQQLLNDIHQCYLDQRELLLGPSIACTVAELTSQNNRDHCALVRSGCAFMVHVCQDEHQLYNEFFTKPTSKLDELLEKLCVSLYDVFRPLIIHVIHLETLSELCGILKNEVLEDHVQNNAEQLGAFAAGVKQMLEDVQERLVYRTHIYIQTDITGYKPAPGDLAYPDKLVMMEQIAQSLKDEQKKVPSEASFSDVHLEEGESNSLTKSGSTESLNPRPQTTISPADLHGMWYPTVRRTLVCLSKLYRCIDRAVFQGLSQEALSACIQSLLGASESISKNKTQIDGQLFLIKHLLILREQIAPFHTEFTIKEISLDLKKTRDAAFKILNPMTVPRFFRLNSNNALIEFLLEGTPEIREHYLDSKKDVDRHLKSACEQFIQQQTKLFVEQLEEFMTKVSALKTMASQGGPKYTLSQQPWAQPAKVNDLAATAYKTIKTKLPVTLRSMSLYLSNKDTEFILFKPVRNNIQQVFQKFHALLKEEFSPEDIQIIACPSMEQLSLLLLVSK

SEQ ID NO: 43894 - protein, 1580 aa, Homo sapiens
MKNKRQDVDTEPQKRNTEESSSPVRKESSRGRHREKEDIKITKERTPESEEENVEWETNRDDSDNGDINYDYVHELSLEMKRQKIQRELMKLEQENMEKREEIIIKKEVSPEVVRSKLSPSPSLRKSSKSPKRKSSPKSSSASKKDRKTSAVSSPLLDQQRNSKTNQSKKKGPRTPSPPPPIPEDIALGKKYKEKYKVKDRIEEKTRDGKDRGRDFERQREKRDKPRSTSPAGQHHSPISSRHHSSSSQSGSSIQRHSPSPRRKRTPSPSYQRTLTPPLRRSASPYPSHSLSSPQRKQSPPRHRSPMREKGRHDHERTSQSHDRRHERREDTRGKRDREKDSREEREYEQDQSSSRDHRDDREPRDGRDRRDARDTRDRRELRDSRDMRDSREMRDYSRDTKESRDPRDSRSTRDAHDYRDREGRDTHRKEDTYPEESRSYGRNHLREESSRTEIRNESRNESRSEIRNDRMGRSRGRVPELPEKGSRGSRGSQIDSHSSNSNYHDSWETRSSYPERDRYPERDNRDQARDSSFERRHGERDRRDNRERDQRPSSPIRHQGRNDELERDERREERRVDRVDDRRDERARERDRERERDRERERERERERDREREKERELERERAREREREREKERDRERDRDRDHDRERERERERDREKEREREREERERERERERERERERERERERARERDKERERQRDWEDKDKGRDDRREKREEIREDRNPRDGHDERKSKKRYRNEGSPSPRQSPKRRREHSPDSDAYNSGDDKNEKHRLLSQVVRPQESRSLSPSHLTEDRQGRWKEEDRKPERKESSRRYEEQELKEKVSSVDKQREQTEILESSRMRAQDIIGHHQSEDRETSDRAHDENKKKAKIQKKPIKKKKEDDVGIERGNIETTSEDGQVFSPKKGQKKKSIEKKRKKSKGDSDISDEEAAQQSKKKRGPRTPPITTKEELVEMCNGKNGILEDSQKKEDTAFSDWSDEDVPDRTEVTEAEHTATATTPGSTPSPLSSLLPPPPPVATATATTVPATLAATTAAAATSFSTSAITISTSATPTNTTNNTFANEDSHRKCHRTRVEKVETPHVTIEDAQHRKPMDQKRSSSLGSNRSNRSHTSGRLRSPSNDSAHRSGDDQSGRKRVLHSGSRDREKTKSLEITGERKSRIDQLKRGEPSRSTSSDRQDSRSHSSRRSSPESDRQVHSRSGSFDSRDRLQERDRYEHDRERERERRDTRQREWDRDADKDWPRNRDRDRLRERERERERDKRRDLDRERERLISDSVERDRDRDRDRTFESSQIESVKRCEAKLEGEHERDLESTSRDSLALDKERMDKDLGSVQGFEETNKSERTESLEGDDESKLDDAHSLGSGAGEGYEPISDDELDEILAGDAEKREDQQDEEKMPDPLDVIDVDWSGLMPKHPKEPREPGAALLKFTPGAVMLRVGISKKLAGSELFAKVKETCQRLLEKPKDADNLFEHELGALNMAALLRKEERASLLSNLGPCCKALCFRRDSAIRKQLVKNEKGTIKQAYTSAPMVDNELLRLSLRLFKRKTTCHAPGHEKTEDNKLSQSSIQQELCVS

SEQ ID NO: 43895 - protein, 1476 aa, Homo sapiens
MKNKRQDVDTEPQKRNTEESSSPVRKESSRGRHREKEDIKITKERTPESEEENVEWETNRDDSDNGDINYDYVHELSLEMKRQKIQRELMKLEQENMEKREEIIIKKEVSPEVVRSKLSPSPSLRKSSKSPKRKSSPKSSSASKKDRKTSAVSSPLLDQQRNSKTNQSKKKGPRTPSPPPPIPEDIALGKKYKEKYKVKDRIEEKTRDGKDRGRDFERQREKRDKPRSTSPAGQHHSPISSRHHSSSSQSGSSIQRHSPSPRRKRTPSPSYQRTLTPPLRRSASPYPSHSLSSPQRKQSPPRHRSPMREKGRHDHERTSQSHDRRHERREDTRGKRDREKDSREEREYEQDQSSSRDHRDDREPRDGRDRRDARDTRDRRELRDSRDMRDSREMRDYSRDTKESRDPRDSRSTRDAHDYRDREGRDTHRKEDTYPEESRSYGRNHLREESSRTEIRNESRNESRSEIRNDRMGRSRGRVPELPEKGSRGSRGSQIDSHSSNSNYHDSWETRSSYPERDRYPERDNRDQARDSSFERRHGERDRRDNRERDQRPSSPIRHQGRNDELERDERREERRVDRVDDRRDERARERDRERERDRERERERERERDREREKERELERERAREREREREKERDRERDRDRDHDRERERERERDREKEREREREERERERERERERERERERERERARERDKERERQRDWEDKDKGRDDRREKREEIREDRNPRDGHDERKSKKRYRNEGSPSPRQSPKRRREHSPDSDAYNSGDDKNEKHRLLSQVVRPQESRSLSPSHLTEDRQGRWKEEDRKPERKESSRRYEEQELKEKVSSVDKQREQTEILESSRMRAQDIIGHHQSEDRETSDRAHDENKKKAKIQKKPIKKKKEDDVGIERGNIETTSEDGQVFSPKKGQKKKSIEKKRKKSKGDSDISDEEAAQQSKKKRGPRTPPITTKEELVEMCNGKNGILEDSQKKEDTAFSDWSDEDVPDRTEVTEAEHTATATTPGSTPSPLSSLLPPPPPVATATATTVPATLAATTAAAATSFSTSAITISTSATPTNTTNNTFANEDSHRKCHRTRVEKVETPHVTIEDAQHRKPMDQKRSSSLGSNRSNRSHTSGRLRSPSNDSAHRSGDDQSGRKRVLHSGSRDREKTKSLEITGERKSRIDQLKRGEPSRSTSSDRQDSRSHSSRRSSPESDRQVHSRSGSFDSRDRLQERDRYEHDRERERERRDTRQREWDRDADKDWPRNRDRDRLRERERERERDKRRDLDRERERLISDSVERDRDRDRDRTFESSQIESVKRCEAKLEGEHERDLESTSRDSLALDKERMDKDLGSVQGFEETNKSERTESLEAGDDESKLDDAHSLGSGAGEGYEPISDDELDEILAGDAEKREDQQDEEKMPDPLDVIDVDWSGLMPKHPKEPREPGAALLKFTPGAVMLRVGISKKLAGSELFAKVKETCQRLLEKPKGSFILL

SEQ ID NO: 43896 - protein, 163 aa, Homo sapiens
MYSYVTEELPQLINANFPVDPQRMSIFGHSMGGHGALICALKNPGKYKSVSAFAPICNPVLCPWGKKAFSGYLGTDQSKWKAYDATHLVKSYPGSQLDILIDQGKDDQFLLDGQLLPDNFIAACTEKKIPVVFRLQEGYDHSYYFIATFITDHIRHHAKYLNA

SEQ ID NO: 43897 - protein, 143 aa, Homo sapiens [sequence omitted]

SEQ ID NO: 43898 - protein, 27 aa, Homo sapiens
MKFAVYLPPKAETGKCPALYWLSGQFP

SEQ ID NO: 43899 - protein, 68 aa, Homo sapiens [sequence omitted]

SEQ ID NO: 43900 - protein, 120 aa, Homo sapiens [sequence omitted]

SEQ ID NO: 43901 - protein, 137 aa, Homo sapiens [sequence omitted]

SEQ ID NO: 43902 - protein, 497 aa, Homo sapiens
MRRHRNEVTVELRKNKRDEHLLKKRNVPQEESLEDSDVDADFKAQNVTLEAILQNATSDNPVVQLSAVQAARKLLSSDRNPPIDDLIKSGILPILVKCLERDDNPSLQFEAAWALTNIASGTSAQTQAVVQSNAVPLFLRLLRSPHQNVCEQAVWALGNIIGDGPQCRDYVISLGVVKPLLSFISPSIPITFLRNVTWVIVNLCRNKDPPPPMETVQEILPALCVLIYHTDINILVDTVWALSYLTDGGNEQIQMVIDSGVVPFLVPLLSHQEVKVQTAALRAVGNIVTGTDEQTQVVLNCDVLSHFPNLLSHPKEKINKEAVWFLSNITAGNQQQVQAVIDAGLIPMIIHQLAKGDFGTQKEAAWAISNLTISGRKDQVEYLVQQNVIPPFCNLLSVKDSQVVQVVLDGLKNILIMAGDEASTIAEIIEECGGLEKIEVLQQHENEDIYKLAFEIIDQYFSGDDIDEDPCLIPEATQGGTYNFDPTANLQTKEFNF

SEQ ID NO: 43903 - protein, 327 aa, Homo sapiens
MSFNPETRRLSIGLDNGTISEFILSEDYNKMTPVKNYQAHQSRVTMILFVLELEWVLSTGQDKQFAWHCSESGQRLGGYRTSAVASGLQFDVETRHVFIGDHSGQVTILKLEQENCTLVTTFRGHTGGVTALCWDPVQRVLFSGSSDHSVIMWDIGGRKGTAIELQGHNDRVQALSYAQHTRQLISCGGDGGIVVWNMDVERQETPEWLDSDSCQKCDQPFFWNFKQMWDSKKIGLRQHHCRKCGKAVCGKCSSKRSSIPLMGFEFEVRVCDSCHEAITDEERAPTATFHDSKHNIVHVHFDATRGWLLTSGTDKVIKLWDMTPVVS

SEQ ID NO: 43904 - protein, 189 aa, Homo sapiens
MVNKRELTEDGLEKNFAANTLGVYILTTGLIPVLEKEHDPRVITVSSGGMLVQKLNTNDLQSERTPFDGTMVYAQNKRQQVVLTERWAQGHPAIHFSSMHPGWADTPGVRQAMPGFHARFGDRLRSEAQGADTMLWLALSSAAAAQPSGRFFQDRKPVSTHLPLATASSSPAEEEKLIEILEQLAQTFK

SEQ ID NO: 43905 - protein, 750 aa, Homo sapiens
MTPEATDNSTPFPWWEKSAFLKVEWPVFHVDLNRSAKAAEGTFQVGLFTSQPLCPFPVDKPNIVVDVIFTNSLPEARRNSRQPLEIRTSKRTELAQGQWVEFGCAPLGPEAYVTVVLKLLGRDSVITSTGPIDLAQKFGYKLVMVPELTCESGVEVTVLPPPCTFVQGVVTVFKEAPRYPGKRTIHLAENSLPLGERRTIFNCTLFDMGKNKYCFDFGISSRSHFSAKEECMLIQRNTETWGLWQPWSQCSATCGDGVRERRRVCLTSFPSSPVCPGMSLEASLCSLEECAAFQPSSPSPLQPQGPVKSNNIVTVTGISLCLFIIIATVLITLWRRFGRPAKCSTPARHNSIHSPSFRKNSDEENICELSEQRGSFSDGGDGPTGSPGDTGIPLTYRRSGPVPPEDDASGSESFQSNAQKIIPPLFSYRLAQQQLKEMKKKGLTETTKVYHVSQSPLTDTAIDAAPSAPLDLESPEEAAANKFRIKSPFPEQPAVSAGERPPSRLDLNVTQASCAISPSQTLIRKSQARHVGSRGGPSERSHARNAHFRRTASFHEARQARPFRERSMSTLTPRQAPAYSSRTRTCEQAEDRFRPQSRGAHLFPEKLEHFQEASGTRGPLNPLPKSYTLGQPLRKPDLGDHQAGLVAGIERTEPHRARRGPSPSHKSVSRKQSSPISPKDNYQRVSSLSPSQCRKDKCQSFPTHPEFAFYDNTSFGLTEAEQRMLDLPGYFGSNEEDETTSTLSVEKLVI

SEQ ID NO: 43906 - protein, 284 aa, Homo sapiens
MLRKGICEYHEKNYAAALETFTEGQKLDIETGFHRVGQAGLQLLTSSDPPALDSQSAGITGADANFSVWIKRCQEAQNGSESEVWTHQSKIKYDWYQTESQVVITLMIKNVQKNDVNVEFSEKELSALVKLPSGEDYNLKLELLHPIIPEQSTFKVLSTKIEIKLKKPEAVRWEKLEGQGDVPTPKQFVADVKNLYPSSSPYTRNWDKLVGEIKEEEKNEKLEGDAALNRLFQQIYSDGSDEVKRAMNKSFMESGGTVLSTNWSDVGKRKVEINPPDDMEWKKY

SEQ ID NO: 43907 - protein, 58 aa, Homo sapiens
MDVLLEISRILNTGLDMETLSICVRLCEQGINPEALSSVIKELRKATEALKAAENMTS

SEQ ID NO: 43908 - protein, 383 aa, Homo sapiens
MLMLDGMPAVRVKTELLESEQGSPNVHNYPDMEAVPLLLNNVKGEPPEDSLSVDHFQTQTEPVDLSINKARTSPTAVSSSPVSMTASASSPSSTSTSSSSSSRLASSPTVITSVSSASSSSTVLTPGPLVASASGVGGQQFLHIIHPVPPSSPMNLQSNKLSHVHRIPVVVQSVPVVYTAVRSPGNVNNTIVVPLLEDGRGHGKAQMDPRGLSPRQSKSDSDDDDLPNVTLDSVNETGSTALSIARAVQEVHPSPVSRVRGNRMNNQKFPCSISPFSIESTRRQRRSESPDSRKRRIHRCDFEGCNKVYTKSSHLKAHRRTHTGEKPYKCTWEGCTWKFARSDELTRHYRKHTGVKPFKCADCDRSFSRSDHLALHRRRHMLV

SEQ ID NO: 43909 - protein, 1082 aa, Homo sapiens
MACHVFRATDPSQVPDVISSIRQLSKAAMKEDAKPSKDNEDAFYNSQKFEVLYCGKVTVTHKKAPSSLIDDCMEKFSLHEQQRLKIQGEQRGPDPGEDLADLEVVVPGSPGDCLPEEADGTDTHLGLPAGASQPALTSSRVCFPERILEDSGFDEQQEFRSRCSSVTGVQRRVHEGSQKSQPRRRHASAPSHVQPSDSEKNRTMLFQVGRFEINLISPDTKSVVLEKNFKDISSCSQGIKHVDHFGFICRESPEPGLSQYICYVFQCASESLVDEVMLTLKQAFSTAAALQSAKTQIKLCEACPMHSLHKLCERIEGLYPPRAKLVIQRHLSSLTDNEQADIFERVQKMKPVSDQEENELVILHLRQLCEAKQKTHVHIGEGPSTISNSTIPENATSSGRFKLDILKNKAKRSLTSSLENIFSRGANRMRGRLGSVDSFERSNSLASEKDYSPGDSPPGTPPASPPSSAWQTFPEEDSDSPQFRRRAHTFSHPPSSTKRKLNLQDGRAQGVRSPLLRQSSSEQCSDGEGRKRTSSTCSNESLSVGGTSVTPRRISWRQRIFLRVASPMNKSPSAMQQQDGLDRNELLPLSPLSPTMEEEPLVVFLSGEDDPEKIEERKKSKELRSLWRKAIHQQILLLRMEKENQKLEASRDELQSRKVKLDYEEVGACQKEVLITWDKKLLNCRAKIRCDMEDIHTLLKEGVPKSRRGEIWQFLALQYRLRHRLPNKQQPPDISYKELLKQLTAQQHAILVDLGRTFPTHPYFSVQLGPGQLSLFNLLKAYSLLDKEVGYCQGISFVAGVLLLHMSEEQAFEMLKFLMYDLGFRKQYRPDMMSLQIQMYQLSRLLHDYHRDLYNHLEENEISPSLYAAPWFLTLFASQFSLGFVARVFDIIFLQGTEVIFKVALSLLSSQETLIMECESFENIVEFLKNTLPDMNTSEMEKIITQVFEMDISKQLHAYEVEYHVLQDELQESSYSCEDSETLEKLERANSQLKRQNMDLLEKLQVAHTKIQALESNLENLLTRETKMKSLIRTLEQEKMAYQKTVEQLRKLLPADALVNCDLLLRDLNCNPNNKAKIGNKP

SEQ ID NO: 43910 - protein, 116 aa, Homo sapiens [sequence omitted]

SEQ ID NO: 43911 - protein, 144 aa, Homo sapiens
MKQTISNACGTIGLIHAIANNKDKMHFESGSTLKKFLEESVSMSPEERARYLENYDAIRVTHETSAHEGQTEAPSIDEKVDLHFIALVHVDGHLYELDGRKPFPINHGETSDETLLEDAIEVCKKFMERDPDELRFNAIALSAA

SEQ ID NO: 43912 - protein, 357 aa, Homo sapiens
MPDLWRCFEFELNQPATSYLKATHPELIKQIIKRHSNHLQYVSFKVDSSKESAEAACDILSQLVNCSLKTLGLISTARPSFMDLPKSHFISALTVVFVNSKSLSSLKIDDTPVDDPSLKVLVANNSDTLKLLKMSSCPHVSPAGILCVADQCHGLRELALNYHLLSDELLLALSSEKHVRLEHLRIDVVSENPGQTHFHTIQKSSWDAFIRHSPKVNLVMYFFLYEEEFDPFFRYEIPATHLYFGRSVSKDVLGRVGMTCPRLVELVVCANGLRPLDEELIRIAERCKNLSAIGLGECEVSCSAFVEFVKMCGGRLSQLSIMEEVLIPDQKYSLEQIHWEVSKHLGRVWFPDMMPTW

SEQ ID NO: 43913 - protein, 4676 aa, Homo sapiens [sequence omitted]

SEQ ID NO: 43914 - protein, 367 aa, Homo sapiens
MDTYLEREWGNKPSDCVPYKDEELYDLPAPCTPLSLSCLQLSTPENRESSVVQAGGSKKHSNHLRKLVFDDFCDSSNVSNKDSSEDDISRSENEKKSECFSSPKTGFWDCCSTSYAQNLDFESSEGNTIANSVGEISSKLSEKSGLCLSKRLNSIRSFEMNRTRTSSEASMDAAYLDKISELDSMMSESDNSKSPCNNGFKSLDLDGLSKSSQGSEFLEEPDKLEEKTELNLSKGSLTNDQLENGSEWKPTSFFLLSPSDQEMNEDFSLHSSSCPVTNEIKPPSCLFQTEFSQGILLSSSHRLFEDQRFGSSLFKMSSEMHSLHNHLQSPWSTSFVPEKRNKNVNQSTKRKIQSSLSSASPSKATKS

SEQ ID NO: 43915 - protein, 695 aa, Homo sapiens
MPKKRCRDYDEKGFCMRGDMCPFDHGSDPVVVEDVNLPGMLPFPAQPPVVEGPPPPGLPPPPPILTPPPVNLRPPVPPPGPLPPSLPPVTGPPPPLPPLQPSGMDAPPNSATSSVPTVVTTGIHHQPPPAPPSLFTADTYDTDGYNPEAPSITNTSRPMYRHRVHAQRPNLIGLTSGDMDLPPREKPPNKSSMRIVVDSESRKRTIGSGEPGVPTKKTWFDKPNFNRTNSPGFQKKVQFGNENTKLELRKVPPELNNISKLNEHFSRFGTLVNLQVAYNGDPEGALIQFATYEEAKKAISSTEAVLNNRFIKVYWHREGSTQQLQTTSPKVMQPLVQQPILPVVKQSVKERLGPVPSSTIEPAEAQSASSDLPQVLSTSTGLTKTVYNPAALKAAQKTLLVSTSAVDNNEAQKKKQEALKLQQDVRKRKQEILEKHIETQKMLISKLEKNKTMKSEDKAEIMKTLEVLTKNITKLKDEVKAASPGRCLPKSIKTKTQMQKELLDTELDLYKKMQAGEEVTELRRKYTELQLEAAKRGILSSGRGRGIHSRGRGAVHGRGRGRGRGRGVPGHAVVDHRPRALEISAFTESDREDLLPHFAQYGEIEDCQIDDSSLHAVITFKTRAEAEAAAVHGARFKGQDLKLAWNKPVTNISAVETEEVEPDEEEFQEESLVDDSLLQDDDEEEEDNESRSWRR

SEQ ID NO: 43916 - protein, 719 aa, Homo sapiens
MPKKRCRDYDEKGFCMRGDMCPFDHGSDPVVVEDVNLPGMLPFPAQPPVVEGPPPPGLPPPPPILTPPPVNLRPPVPPPGPLPPSLPPVTGPPPPLPPLQPSGMDAPPNSATSSVPTVVTTGIHHQPPPAPPSLFTADTYDTDGYNPEAPSITNTSRPMYRHRVHAQRPNLIGLTSGDMDLPPREKPPNKSSMRIVVDSESRKRTIGSGEPGVPTKKTWFDKPNFNRTNSPGFQKKVQFGNENTKLELRKVPPELNNISKLNEHFSRFGTLVNLQVAYNGDPEGALIQFATYEEAKKAISSTEAVLNNRFIKVYWHREGSTQQLQTTSPKVMQPLVQQPILPVVKQSVKERLGPVPSSTIEPAEAQSASSDLPQNVTKLSVKDRLGFVSKPSVSATEKVLSTSTGLTKTVYNPAALKAAQKTLLVSTSAVDNNEAQKKKQEALKLQQDVRKRKQEILEKHIETQKMLISKLEKNKTMKSEDKAEIMKTLEVLTKNITKLKDEVKAASPGRCLPKSIKTKTQMQKELLDTELDLYKKMQAGEEVTELRRKYTELQLEAAKRGILSSGRGRGIHSRGRGAVHGRGRGRGRGRGVPGHAVVDHRPRALEISAFTESDREDLLPHFAQYGEIEDCQIDDSSLHAVITFKTRAEAEAAAVHGARFKGQDLKLAWNKPVTNISAVETEEVEPDEEEFQEESLVDDSLLQDDDEEEEDNESRSWRR

SEQ ID NO: 43917 - protein, 321 aa, Homo sapiens [sequence omitted]

SEQ ID NO: 43918 - protein, 608 aa, Homo sapiens
MENNGLHEIVPGAFLGLQLVKRLHINNNKIKSFRKQTFLGLDDLEYLQADFNLLRDIDPGAFQDLNKLEVLILNDNLISTLPANVFQYVPITHLDLRGNRLKTLPYEEVLEQIPGIAEILLEDNPWDCTCDLLSLKEWLENIPKNALIGRVVCEAPTRLQGKDLNETTEQDLCPLKNRVDSSLPAPPAQEETFAPGPLPTPFKTNGQEDHATPGSAPNGGTKIPGNWQIKIRPTAAIATGSSRNKPLANSLPCPGGCSCDHIPGSGLKMNCNNRNVSSLADLKPKLSNVQELFLRDNKIHSIRKSHFVDYKNLILLDLGNNNIATVENNTFKNLLDLRWLYMDSNYLDTLSREKFAGLQNLEYLNVEYNAIQLILPGTFNAMPKLRILILNNNLLRSLPVDVFAGVSLSKLSLHNNYFMYLPVAGVLDQLTSIIQIDLHGNPWECSCTIVPFKQWAERLGSEVLMSDLKCETPVNFFRKDFMLLSNDEICPQLYARISPTLTSHSKNSTGLAETGTHSNSYLDTSRVSISVLVPGLLLVFVTSAFTVVGMLVFILRNRKRSKRRDANSSASEINSLQTVCDSSYWHNGPYNADGAHRVYDCGSHSLSD

SEQ ID NO: 43919 - protein, 433 aa, Homo sapiens
MFVRTYGMLYMQNSEVFQDLFTELKRYYTGGNVNLEEMLNDFWARLLERMFQLINPQYHFSEDYLECVSKYTDQLKPFGDVPRKLKIQVTRAFIAARTFVQGLTVGREVANRVSKVSPTPGCIRALMKMLYCPYCRGLPTVRPCNNYCLNVMKGCLANQADLDTEWNLFIDAMLLVAERLEGPFNIESVMDPIDVKISEAIMNMQENSMQVSAKVFQGCGQPKPAPALRSARSAPENFNTRFRPYNPEERPTTAAGTSLDRLVTDIKEKLKLSKKVWSALPYTICKDESVTAGTSNEEECWNGHSKARYLPEIMNDGLTNQINNPEVDVDITRPDTFIRQQIMALRVMTNKLKNAYNGNDVNFQDTSDESSGSGSGSGCMDDVCPTEFEFVTTEAPAVDPDRREVDSSAAQRGHSLLSWSLTCIVLALQRLCR

SEQ ID NO: 43920 - protein, 318 aa, Homo sapiens
MIVSLVEDYPNYMIINLDKLDYCASLKNLETISNKQNYKFIQGDICDSHFVKLLFETEKIDIVLHFAAQTHVDLSFVRAFEFTYVNVYGTHVLVSAAHEARVEKFIYVSTDEVYGGSLDKEFDESSPKQPTNPYASSKAAAECFVQSYWEQYKFPVVITRSSNVYGPHQYPEKVIPKFISLLQHNRKCCIHGSGLQTRNFLYATDVVEAFLTVLKKGKPGEIYNIGTNFEMSVVQLAKELIQLIKETNSESEMENWVDYVNDRPTNDMRYPMKSEKIHGLGWRPKVPWKEGIKKTIEWYRENFHNWKNVEKALEPFPV

SEQ ID NO: 43921 - protein, 201 aa, Homo sapiens
MGSLAEFFDIASQIQMLYLLLSLCMGWTIVRMKKSQSRPLQWDSTPASTGIAVFIVMTQSVLLLWEQFEDISHHSYHSHHNLAGILLIVLRICLALSLGCGLYQIITVERSTLKREFYITFAKGCILWFLCHPVLACISVIFSDYQRDKVITIGVILCQSVSMVILYRLFLSHSLYWEVSSLSSVTLPLTISSGHKSRPHF

SEQ ID NO: 43922 - protein, 1200 aa, Homo sapiens
MDSVALNTAYAYATVLTFCTLILAILHHLYFYHVQCAGMRLRVAMCHMIYRKALRLSNMAMGKTTTGQIVNLLSNDVNKFDQVTVFLHFLWAGPLQAIAVTALLWMEIGISCLAGMAVLIILLPLQSCFGKLFSSLRSKTATFTDARIRTMNEVITGIRIIKMYAWEKSFSNLITNLRKKEISKILRSSCLRGMNLASFFSASKIIVFVTFTTYVLLGSVITASRVFVAVTLYGAVRLTVTLFFPSAIERVSEAIVSIRRIQTFLLLDEISQRNRQLPSDGKKMVHVQDFTAFWDKASETPTLQGLSFTVRPGELLAVVGPVGAGKSSLLSAVLGELAPSHGLVSVHGRIAYVSQQPWVFSGTLRSNILFGKKYEKERYEKVIKACALKKDLQLLEDGDLTVIGDRGTTLSGGQKARVNLARAVYQDADIYLLDDPLSAVDAEVSRHLFELCICQILHEKITILVTHQLQYLKAASQILILKDGKMVQKGTYTEFLKSGIDFGSLLKKDNEESEQPPVPGTPTLRNRTFSESSVWSQQSSRPSLKDGALESQDTENVPVTLSEENRSEGKVGFQAYKNYFRAGAHWIVFIFLILLNTAAQVAYVLQDWWLSYWANKQSMLNVTVNGGGNVTEKLDLNWYLGIYSGLTVATVLFGIARSLLVFYVLVNSSQTLHNKMFESILKAPVLFFDRNPIGRILNRFSKDIGHLDDLLPLTFLDFIQTLLQVVGVVSVAVAVIPWIAIPLVPLGIIFIFLRRYFLETSRDVKRLESTTRSPVFSHLSSSLQGLWTIRAYKAEERCQELFDAHQDLHSEAWFLFLTTSRWFAVRLDAICAMFVIIVAFGSLILAKTLDAGQVGLALSYALTLMGMFQWCVRQSAEVENMMISVERVIEYTDLEKEAPWEYQKRPPPAWPHEGVIIFDNVNFMYSPGGPLVLKHLTALIKSQEKVGIVGRTGAGKSSLISALFRLSEPEGKIWIDKILTTEIGLHDLRKKMSIIPQEPVLFTGTMRKNLDPFNEHTDEELWNALQEVQLKETIEDLPGKMDTELAESGSNFSVGQRQLVCLARAILRKNQILIIDEATANVDPRTDELIQKKIREKFAHCTVLTIAHRLNTIIDSDKIMVLDSGRLKEYDEPYVLLQNKESLFYKMVQQLGKAEAAALTETAKQVYFKRNYPHIGHTDHMVTNTSNGQPSTLTIFETAL

SEQ ID NO: 43923 - protein, 421 aa, Homo sapiens
MGKSKAALPDLTKVIQLKMDFTAARLQRGHLLLKQGKLDEAEDDFKKVLKSNPSENEEKEAQSQLIKSDEMQRLRSQALNAFGSGDYTAAIAFLDKILEVCVWDAELRELRAECFIKEGEPRKAISDLKAASKLKNDNTEAFYKISTLYYQLGDHELSLSEVRECLKLDQDHKRCFAHYKQVKKLNKLIESAEELIRDGRYTDATSKYESVMKTEPSIAEYTVRSKERICHCFSKDEKPVEAIRVCSEVLQMEPDNVNALKDRAEAYLIEEMYDEAIQDYETAQEHNENDQQIREGLEKAQRLLKQSQKRDYYKILGVKRNAKKQEIIKAYRKLALQWHPDNFQNEEEKKKAEKKFIDIAAAKEVLSDPEMRKKFDDGEDPLDAESQQGGGGNPFHRSWNSWQGFNPFSSGGPFRFKFHFN

SEQ ID NO: 43924 - protein, 756 aa, Homo sapiens
MLDDTQEAFEVPQRAPGKVLLDAVCNHLNLVEGDYFGLEFPDHKKITVWLDLLKPIVKQIRRPKHVVVKFVVKFFPPDHTQLQEELTRYLFALQVKQDLAQGRLTCNDTSAALLISHIVQSEIGDFDEALDREHLAKNKYIPQQDALEDKIVEFHHNHIGQTPAESDFQLLEIARRLEMYGIRLHPAKDREGTKINLAVANTGILVFQGFTKINAFNWAKVRKLSFKRKRFLIKLRPDANSAYQDTLEFLMASRDFCKSFWKICVEHHAFFRLFEEPKPKPKPVLFSRGSSFRFSGRTQKQVLDYVKEGGHKKVQFERKHSKIHSIRSLASQPTELNSEVLEQSQQSTSLTFGEGAESPGGQSCRRGKEPKVSAGEPGSHPSPAPRRSPAGNKQADGAASAPTEEEEEVVKDRTQQSKPQPPQPSTGPASRAARGSSTSIPFIDCSDVDSEYDLLREQASRSRSRSRSRSQTNDNYEGDLTSGVYLLSREEGRREAGRRASPHSAKSSRPPSGEFLDDDSADITFDMSGSPRLPRHSSLIDEMFKGSAGHSPLATPLSPSSSSSSPNMSWDRTGSQGYVSENGHDHREGSMGEDTLPDQGPPYERWSPTSPRPYMRNLPGRCNKSETDPLILSQVAFTPEAMDGLGGRGKWGQASAAAPEGRSLANGTPPMGAASKVPAVQSVCARGMAGQLAPLQVTEGSTSSGTESSESDSEMLIPGSQPLIFGNPAVLRSPSLLRSRGSLGGLRLSEEQEEDE

SEQ ID NO: 43925 - protein, 1031 aa, Homo sapiens
MLDDTQEAFEVPQRAPGKVLLDAVCNHLNLVEGDYFGLEFPDHKKITVWLDLLKPIVKQIRRPKHVVVKFVVKFFPPDHTQLQEELTRYLFALQVKQDLAQGRLTCNDTSAALLISHIVQSEIGDFDEALDREHLAKNKYIPQQDALEDKIVEFHHNHIGQTPAESDFQLLEIARRLEMYGIRLHPAKDREGTKINLAVANTGILVFQGFTKINAFNWAKVRKLSFKRKRFLIKLRPDANSAYQDTLEFLMASRDFCKSFWKICVEHHAFFRLFEEPKPKPKPVLFSRGSSFRFSGRTQKQVLDYVKEGGHKKVQFERKHSKIHSIRSLASQPTELNSEVLEQSQQSTSLTFGEGAESPGGQSCRRGKEPKVSAGEPGSHPSPAPRRSPAGNKQADGAASAPTEEEEEVVKDRTQQSKPQPPQPSTGSLTGSPHLSELSVNSQGGVAPANVTLSPNLSPDTKQASPLISPLLNDQACPRTDDEDEGRRKRFPTDKAYFIAKEVSTTERTYLKDLEVITSWFQSTVSKEDAMPEALKSLIFPNFEPLHKFHTNFLKEIEQRLALWEGRSNAQIRDYQRIGDVMLKNIQGMKHLAAHLWKHSEALEALENGIKSSRRLENFCRDFELQKVCYLPLNTFLLRPLHRLMHYKQVLERLCKHHPPSHADFRDCRAALAEITEMVAQLHGTMIKMENFQKLHELKKDLIGIDNLVVPGRPGSFSLIRTPHLGQARRIPCAPERRPLLLVKEFIRLGSLSKLSGKGLQQRMFFLFNDVLLYTSRGLTASNQFKVHGQLPLYGMTIEESEDEWGVPHCLTLRGQRQSIIVAASSRSEMEKWVEDIQMAIDLAEKSSSPAPEFLASSPPDNKSPDEATAADQESEDDLSASRTSLERQAPHRGNTMVHVCWHRNTSVSMVDFSIAVENQLSGNLLRKFKNSNGWQKLWVVFTNFCLFFYKSHQDNHPLASLPLLGYSLTIPSESENIQKDYVFKLHFKSHVYYFRAESEYTFERWMEVIRSATSSASRPHVLSHKESLVY

SEQ ID NO: 43926 - protein, 749 aa, Homo sapiens
MSDDALFTYWNKASTSELMDFFTISEVCLHQFQYMGKRYIASVRKISSVLGISVDNGYGHSDADVLHQSLLEANIATEVCLTALDTLSLFTLAFKNQLLADHGHNPLMKKVFDVYLCFLQKHQSETALKNVFTALRSLIYKFPSTFYEGRADMCAALCYEILKCCNSKLSSIRTEASQLLYFLMRNNFDYTGKKSFVRTHLQVIISVSQLIADVVGIGGTRFQQSLSIINNCANSDRLIKHTSFSSDVKDLTKRIRTVLMATAQMKEHENDPEMLVDLQYSLAKSYASTPELRKTWLDSMARIHVKNGDLSEAAMCYVHVTALVAEYLTRKGVFRQGCTAFRVITPNIDEEASMMEDVGMQDVHFNEDVLMELLEQCADGLWKAERYELIADIYKLIIPIYEKRRDFERLAHLYDTLHRAYSKVTEVMHSGRRLLGTYFRVAFFGQGFFEDEDGKEYIYKEPKLTPLSEISQRLLKLYSDKFGSENVKMIQDSGKVNPKDLDSKYAYIQVTHVIPFFDEKELQERKTEFERSHNIRRFMFEMPFTQTGKRQGGVEEQCKRRTILTAIHCFPYVKKRIPVMYQHHTDLNPIEVAIDEMSKKVAELRQLCSSAEVDMIKLQLKLQGSVSVQVNAGPLAYARAFLDDTNTKRYPDNKVKLLKEVFRQFVEACGQALAVNERLIKEDQLEYQEEMKANYREMAKELSEIMHEQICPLEEKTSVLPNSLHIFNAISGTPTSTMVHGMTSSSSVV

SEQ ID NO: 43927 - protein, 231 aa, Homo sapiens
MQYFFGITAASNLPSGFLAPVFALFVPFYCSIPRVQVAQILGPLSITNKTLIYILGLQLFTSGSYIWIVAISGLMSGLCYDSKMFQVHQVLCIPSWMAKFFSWTLEPIFSSSEPTSEARIGMGATLDIQRQQRMELLDRQLMFSQFAQGRRQRQQQGGMINWNRLFPPLRQRQNVNYQGGRQSEPAAPPLEVSEEQVARLMEMGFSRGDALEALRASNNDLNVATNFLLQH

SEQ ID NO: 43928 - protein, 518 aa, Homo sapiens [sequence omitted]

SEQ ID NO: 43929 - protein, 207 aa, Homo sapiens
MLPKVESPEEIQWFADKFSFHLKGRKLEQPMNLIPFVETAMGLLNFKAVCEETLKVGPQVGLFLDAVVFGGEDFRASIGATSSKETLDILYARQKIVVIAKAFGLQAIDLVYIDFRDGAGLLRQSREGAAMGFTGKQVIHPNQIAVVQEQFSPSPEKIKWAEELIAAFKEHQQLGKGAFTFQGSMIDMPLLKQAQNTVTLATSIKEK

SEQ ID NO: 43930 - protein, 35 aa, Homo sapiens
MRPPGFRNFLLLASSLLFAGLSAVPQSFSPSLRPW

SEQ ID NO: 43931 - protein, 56 aa, Homo sapiens
MRPPGFRNFLLLASSLLFAGLSAVPQSFSPSLRSWPGAACRLSRAESERRLHLPRD

SEQ ID NO: 43932 - protein, 10 aa, Homo sapiens
MLGWMEWKCM

SEQ ID NO: 43933 - protein, 400 aa, Homo sapiens
MYASYKNLKVEIKFQGQHVAKSPYILKGPVYHENCDCPLQDSAAWLREMNCPETIAQIQRDLAHFPAVDPEKIAVEIPKRFGQRQSLCHYTLKDNKVYIKTHGEHVGFRIFMDAILLSLTRKVKMPDVELFVNLGDWPLEKKKSNSNIHPIFSWCGSTDSKDIVMPTYDLTDSVLETMGRVSLDMMSVQANTGPPWESKNSTAVWRGRDSRKERLELVKLSRKHPELIDAAFTNFFFFKHDENLYGPIVKHISFFDFFKHKYQINIDGTVAAYRLPYLLVGDSVVLKQDSIYYEHFYNELQPWKHYIPVKSNLSDLLEKLKWAKDHDEEAKKIAKAGQEFARNNLMGDDIFCYYFKLFQEYANLQVSEPQIREGMKRVEPQTEDDLFPCTCHRKKTKDEL

SEQ ID NO: 43934 - protein, 41 aa, Homo sapiens
MLQWQEQLKFIIVLRERSSAVLGRDSRTPGDPHLGAPGHGL

SEQ ID NO: 43935 - protein, 832 aa, Homo sapiens [sequence omitted]

SEQ ID NO: 43936 - protein, 264 aa, Homo sapiens [sequence omitted]

SEQ ID NO: 43937 - protein, 1506 aa, Homo sapiens
MGPVGAPGRPGPPGPPGPKGQQGNRGLGFYGVKGEKGDVGQPGPNGIPSDTLHPIIAPTGVTFHPDQYKGEKGSEGEPGIRGISLKGEEGIMGFPGLRGYPGLSGEKGSPGQKGSRGLDGYQGPDGPRGPKGEAGDPGPPGLPAYSPHPSLAKGARGDPGFPGAQGEPGSQGEPGDPGLPGPPGLSIGDGDQRRGLPGEMGPKGFIGDPGIPALYGGPPGPDGKRGPPGPPGLPGPPGPDGFLFGLKGAKGRAGFPGLPGSPGARGPKGWKGDAGECRCTEGDEAIKGLPGLPGPKGFAGINGEPGRKGDRGDPGQHGLPGFPGLKGVPGNIGAPGPKGAKGDSRTITTKGERGQPGVPGVPGMKGDDGSPGRDGLDGFPGLPGPPGDGIKGPPGDPGYPGIPGTKGTPGEMGPPGLGLPGLKGQRGFPGDAGLPGPPGFLGPPGPAGTPGQIDCDTDVKRAVGGDRQEAIQPGCIGGPKGLPGLPGPPGPTGAKGLRGIPGFAGADGGPGPRGLPGDAGREGFPGPPGFIGPRGSKGAVGLPGPDGSPGPIGLPGPDGPPGERGLPGEVLGAQPGPRGDAGVPGQPGLKGLPGDRGPPGFRGSQGMPGMPGLKGQPGLPGPSGQPGLYGPPGLHGFPGAPGQEGPLGLPGIPGREGLPGDRGDPGDTGAPGPVGMKGLSGDRGDAGFTGEQGHPGSPGFKGIDGMPGTPGLKGDRGSPGMDGFQGMPGLKGRPGFPGSKGEAGFFGIPGLKGLAGEPGFKGSRGDPGPPGPPPVILPGMKDIKGEKGDEGPMGLKGYLGAKGIQGMPGIPGLSGIPGLPGRPGHIKGVKGDIGVPGIPGLPGFPGVAGPPGITGFPGFIGSRGDKGAPGRAGLYGEIGATGDFGDIGDTINLPGRPGLKGERGTTGIPGLKGFFGEKGTEGDIGFPGITGVTGVQGPPGLKGQTGFPGLTGPPGSQGELGRIGLPGGKGDDGWPGAPGLPGFPGLRGIRGLHGLPGTKGFPGSPGSDIHGDPGFPGPPGERGDPGEANTLPGPVGVPGQKGDQGAPGERGPPGSPGLQGFPGITPPSNISGAPGDKGAPGIFGLKGYRGPPGPPGSAALPGSKGDTGNPGAPGTPGTKGWAGDSGPQGRPGVFGLPGEKGPRGEQGFMGNTGPTGAVGDRGPKGPKGDPGFPGAPGTVGAPGIAGIPQKIAVQPGTVGPQGRRGPPGAPGEMGPQGPPGEPGFRGAPGKAGPQGRGGVSAVPGFRGDEGPIGHQGPIGQEGAPGRPGSPGLPGMPGRSVSIGYLLVKHSQTDQEPMCPVGMNKLWSGYSLLYFEGQEKAHNQDLGLAGSCLARFSTMPFLYCNPGDVCYYASRNDKSYWLSTTAPLPMMPVAEDEIKPYISRCSVCEAPAIAIAVHSQDVSIPHCPAGWRSLWIGYSFLMHTAAGDEGGGQSLVSPGSCLEDFRATPFIECNGGRGTCHYYANKYSFWLTTIPEQSFQGSPSADTLKAGLIRTHISRCQVCMKNL

SEQ ID NO: 43938 - protein, 50 aa, Homo sapiens
MENTLQLVRNIIPPLSSTKHKGQDGRIGVVGGCQEYTGAPYFAAISALKV

SEQ ID NO: 43939 - protein, 433 aa, Homo sapiens [sequence omitted]

SEQ ID NO: 43940 - protein, 57 aa, Homo sapiens
MIGCDNDECPIEWFHFSCVGLNHKPKGKWYCPKCRGENEKTMDKALEKSKKERAYNR

SEQ ID NO: 43941 - protein, 471 aa, Homo sapiens
MPQMKTLYLTYCANHPSAVNVLTEHSEELGEFMETKGASSPGILVLTTGLSKPFMRLDKYPTLLKELERHMEDYHTDRQDIQKSMAAFKNLSAQCQEVRKRKELELQILTEAIRNWEGDDIKTLGNVTYMSQVLIQCAGSEEKNERYLLLFPNVLLMLSASPRMSGFIYQGKLPTTGMTITKLEDSENHRNAFEISGSMIERILVSCNNQQDLQEWVEHLQKQTKVTSVGNPTIKPHSVPSHTLPSHPVTPSSKHADSKPAPLTPAYHTLPHPSHHGTPHTTINWGPLEPPKTPKPWSLSCLRPAPPLRPSAALCYKEDLSKSPKTMKKLLPKRKPERKPSDEEFASRKSTAALEEDAQILKVIEAYCTSAKTRQTLNSSSRKESAPQVLLPEEEKIIVEETKSNGQTVIEEKSLVDTVYALKDEVQELRQDNKKMKKSLEEEQRARKDLEKLVRKVLKNMNDPAWDETNL

SEQ ID NO: 43942 - protein, 678 aa, Homo sapiens
MTRSRREGDTGGTMEITEAALVRDILYVFQGIDGKNIKMNNTENCYKVEGKANLSRSLRDTAVRLSELGWLHNKIRRYTDQRSLDRSFGLVGQSFCAALHQELREYYRLLSVLHSQLQLEDDQGVNLGLESSLTLRRLLVWTYDPKIRLKTLAALVDHCQGRKGGELASAVHAYTKTGDPYMRSLVQHILSLVSHPVLSFLYRWIYDGELEDTYHEFFVASDPTVKTDRLWHDKYTLRKSMIPSFMTMDQSRKVLLIGKSINFLHQVCHDQTPTTKMIAVTKSAESPQDAADLFTDLENAFQGKIDAAYFETSKYLLDVLNKKYSLLDHMQAMRRYLLLGQGDFIRHLMDLLKPELVRPATTLYQHNLTGILETAVRATNAQFDSPEILRRLDVRLLEVSPGDTGWDVFSLDYHVDGPIATVFTRECMSHYLRVFNFLWRAKRMEYILTDIRKGHMCNAKLLRNMPEFSGVLHQCHILASEMVHFIHQMQYYITFEVLECSWDELWNKVQQAQDLDHIIAAHEVFLDTIISRCLLDSDSRALLNQLRAVFDQIIELQNAQDAIYRAALEELQRRLQFEEKKKQREIEGQWGVTAAEEEEENKRIGEFKESIPKMCSQLRILTHFYQGIVQQFLVLLTTSSDESLRFLSFRLDFNEHYKAREPRLRVSLGTRGRRSSHT

SEQ ID NO: 43943 - protein, 171 aa, Homo sapiens
MACTQAGERTAIYCLTQNEWRLDEATDSFFQNPDSLHRESMRNAVDKKKLERLYGRYKDPQDENKIGVDGIQQFCDDLSLDPASISVLVIAWKFRAATQCEFSRKEFLDGMTELGCDSMEKLKALLPRLEQELKDTAKFKDFYQFTFTFAKNPGQKGLGSPPFLNVKALHH

SEQ ID NO: 43944 - protein, 481 aa, Homo sapiens
MQSRQWVRDSCRKLSGLLRQKNAVLNKLKTAIGAVEKDVGLSDEEKLFQVHTFEIFQKELNESENSVFQAVYGLQRALQGDYKDVVNMKESSRQRLEALREAAIKEETEYMELLAAEKHQVEALKNMQHQNQSLSMLDEILEDVRKAADRLEEEIEEHAFDDNKSVKGVNFEAVLRVEEEEANSKQNITKREVEDDLGLSMLIDSQNNQYILTKPRDSTIPRADHHFIKDIVTIGMLSLPCGWLCTAIGLPTMFGYIICGVLLGPSGLNSIKSIVQVETLGEFGVFFTLFLVGLEFSPEKLRKVWKISLQGPCYMTLLMIAFGLLWGHLLRIKPTQSVFISTCLSLSSTPLVSRFLMGSARGDKEGDIDYSTVLLGMLVTQDVQLGLFMAVMPTLIQAGASASSSIVVEVLRILVLIGQILFSLAAVFLLCLVIKKYLIGPYYRKLHMESKGNKEILILGISAFIFLMLTVILKLCVIYVI

SEQ ID NO: 43945 - protein, 369 aa, Homo sapiens
MLTGKALNVTPDYSPKAEELLSKAVKLEPELVEAWNQLGEVYWKKGDVAAAHTCFSGALTHCRNKVSLQNLSMVLRQLRTDTEDEHSHHVMDSVRQAKLAVQMDVHDGRSWYILGNSYLSLYFSTGQNPKISQQALSAYAQAEKVDRKASSNPDLHLNRATLHKYEESYGEALEGFSRAAALDPAWPEPRQREQQLLEFLDRLTSLLESKGKVKTKKLQSMLGSLRPAHLGPCSDGHYQSASGQKVTLELKPLSTLQPGVNSGAVILGKVVFSLTTEEKVPFTFGLVDSDGPCYAVMVYNIVQSWGVLIGDSVAIPEPNLRLHRIQHKGKDYSFSSVRVETPLLLVVNGKPQGSSSQAVATVASRPQCE

SEQ ID NO: 43946 - protein, 8 aa, Homo sapiens
MFREQTTS

SEQ ID NO: 43947 - protein, 48 aa, Homo sapiens
MNARSKNVGWRLDYFLLSHSLLPALCDSKIRSKALGSDHCPITLYLAL

SEQ ID NO: 43948 - protein, 116 aa, Homo sapiens
MYQRFLRQHVHPEETGGSDRYCNLMMQRRKMTLYHCKRFNTFIHEDIWNIRSICSTTNIQCKNGKMNCHEGVVKVTDCRDTGSSRAPNCRYRAIASTRRVVIACEGNPQVPVHFDG

SEQ ID NO: 43949 - protein, 1327 aa, Homo sapiens
MVGHQPSTLPPELPSGPPGLPSPPLPEEALGTRSPGDGHNAPVEGPEGEYVELLEVTLPVRGSPTDAEGSPGLSRVRTVPTRKGAGGKGRHRRHRAWMHQKGLGPRGQDGARPPGEGSSTGASPESPPGAEAVPEAAVLEVSEPPAEAVGEASGSCPLRPGELRGGGGGGQGAEGPPGTPRRTGKGNRRKKRAAGRGALSRGGDSAPLSPGDKEDASHQEALGNLPSPSEHKLPECHLVKEEYEGSGKPESEPKELKTAGEKEPQLSEACGPTEEGAGERELEGPGLLCMAGHTGPEGPLSDTPTPPLETVQEGKGDNIPEEALAVSVSDHPDVAWDLMASGFLILTGGVDQSGRALLTITPPCPPEEPPPSRDTLNTTLHYLHSLLRPDLQTLGLSVLLDLRQAPPLPPALIPALSQLQDSGDPPLVQRLLILIHDDLPTELCGFQGAEVLSENDLKRVAKPEELQWELGGHRDPSPSHWVEIHQEVVRLCRLCQGVLGSVRQAIEELEGAAEPEEEEAVGMPKPLQKVLADPRLTALQRDGGAILMRLRSTPSSKLEGQGPATLYQEVDEAIHQLVRLSNLHVQQQEQRQCLRRLQQVLQWLSGPGEEQLASFAMPGDTLSALQETELRFRAFSAEVQERLAQAREALALEENATSQKVLDIFEQRLEQVESGLHRALRLQRFFQQAHEWVDEGFARLAGAGPGREAVLAALALRRAPEPSAGTFQEMRALALDLGSPAALREWGRCQARCQELERRIQQHVGEEASPRGYRRRRADGASSGGAQWGPRSPSPSLSSLLLPSSPGPRPAPSHCSLAPCGEDYEEEGPELAPEAEGRPPRAVLIRGLEVTSTEVVDRTCSPREHVLLGRARGPDGPWGVGTPRMERKRSISAQQRLVSELIACEQDYVATLSEPVPPPGPELTPELRGTWAAALSARERLRSFHRTHFLRELQGCATHPLRIGACFLRHGDQFSLYAQYVKHRHKLENGLAALSPLSKGSMEAGPYLPRALQQPLEQLTRYGRLLEELLREAGPELSSECRALGAAVQLLREQEARGRDLLAVEAVRGCEIDLKEQGQLLHRDPFTVICGRKKCLRHVFLFEHLLLFSKLKGPEGGSEMFVYKQAFKTADMGLTENIGDSGLCFELWFRRRRAREAYTLQATSPEIKLKWTSSIAQLLWRQAAHNKELRVQQMVSMGIGNKPFLDIKALGERTLSALLTGRAARTRASVAVSSFEHAGPSLPGLSPGACSLPARVEEEAWDLDVKQISLAPETLDSSGDVSPGPRNSPSLQPPHPGSSTPTLASRGILGLSRQSHARALSDPTTPL

SEQ ID NO: 43950 - protein, 982 aa, Homo sapiens
MVFCDDKIIFMASKKKVEFLKQIANTKGNENANGAPAITLLIREKNESNKSSFDKMIEAIKESKNGKKIGVFSKDKFPGEFMKSWNDCLNKEGFDKIDISAVVAYTIAVKEDGELNLMKKAASITSEVFNKFFKERVMEIVDADEKVRHSKLAESVEKAIEEKKYLAGADPSTVEMCYPPIIQSGGNYNLKFSVVSDKNHMHFGAITCAMGIRFKSYCSNLVRTLMVDPSQEVQENYNFLLQLQEELLKELRHGVKICDVYNAVMDVVKKQKPELLNKITKNLGFGMGIEFREGSLVINSKNQYKLKKGMVFSINLGFSDLTNKEGKKPEEKTYALFIGDTVLVDEDGPATVLTSVKKKVKNVGIFLKNEDEEEEEEEKDEAEDLLGRGSRAALLTERTRNEMTAEEKRRAHQKELAAQLNEEAKRRLTEQKGEQQIQKARKSNVSYKNPSLMPKEPHIREMKIYIDKKYETVIMPVFGIATPFHIATIKNISMSVEGDYTYLRINFYCPGSALGRNEGNIFPNPEATFVKEITYRASNIKAPGEQTVPALNLQNAFRIIKEVQKRYKTREAEEKEKEGIVKQDSLVINLNRSNPKLKDLYIRPNIAQKRMQGSLEAHVNGFRFTSVRGDKVDILYNNIKHALFQPCDGEMIIVLHFHLKNAIMFGKKRHTDVQFYTEVGEITTDLGKHQHMHDRDDLYAEQMEREMRHKLKTAFKNFIEKVEALTKEELEFEVPFRDLGFNGAPYRSTCLLQPTSSALVNATEWPPFVVTLDEVELIHFERVQFHLKNFDMVIVYKDYSKKVTMINAIPVASLDPIKEWLNSCDLKYTEGVQSLNWTKIMKTIVDDPEGFFEQGGWSFLEPEGEGSDAEEGDSESEIEDETFNPSEDDYEEEEEDSDEDYSSEAEESDYSKESLGSEEESGKDWDELEEEARKADRESRYEEEEEQSRSMSRKRKASVHSSGRGSNRGSRHSSAPPKKKRK

SEQ ID NO: 43951 - protein, 304 aa, Homo sapiens
MHVDLGLPWWGAIAACTVFARCLIFPLIVTGQREAARIHNHLPEIQKFSSRIREAKLAGDHIEYYKASSEMALYQKKHGIKLYKPLILPVTQAPIFISFFIALREMANLPVPSLQTGGLWWFQDLTVSDPIYILPLAVTATMWAVLELGAETGVQSSDLQWMRNVIRMMPLITLPITMHFPTAVFMYWLSSNLFSLVQVSCLRIPAVRTVLKIPQRVVHDLDKLPPREGFLESFKKGWKNAEMTRQLREREQRMRNQLELAARGPLRQTFTHNPLLQPGKDNPPNIPSSSSKPKSKYPWHDTLG

SEQ ID NO: 43952 - protein, 634 aa, Homo sapiens [sequence omitted]

SEQ ID NO: 43953 - protein, 590 aa, Homo sapiens
MAVGGAGGSRVSSGRDLNCVPEIADTLGAVAKQGFDFLCMPVFHPRFKREFIQEPAKNRPGPQTRSDLLLSGRAFLLPLNQEDNTNLARVLTNHIHTGHHSSMFWMRVPLVAPEDLRDDIIENAPTTHTEEYSGEEKTWMWWHNFRTLCDYSKRIAVALEIGADLPSNHVIDRWLGEPIKAAILPTSIFLTNKKGFPVLSKMHQRLIFRLLKLEVQFIITGTNHHSEKEFCSYLQYLEYLSQNRPPPNAYELFAKGYEDYLQSPLQPLMDNLESQTYEVFEKDPIKYSQYQQAIYKCLLDRVPEEEKDTNVQVLMVLGAGRGPLVNASLRAAKQADRRIKLYAVEKNPNAVVTLENWQFEEWGSQVTVVSSDMREWVAPEKADIIVSELLGSFADNELSPECLDGAQHFLKDDGVSIPGEYTSFLAPISSSKLYNEVRACREKDRDPEAQFEMPYVVRLHNFHQLSAPQPCFTFSHPNRDPMIDNNRYCTLEFPVEVNTVLHGFAGYFETVLYQDITLSIRPETHSPGMFSWFPILFPIKQPITVREGQTICVRFWRCSNSKKVWYEWAVTAPVCSAIHNPTGRSYTIGL

SEQ ID NO: 43954 - protein, 275 aa, Homo sapiens
MQRNLPRAIFISIPLVTFVYVFANVAYVTAMSPQELLASNAVAVTFGEKLLGVMAWIMPISVALSTFGGVNGSLFTSSRLFFAGAREGHLPSVLAMIHVKRCTPIPALLFTCISTLLMLVTSDMYTLINYVGFINYLFYGVTVAGQIVLRWKKPDIPRPIKINLLFPIIYLLFWAFLLVFSLWSEPVVCGIGLAIMLTGVPVYFLGVYWQHKPKCFSDFIELLTLVSQKMCVVVYPEVERGSGTEEANEDMEEQQQPMYQPTPTKDKDVAGQPQP

SEQ ID NO: 43955 - protein, 254 aa, Homo sapiens [sequence omitted]

SEQ ID NO: 43956 - protein, 727 aa, Homo sapiens
MLGYPAHFGQMECLKLIASSRFTDKRVGYLGAMLLLDERHDAHLLITNSIKNDLSQGIQPVQGLALCTLSTMGSAEMCRDLAPEVEKLLLQPSPYVRKKAILTAVHMIRKVPELSSVFLPPCAQLLHERHHGILLGTITLITELCERSPAALRHFRKVVPQLVHILRTLVTMGYSTEHSISGVSDPFLQVQILRLLRILGRNHEESSETMNDLLAQVATNTDTSRNAGNAVLFETVLTIMDIRSAAGLRVLAVNILGRFLLNSDRNIRYVALTSLLRLVQSDHSAVQRHRPTVVECLRETDASLSRRALELSLALVNSSNVRAMMQELQAFLESCPPDLRADCASGILLAAERFAPTKRWHIDTILHVLTTAGTHVRDDAVANLTQLIGGAQELHAYSVRRLYNALAEDISQQPLVQVAAWCIGEYGDLLLAGNCEEIEPLQVDEEEVLALLEKVLQSHMSLPATRGYALTALMKLSTRLCGDNNRIRQVVSIYGSCLDVELQQRAVEYDTLFRKYDHMRAAILEKMPLVERDGPQADEEAKESKEAAQLSEAAPVPTEPQASQLLDLLDLLDGASGDVQHPPHLDPSPGGALVHLLDLPCVPPPPAPIPDLKVFEREGVQLNLSFIRPPENPALLLITITATNFSEGDVTHFICQAAVPKSLQLQLQAPSGNTVPARGGLPITQLFRILNPNKAPLRLKLRLTYDHFHQSVQEIFEVNNLPVESWQ

SEQ ID NO: 43957 - protein, 413 aa, Homo sapiens
MLHQRERGLCHRGSFSLGEQSRVISHFLPNDLGFTDSYSQKAFCGIYSKDGQIFMSACQDQTIRLYDCRYGRFRKFKSIKARDVGWSVLDVAFTPDGNHFLYSSWSDYIHICNIYGEGDTHTALDLRPDERRFAVFSIAVSSDGREVLGGANDGCLYVFDREQNRRTLQIESHEDDVNAVAFADISSQILFSGGDDAICKVWDRRTMREDDPKPVGALAGHQDGITFIDSKGDARYLISNSKDQTIKLWDIRRFSSREGMEASRQAATQQNWDYRWQQVPKKAWRKLKLPGDSSLMTYRGHGVLHTLIRCRFSPIHSTGQQFIYSGCSTGKVVVYDLLSGHIVKKLTNHKACVRDVSWHPFEEKIVSSSWDGNLRLWQYRQAEYFQDDMPESEECASAPAPVPQSSTPFSSPQ

SEQ ID NO: 43958 - protein, 887 aa, Homo sapiens
MLQLSEFDPLLREIAPGPLTTPSVPGSTPGPCFLCGSAPGTLHCPSCKQALCPACDHLFHGHPSRAHHLRQTLPGVLQGTHLSPSLPASAQPRPQSTSLLALGDSSLSSPNPASAHLPWHCAACAMLNEPWAVLCVACDRPRGCKGLGLGTEGPQGTGGLEPDLARGRWACQSCTFENEAAAVLCSICERPRLAQPPSLVVDSRDAGICLQPLQQGDALLASAQSQVWYCIHCTFCNSSPGWVCVMCNRTSSPIPAQHAPRPYASSLEKGPPKPGPPRRLSAPLPSSCGDPEKQRQDKMREEGLQLVSMIREGEAAGACPEEIFSALQYSGTEVPLQWLRSELPYVLEMVAELAGQQDPGLGAFSCQEARRAWLDRHGNLDEAVEECVRTRRRKVQELQSLGFGPEEGSLQALFQHGGDVSRALTELQRQRLEPFRQRLWDSGPEPTPSWDGPDKQSLVRRLLAVYALPSWGRAELALSLLQETPRNYELGDVVEAVRHSQDRAFLRRLLAQECAVCGWALPHNRMQALTSCECTICPDCFRQHFTIALKEKHITDMVCPACGRPDLTDDTQLLSYFSTLDIQLRESLEPDAYALFHKKLTEGVLMRDPKFLWCAQCSFGFIYEREQLEATCPQCHQTFCVRCKRQWEEQHRGRSCEDFQNWKRMNDPEYQAQGLAMYLQENGIDCPKCKFSYALARGGCMHFHCTQCRHQFCSGCYNAFYAKNKCPEPNCRVKKSLHGHHPRDCLFYLRDWTALRLQKLLQDNNVMFNTEPPAGARAVPGGGCRVIEQKEVPNGLRDEACGKETPAGYAGLCQAHYKEYLVSLINAHSLDPATLYEVEELETATERYLHVRPQPLAGEDPPAYQARLLQKLTEEVPLGQSIPRRRK

SEQ ID NO: 43959 - protein, 696 aa, Homo sapiens
MDIDKVDELMTDITEQQEVAQQISDAISRPMGFGDDVDEDELLEELEELEQEELAQELLNVGDKEEEPSVKLPSVPSTHLPAGPGSTALRMTVVGNPRSWSCQWLPILILLLGTGHGPGVEGVTHYKAGDPVILYVNKVGPYHNPQETYHYYQLPVCCPEKIRHKSLSLGEVLDGDRMAESLYEIRFRENVEKRILCHMQLSSAQVEQLRQAIEELYYFEFVVDDLPIRGFVGYMEESGFLPHSHKIGLWTHLDFHLEFHGDRIIFANVSVRDVKPHSLDGLRPDEFLGLTHTYSVRWSETSVERRSDRRRGDDGGFFPRTLEIHWLSIINSMVLVFLLVGFVAVILMRVLRNDLARYNLDEETTSAGSGDDFDQGDNGWKIIHTDVFRFPPYRGLLCAVLGVGAQFLALGTGIIVMALLGMFNVHRHGAINSAAILLYALTCCISGYVSSHFYRQIGGERWVWNIILTTSLFSVPFFLTWSVVNSVHWANGSTQALPATTILLLLTVWLLVGFPLTVIGGIFGKNNASPFDAPCRTKNIAREIPPQPWYKSTVIHMTVGGFLPFSAISVELYYIFATVWGREQYTLYGILFFVFAILLSVGACISIALTYFQLSGEDYRWWWRSVLSVGSTGLFIFLYSVFYYARRSNMSGAVQTVEFFGYSLLTGYVFFLMLGTISFFSSLKFIRYIYVNLKMD

SEQ ID NO: 43960 - protein, 402 aa, Homo sapiens
MAESLYEIRFRENVEKRILCHMQLSSAQVEQLRQAIEELYYFEFVVDDLPIRGFVGYMEESGFLPHSHKIGLWTHLDFHLEFHGDRIIFANVSVRDVKPHSLDGLRPDEFLGLTHTYSVRWSETSVERRSDRRRGDDGGFFPRTLEIHWLSIINSMVLVFLLVGFVAVILMRVLRNDLARYNLDEETTSAGSGDDFDQGDNGWKIIHTDVFRFPPYRGLLCAVLGVGAQFLALGTGIIVMALLGMFNVHRHGAINSAAILLYALTCCISGYVSSHFYRQIGGERWVWNIILTTSLFSVPFFLTWSVVNSVHWANGSTQALPATTILLLLTVWLLVGFPLTVIGGIFGKNNASPFDAPCRTKNIAREIPPQPWYKSTVIHMTVGGFLPFRYPPFIPWLLLSGS

SEQ ID NO: 43961 - protein, 357 aa, Homo sapiens
MLLLSVLLPASILVAEKFSLFTAVHKHYSLVQWQEFAGQNPDCLEHLAASSGTGSSDFEQLEQILEAIPQVKYICLDVANGYSEHFVEFVKDVRKRFPQHTIMAGNVVTGEMVEELILSGADIIKVGIGPGSVCTTRKKTGVGYPQLSAVMECADAAHGLKGHIISDGGCSCPGDVAKAFGAGADFVMLGGMLAGHSESGGELIERDGKKYKLFYGMSSEMAMKKYAGGVAEYRYVWRPRSLVIVWRQNSWLLRGGWYSSQRSMVNRGSMLGSVEKSLGLRNPEGEDNKVFPTLRASEGKTVEVPFKGDVEHTIRDILGGIRSTCTYVGAAKLKELSRRTTFIRVTQQVNPIFSEAC

SEQ ID NO: 43962 - protein, 275 aa, Homo sapiens
MQPGVSITSSLAWRQYGVDMGWLLPECSVTDSVNLAEPMEQNPPQQQRLALHNPLPKAKPGTHLPQGPSSRTHPEPLAGRHFNLAPLGRRRVQSQWASTRGGHKERPTVMLFPFRNLGSPTQVISKPESKEEHAIYTADLAMGTRAASTGKSKSPCQTLGGRALKENPVDLPATEQKENCLDCYMDPLRLSLLPPRARKPVCPPSLCSSVITIGDLVLDSDEEENGQGEGKESLENYQKTKFDTLIPTLCEYLPPSGHGAIPVSSCDCRDSSRPL

SEQ ID NO: 43963 - protein, 1884 aa, Homo sapiens [sequence omitted]

SEQ ID NO: 43964 - protein, 123 aa, Homo sapiens
MLLPFRLGLGGPIGSGHQFFPWIHIGDLAGILTHALEANHVHGVLNGVAPSSATNAEFAQTLGAALGRRAFIPLPSAVVQAVFGRQRAIMLLEGQKVIPQRTLATGYQYSFPELGAALKEIVA

SEQ ID NO: 43965 - protein, 259 aa, Homo sapiens
MSSGIWQRGKEEEGVYGFLIEDIRKEVNRASKLKCCVCKKNGASIGCVAPRCKRSYHFPCGLQRECIFQFTGNFASFCWDHRPVQIITSNNYRESLPCTICLEFIEPIPSYNILRSPCCKNAWFHRDCLQVQAINAGVFFFRCTICNNSDIFQKEMLRMGIHIPENKWEIKRCQCCGSSGTHLACSSLRSWEQNWECLECRGIIYNSGEFQKAKKHVLPNSNNVGITDCLLEESSPKLPRQSPGSQSKDLLSSERESLL

SEQ ID NO: 43966 - protein, 566 aa, Homo sapiens
MPTFESEETKDTEAPTAPQNSQLTWKQGRQLLRQYLQEVGYTDTILDVRSQRVRSLLGLSNSEPNGSVETKNLEQILNGGESPKQKGQEIKRSSGDVLETFNFLENADDSDEDEENDMIEGIPEGKDKHRMNKHKIGNEGLAADLTDDPDTEEALKEFDFLVTAEDGEGAGEARSSGDGTEWAEPITFPSGGGKSFIMGSDDVLLSVLGLGDLADLTVTNDADYSYDLPANKDAFRKTWNPKYTLRSHFDGVRALAFHPVEPVLVTASEDHTLKLWNLQKTVPAKKSASLDVEPIYTFRAHIGPVLSLAISSNGEQCFSGGIDATIQWWNMPSPSVDPYDTYEPNVLAGTLVGHTDAVWGLAYSGIKNQLLSCSADGTVRLWNPQEKLPCICTYNGDKKHGIPTSVDFIGCDPAHMVTSFNTGSAVIYDLETSQSLVILSSQVDSGLQSNNHINRVVSHPTLPVTITAHEDRHIKFFDNKTGKMIHSMVAHLDAVTSLAVDPNGIYLMSGSHDCSIRLWNLDSKTCVQEITAHRKKLDESIYDVAFHSSKAYIASAGADALAKVFV

SEQ ID NO: 43967 - protein, 650 aa, Homo sapiens
MPTFESEETKDTEAPTAPQNSQLTWKQGRQLLRQYLQEVGYTDTILDVRSQRVRSLLGLSNSEPNGSVETKNLEQILNGGESPKQKGQEIKRSSGDVLETFNFLENADDSDEDEENDMIEGIPEGKDKHRMNKHKIGNEGLAADLTDDPDTEEALKEFDFLVTAEDGEGAGEARSSGDGTEWDKDDLSPTAEVWDVDQGLISKLKEQYKKERKGKKGVKRANRTKLYDMIADLGDDELPHIPSGIINQSRSASTRMTDHEGARAEEAEPITFPSGGGKSFIMGSDDVLLSVLGLGDLADLTVTNDADYSYDLPANKDAFRKTWNPKYTLRSHFDGVRALAFHPVEPVLVTASEDHTLKLWNLQKTVPAKKSASLDVEPIYTFRAHIGPVLSLAISSNGEQCFSGGIDATIQWWNMPSPSVDPYDTYEPNVLAGTLVGHTDAVWGLAYSGIKNQLLSCSADGTVRLWNPQEKLPCICTYNGDKKHGIPTSVDFIGCDPAHMVTSFNTGSAVIYDLETSQSLVILSSQVDSGLQSNNHINRVVSHPTLPVTITAHEDRHIKFFDNKTGKMIHSMVAHLDAVTSLAVDPNGIYLMSGSHDCSIRLWNLDSKTCVQEITAHRKKLDESIYDVAFHSSKAYIASAGADALAKVFV

SEQ ID NO: 43968 - protein, 203 aa, Homo sapiens
MNLKGNPELSQSNLMRPLLNYGIACMSMGFLVEESEPVVWRGLMVMSAIEKLLRQVDWGQLDYLVVDMPPGTGDVQLSVSQNIPITGAVIVSTPQDIALMDAHKGAEMFRRVHVPVLGLVQNMSVFQCPKCKHKTHIFGADGARKLAQTLGLEVLGDIPLHLNIREASDTGQPIVFSQPESDEAKAYLRIAVEVVRRLPSPSE

SEQ ID NO: 43969 - protein, 1123 aa, Homo sapiens
MECDDLKELPEPTPVKTRLPPEIFGDALMVLEFLNAFGELFDLQDEFPDGVTLEVLEEALVGNDSEGPLCELLFFFLTAIFQAIAEEEEEVAKEQLTDADTKGCSLKSLDLDSCTLSEILRLHILASGADVTSANAKYRYQKRGGFDATDDACMELRLSNPSLVKKLSSTSVYDLTPGEKMKILHALCGKLLTLVSTRDFIEDYVDILRQAKQEFRELKAEQHRKEREEAAARIRKRKEEKLKEQEQKMKEKQEKLKEDEQRNSTADISIGEEEREDFDTSIESKDTEQKELDQDMVTEDEDDPGSHKRGRRGKRGQNGFKEFTRQEQINCVTREPLTADEEEALKQEHQRKEKELLEKIQSAIACTNIFPLGRDRMYRRYWIFPSIPGLFIEEDYSGLTEDMLLPRPSSFQNNVQSQDPQVSTKTGEPLMSESTSNIDQGPRDHSVQLPKPVHKPNRWCFYSSCEQLDQLIEALNSRGHRESALKETLLQEKSRICAQLARFSEEKFHFSDKPQPDSKPTYSRGRSSNAYDPSQMCAEKQLELRLRDFLLDIEDRIYQGTLGAIKVTDRHIWRSALESGRYELLSEENKENGIIKTVNEDVEEMEIDEQTKVIVKDRLLGIKTETPSTVSTNASTPQSVSSVVHYLAMALFQIEQGIERRFLKAPLDASDSGRSYKTVLDRWRESLLSSASLSQVFLHLSTLDRSVIWSKSILNARCKICRKKGDAENMVLCDGCDRGHHTYCVRPKLKTVPEGDWFCPECRPKQRSRRLSSRQRPSLESDEDVEDSMGGEDDEVDGDEEEGQSEEEEYEVEQDEDDSQEEEEVSLPKRGRPQVRLPVKTRGKLSSSFSSRGQQQEPGRYPSRSQQSTPKTTVSSKTGRSLRKINSAPPTETKSLRIASRSTRHSHGPLQADVFVELLSPRRKRRGRKSANNTPENSPNFPNFRVIATKSSEQSRSVNIASKLSLQESESKRRCRKRQSPEPSPVTLGRRSSGRQGGVHELSAFEQLVVELVRHDDSWPFLKLVSKIQVPDYYDIIKKPIALNIIREKVNKCEYKLASEFIDDIELMFSNCFEYNPRNTSEAKAGTRLQAFFHIQAQKLGLHVTPSNVDQVSTPPAAKKSRI

SEQ ID NO: 43970 - protein, 1155 aa, Homo sapiens [sequence omitted]

SEQ ID NO: 43971 - protein, 450 aa, Homo sapiens
MKRSAIDLEEMASGLNKRKMIQHAVFKELVKLVDPGVKAWTPTKGKQNVIMFVGLQGSGKTTTCSKLAYYYQRKGWKTCLICADTFRAGAFDQLKQNATKARIPFYGSYTEMDPVIIASEGVEKFKNENFEIIIVDTSGRHKQEDSLFEEMLQVANAIQPDNIVYVMDASIGQACEAQAKAFKDKVDVASVIVTKLDGHAKGGGALSAVAATKSPIIFIGTGEHIDDFEPFKTQPFISKLLGMGDIEGLIDKVNELKLDDNEALIEKLKHGQFTLRDMYEQFQNIMKMGPFSQILGMIPGFGTDFMSKGNEQESMARLKKLMTIMDSMNDQELDSTDGAKVFSKQPGRIQRVARGSGVSTRDVQELLTQYTKFAQMVKKMGGIKGLFKGGDMSKNVSQSQMAKLNQQMAKMMDPRVLHHMGGMAGLQSMMRQFQQGAAGNMKGMMGFNNM

SEQ ID NO: 43972 - protein, 474 aa, Homo sapiens
MLKEVCTALLEADVNIKLVKQLRENVKSAIDLEEMASGLNKRKMIQHAVFKELVKLVDPGVKAWTPTKGKQNVIMFVGLQGSGKTTTCSKLAYYYQRKGWKTCLICADTFRAGAFDQLKQNATKARIPFYGSYTEMDPVIIASEGVEKFKNENFEIIIVDTSGRHKQEDSLFEEMLQVANAIQPDNIVYVMDASIGQACEAQAKAFKDKVDVASVIVTKLDGHAKGGGALSAVAATKSPIIFIGTGEHIDDFEPFKTQPFISKLLGMGDIEGLIDKVNELKLDDNEALIEKLKHGQFTLRDMYEQFQNIMKMGPFSQILGMIPGFGTDFMSKGNEQESMARLKKLMTIMDSMNDQELDSTDGAKVFSKQPGRIQRVARGSGVSTRDVQELLTQYTKFAQMVKKMGGIKGLFKGGDMSKNVSQSQMAKLNQQMAKMMDPRVLHHMGGMAGLQSMMRQFQQGAAGNMKGMMGFNNM

SEQ ID NO: 43973 - protein, 2021 aa, Homo sapiens
MEEGEKREEENGTNTADHVRNSSWAKNGSYQGALHNASEEATEQNIRAGTQAVLQVFIINSSNIFLLEPANEIKNLLDEHTDMCKRILNIYRYMVVQVSMDKKTWEQMLLVLLRVTESVLKMPSQAFLQFQGKKNMTLAGRLAGPLFQTLIVAWIKANLNVYISRELWDDLLSVLSSLTYWEELATEWSLTMETLTKVLARNLYSLDLSDLPLDKLSEQKQKKHKGKGVGHEFQKVSVDKSFSRGWSRDQPGQAPMRQRSATTTGSPGTEKARSIVRQKTVDIDDAQILPRSTRVRHFSQSEETGNEVFGALNEEQPLPRSSSTSDILEPFTVERAKGAVPVIDSSSRHAPSLQSSTEASSITRSTESHITDTHSRESSLEVGDSIYDHLCHLIGPVELADSAFEQIQYIDLEGDDDLLSTLKEYFKENQENHSKNETGKDPASQEVTIAVNRGERLSLDKLECTDQETESENITSFVGTPENLQFQKEPNSAVFMSNIAPNQSDSFFRTQTSEKSKQLNTDKQPSEPSLDSPCDKEKRKHLYRQAATELDACVDVTLVEKLKSVQINEKITVPHVMRAKKATLKAPVNRRMPHVTSTSKLSPTKRSLSETVTHRAKIMKIATKKRNSVHVTFRPSTESVQFYNPLENKEAPWKMRLRKLGGFSSGSSNSSTSNTHTSTNSATELVKPGVYRPLDTLGTASVSSKTVKESTEIPTTILQKEGIASSQLGSRSTLRSSSHEAGLQQGSLGGVYKTVVHALSKPKANVSPQRQNRMPPEAPLRDLYSHVMGYFGRKAAVNKEDMSQKLPPLNSDIGGSSANVPDLMDEFIAERLRSGNASTMTRRGSSPGSLEIPKDLPDILNKQNQMRPIDDPGVPSEWTSPASAGSSDLISSDSHSDSFSAFQYDGRKFDNFGFGTDTGVTSSADVDSGSGHHQSAEEQEVASLTTLHIDSETSSLNQQAFSAEVATITGSESASPVHSPLGSRSQTPSPSTLNIDHMEQKDLQLDEKLHHSVLQTPDDLEISEFPSECCSVMAGGTLTGWHADVATVMWRRMLGILGDVNSIMDPEIHAQVFDYLCELWQNLAKIRDNLGISTDNLTSPSPPVLIPPLRILTPWLFKATMLTDKYKQGKLHAYKLICNTMKRRQDVSPNRDFLTHFYNIMHCGLLHIDQDIVNTIIKHCSPQFFSLGLPGATMLIMDFIVAAGRVASSAFLNAPRVEAQVLLGSLVCFPNLYCELPSLHPNIPDVAVSQFTDVKELIIKTVLSSARDEPSGPARCVALCSLGIWICEELVHESHHPQIKEALNVICVSLKFTNKTVAHVACNMLHMLVHYVPRLQIYQPDSPLKIIQILIATITHLLPSTEASSYEMDKRLVVSLLLCLLDWIMALPLKTLLQPFHATGAESDKTEKSVLNCIYKVLHGCVYGAQCFSNPRYFPMSLSDLASVDYDPFMHLESLKEPEPLHSPDSERSSKLQPVTEVKTQMQHGLISIAARTVITHLVNHLGHYPMSGGPAMLTSQVCENHDNHYSESTELSPELFESPNIQFFVLNNTTLVSCIQIRSEENMPGGGLSAGLASANSNVRIIVRDLSGKYSWDSAILYGPPPVSGLSEPTSFMLSLSHQEKPEEPPTSNECLEDITVKDGLSLQFKRFRETVPTWDTIRDEEDVLDELLQYLGVTSPECLQRTGISLNIPAPQPVCISEKQENDVINAILKQHTEEKEFVEKHFNDLNMKAVEQDEPIPQKPQSAFYYCRLLLSILGMNSWDKRRSFHLLKKNEKLLRELRNLDSRQCRETHKIAVFYVAEGQEDKHSILTNTGGSQAYEDFVAGLGWEVNLTNHCGFMGGLQKNKSTGLTTPYFATSTVEVIFHVSTRMPSDSDDSLTKKLRHLGNDEVHIVWSEHTRDYRRGIIPTEFGDVLIVIYPMKNHMFSIQIMKKPEVPFFGPLFDGAIVNGKVLPIMVRATAINASRALKSLIPLYQNFYEERARYLQTIVQHHLEPTTFEDFAAQVFSPAPYHHLPSDADH

SEQ ID NO: 43974 - protein, 306 aa, Homo sapiens
MEVDYAENEGSSSEDEDTESSSVSEDGDSSEMDDEDCERRRMECLDEMSNLEKQFTDLKDQLYKERLSQVDAKLQEVIAGKAPEYLEPLATLQENMQIRTKVAGIYRELCLESVKNKYECEIQASRQHCESEKLLLYDTVQSELEEKIRRLEEDRHSIDITSELWNDELQSRKKRKDPFSPDKKKPVVVSGPYIVYMLQDLDILEDWTTIRKAMATLGPHRVKTEPPVKLEKHLHSARSEEGRLYYDGEWYIRGQTICIDKKDECPTSAVITTINHDEVWFKRPDGSKSKLYISQLQKGKYSIKHS

SEQ ID NO: 43975 - protein, 303 aa, Homo sapiens
MKTATNIYILNLAIADELLMLSVPFLVTSTLLRHWPFGALLCRLVLSVDAVNMFTSIYCLTVLSVDRYVAVVHPIKAARYRRPTVAKVVNLGVWVLSLLVILPIVVFSRTAANSDGTVACNMLMPEPAQRWLVGFVLYTFLMGFLLPVGAICLCYVLIIAKMRMVALKAGWQQRKRSERKITLMVMMVVMVFVICWMPFYVVQLVNVFAEQDDATVSQLSVILGYANSCANPILYGFLSDNFKRSFQRILCLSWMDNAAEEPVDYYATALKSRAYSVEDFQPENLESGGVFRNGTCTSRITTL

SEQ ID NO: 43976 - protein, 66 aa, Homo sapiens
MKFICKDFWTTVFKKQIDNLRTNHQYLAFTCGLIRGGLSNLGIKSIVTAEVSSMPACKFQVMIQKL

SEQ ID NO: 43977 - protein, 94 aa, Homo sapiens
MKFICKDFWTTVFKKQIDNLRTNHQGIYVLQDNKFRLLTQMSAGKQYLEHASKYLAFTCGLIRGGLSNLGIKSIVTAEVSSMPACKFQVMIQKL

SEQ ID NO: 43978 - protein, 1136 aa, Homo sapiens
MEQDRIPEVHVPPSSAVSGVKEWFGLGGEQAEEKAFESVIEPVQESSFRSRKIAVEDENDLEELNNGEPQTEHQQESESEIDSVPKTQSELASESEHIPKPQSTGWFGGGFTSYLGFGDEDTGLELIAEESNPPLQDFPNSISSDKEATVPCTEILTEKKDTITNDSLSLKPSWFDFGFAILGFAYAKEDKIMLDDRKNEEDGGADEHEHPLTSELDPEKEQEIETIKIIETEDQIDKKPVSEKTDESDTIPYLKKFLYNFDNPWNFQNIPKETELPFPKQILDQNNVIENEETGEFSIDNYPTDNTKVMIFKSSYSLSEDASEFQILKYLFQIDVYDFMNSAFSPIVILTERVVAALPEGMRPDSNLYGFPWELVICAAVVGFFAVLFFLWRSFRSVRSRLYVGREKKLALMLSGLIEEKSKLLEKFSLVQKEYEGYEVESSLKDASFEKEATEAQSLEATCEKLNRSNSELEDEILCLEKELKEEKSKHSEQDELMADISKRIQSLEDESKSLKSQVAEAKMTFKIFQMNEERLKIAIKDALNENSQLQESQKQLLQEAEVWKEQVSELNKQKVTFEDSKVHAEQVLNDKESHIKTLTERLLKMKDWAAMLGEDITDDDNLELEMNSESENGAYLDNPPKGALKKLIHAAKLNASLKTLEGERNQIYIQLSEVDKTKEELTEHIKNLQTEQASLQSENTHFENENQKLQQKLKVMTELYQENEMKLHRKLTVEENYRLEKEEKLSKVDEKISHATEELETYRKRAKDLEEELERTIHSYQGQIISHEKKAHDNWLAARNAERNLNDLRKENAHNRQKLTETELKFELLEKDPYALDVPNTAFGREHSPYGPSPLGWPSSETRAFLSPPTLLEGPLRLSPLLPGGGGRGSRGPGNPLDHQITNERGESSCDRLTDPHRAPSDTGSLSPPWDQDRRMMFPPPGQSYPDSALPPQRQDRFCSNSGRLSGPAELRSFNMPSLDKMDGSMPSEMESSRNDTKDDLGNLNVPDSSLPAENEATGPGFVPPPLAPIRGPLFPVDARGPFLRRGPPFPPPPPGAMFGASRDYFPPGDFPGPPPAPFAMRNVYPPRGFPPYLPPRPGFFPPPPHSEGRSEFPSGLIPPSNEPATEHPEPQQET

SEQ ID NO: 43979 - protein, 427 aa, Homo sapiens [sequence omitted]

SEQ ID NO: 43980 - protein, 1318 aa, Homo sapiens
MKIFLKLMKEVGPQQVLCLLLEHLKHKHSRVREEVVNICICSLLTYPSEDFDLPKLSFDLAPALVDSKRRVRQAALEAFAVLASSMGSGKTSILFKAVDTVELQDNGDGVMNAVQARLARKTLPRLTEQGFVEYAVLMPSSAGGRSNHLAHGADTDWLLAGNRTQSAHCHCGDHVRDSMHIYGSYSPTICTRRVLSAGKGKNKLPWENEQPGIMGENQTSTSKDIEQFSTYDFIPSAKLKLSQGMPVNDDLCFSRKRVSRNLFQNSRDFNPDCLPLCAAGTTGTHQTNLSGKCAQLGFSQICGKTGSVGSDLQFLGTTSSHQEKVYASLNFGSKTQQTFGSQTECTSSNGQNPSPGAYILPSYPVSSPRTSPKHTSPLIISPKKSQDNSVNFSNSWPLKSFEGLSKPSPQKKLVSQKSSDPTGRNHGENSQEKPPVQLTPALVRSPSSRRGLNGTKPVPPIPRGISLLPDKADLSTVGHKKKEPDDIWKCEKDSLPIDLSELNFKDKDLDQEEMHSSLRSLRNSAAKKRAKLSGSTSDLESPDSAMKLDLTMDSPSLSSSPNINSYSESGVYSQESLTSSLSTTPQGKRIMSDIFPTFGSKPCPTRLSSAKKKISHIAEQSPSAGSSSNPQQISSFDFTTTKALSEDSVVVVGKGVFGSLSSAPATCSQSVISSVENGDTFSIKQSIEPPSGIYGRSVQQNISSYLDVENEKDAKVSISKSTYNKMRQKRKEEKELFHNKDCEKKEKNSWERMRHTGTEKMASESETPTGAISQYKERMPSVTHSPEIMDLSELRPFSKPEIALTEALRLLADEDWEKKIEGLNFIRCLAAFHSEILNTKLHETNFAVVQEVKNLRSGVSRAAVVCLSDLFTYLKKSMDQELDTTVKVLLHKAGESNTFIREDVDKALRAMVNNVTPARAVVSLINGGQSHLHIAVRRCTAQHLSDVLEFMEPERILSAAKDMAERILPAAAKFAQDSSQETRYYGRKMLFFMMCHPNFEKMLEKYVPSKDLPYIKDSVRNLQQKGLGEIPLDTPSAKGRRSHTGSVGNTRSSSVSRDAFNSAERAVTEVREVTRKSVPRNSLESAEYLKLITGLLNAKDFRDRINGIKQLLSDTENNQDLVVGNIVKIFDAFKSRLHDSNSKVNLVALETMHKMIPLLRDHLSPIINMLIPAIVDNNLNSKNPGIYAAATNVVQALSQHVDNYLLLQPFCTKAQFLNGKAKQDMTEKLADIVTELYQRKPHATEQKVLVVLWHLLGNMTNSGSLPGAGGNIRTATAKLSKALFAQMGQNLLNQAASQPPHIKKSLEELLDMTILNEL

SEQ ID NO: 43981 - protein, 519 aa, Homo sapiens
MKIFLKLMKEVGPQQVLCLLLEHLKHKHSRVREEVVNICICSLLTYPSEDFDLPKLSFDLAPALVDSKRRVRQAALEAFAVLASSMGSGKTSILFKAVDTVELQDNGDGVMNAVQARLARKTLPRLTEQGFVEYAVLMPSSAGGRSNHLAHGADTDWLLAGNRTQSAHCHCGDHVRDSMHIYGSYSPTICTRRVLSAGKGKNKLPWENEQPGIMGENQTSTSKDIEQFSTYDFIPSAKLKLSQGMPVNDDLCFSRKRVSRNLFQNSRDFNPDCLPLCAAGTTGTHQTNLSGKCAQLGFSQICGKTGSVGSDLQFLGTTSSHQEKVYASLNFGSKTQQTFGSQTECTSSNGQNPSPGAYILPSYPVSSPRTSPKHTSPLIISPKKSQDNSVNFSNSWPLKSFEGLSKPSPQKKLVSQKSSDPTGRNHGENSQEKPPVQLTPALVRSPSSRRGLNGTKPVPPIPRGISLLPDKADLSTVGHKKKEPDDIWKCEKDSLPIDLSELNFKDKDLDQEEVRTKYF

SEQ ID NO: 43982 - protein, 528 aa, Homo sapiens
MFYPTSTQMVYRRGLQAIPLSVDLWIHYINFLKETLDPGDPETNNTIRGTFEHAVLAAGTDFRSDRLWEMYINWENEQGNLREVTAIYDRILGIPTQLYSHHFQRFKEHVQNNLPRDLLTGEQFIQLRRELASVNGHSGDDGPPGDDLPSGIEDITDPAKLITEIENMRHRIIEIHQEMFNYNEHEVSKRWTFEEGIKRPYFHVKPLEKAQLKNWKEYLEFEIENGTHERVVVLFERCVISCALYEEFWIKYAKYMENHSIEGVRHVFSRACTIHLPKKPMVHMLWAAFEEQQGNINEARNILKTFEECVLGLAMVRLRRVSLERRHGNLEEAEHLLQDAIKNAKSNNESSFYAVKLARHLFKIQKNLPKSRKVLLEAIERDKENTKLYLNLLEMEYSGDLKQNEENILNCFDKAVHGSLPIKMRITFSQRKVEFLEDFGSDVNKLLNAYDEHQTLLKEQDSLKRKAENGSEEPEEKKAHTEDTTSSSTQMIDGDLQANQAVYNYSAWYQYNYQNPWNYGQYYPPPPT

SEQ ID NO: 43983 - protein, 308 aa, Homo sapiens [sequence omitted]

SEQ ID NO: 43984 - protein, 47 aa, Homo sapiens
MVFGGSKDDLLALDTGHCNDLLIFQTQPYSLLRSKGQFCEKGIWLLG

SEQ ID NO: 43985 - protein, 162 aa, Homo sapiens
MRILMLGLDAAGKTTILYKLKLGQSVTTIPTVGFNVETVTYKNVKFNVWDVGGQDKIRPLWRHYYTGTQGLIFVVDCADRDRIDEARQELHRIINDREMRDAIILIFANKQDLPDAMKPHEIQEKLGLTRIRDRNWYVQPSCATSGDGLYEGLTWLTSNYKS

SEQ ID NO: 43986 - protein, 611 aa, Homo sapiens [sequence omitted]

SEQ ID NO: 43987 - protein, 51 aa, Homo sapiens
MEANIDRIKVSKAAADLMAYCEAHAKEDPLLTPVPASENPFREKKFFCAIL

SEQ ID NO: 43988 - protein, 126 aa, Homo sapiens
MDGFDTLHRVKMIMATNRPDTLDPALLRPGRLDRKIHIDLPNEQARLDILKIHAGPITKHGEIDYEAIVKLSDGFNGADLRNVCTEAGMFAIRADHDFVVQEDFMKAVRKVADSKKLESKLDYKPV

SEQ ID NO: 43989 - protein, 179 aa, Homo sapiens
MKSKLPVLQKHGITHIICIRQNIEANFIKPNFQQLFRYLVLDIADNPVENIIRFFPMTKEFIDGSLQMGGKVLVHGNAGISRSAAFVIAYIMETFGMKYRDAFAYVQERRFCINPNAGFVHQLQEYEAIYLAKLTIQMMSPLQIERSLSVHSGTTGSLKRTHEEEDDFGTMQVATAQNG

SEQ ID NO: 43990 - protein, 673 aa, Homo sapiens [sequence omitted]

SEQ ID NO: 43991 - protein, 272 aa, Homo sapiens
MRQVKNPFGLEITNPSSASITTGITLTTDCLEDSLLTCYWGCSVQKLYEALQKHVYCFRISTPQALEDALYSEYLYQEQYFIKKDSKEEIYCQLPRDTKIEDFGTVPRSRYPLVALLTLADEDDREIYDIISMVSVIHIPDRTYKLSCRILYQYLLLAQGQFHDLKQLFMSANNNFTPSNNSSSEEKNTDRSLLEKVGLSESEVEPSEENSKDCVVCQNGTVNWVLLPCRHTCLCDGCVKYFQQCPMCRQFVQESFALCSQKEQDKDKPKTL

SEQ ID NO: 43992 - protein, 629 aa, Homo sapiens
MFRDQVGVLAGWFKGWNECEQTVALLSLLKRVSQTQARFLQLCLEHSLADCAELHVLEREANSPGIINQWQQESKDKVISLLLTHLPLLKPGNLDAKVEYMKLLPKILAHSIEHNQHIEESRQLLSYALIHPATSLEDRSALAMWLNHLEDRTSTSFGGQNRGRSDSVDYGQTHYYHQRQNSDDKLNGWQNSRDSGICINASNWQDKSMGCENGHVPLYSSSSVPTTINTIGTSTSTNVPAWLKSLRLHKYAALFSQMTYEEMMALTECQLEAQNVTKGARHKIVISIQKLKERQNLLKSLERDIIEGGSLRIPLQELHQMILTPIKAYSSPSTTPEARRREPQAPRQPSLMGPESQSPDCKDGAAATGATATPSAGASGGLQPHQLSSCDGELAVAPLPEGDLPGQFTRVMGKVCTQLLVSRPDEENISSYLQLIDKCLIHEAFTETQKKRLLSWKQQVQKLFRSFPRKTLLDISGYRQQRNRGFGQSNSLPTAGSVGGGMGRRNPRQYQIPSRNVPSARLGLLGTSGFVSSNQRNTTATPTIMKQGRQNLWFANPGGSNSMPSRTHSSVQRTRSLPVHTSPQNMLMFQQPEFQLPVTEPDINNRLESLCLSMTEHALGDGVDRTSTI

SEQ ID NO: 43993 - protein, 717 aa, Homo sapiens
MFRDQVGVLAGWFKGWNECEQTVALLSLLKRVSQTQARFLQLCLEHSLADCAELHVLEREANSPGIINQWQQESKDKVISLLLTHLPLLKPGNLDAKVEYMKLLPKILAHSIEHNQHIEESRQLLSYALIHPATSLEDRSALAMWLNHLEDRTSTSFGGQNRGRSDSVDYGQTHYYHQRQNSDDKLNGWQNSRDSGICINASNWQDKSMGCENGHVPLYSSSSVPTTINTIGTSTSTILSGQAHHSPLKRSVSLTPPMNVPNQPLGHGWMSHEDLRARGPQCLPSDHAPLSPQSSVASSGSGGSEHLEDQTTARNTFQEEGSGMKDVPAWLKSLRLHKYAALFSQMTYEEMMALTECQLEAQNVTKGARHKIVISIQKLKERQNLLKSLERDIIEGGSLRIPLQELHQMILTPIKAYSSPSTTPEARRREPQAPRQPSLMGPESQSPDCKDGAAATGATATPSAGASGGLQPHQLSSCDGELAVAPLPEGDLPGQFTRVMGKVCTQLLVSRPDEENISSYLQLIDKCLIHEAFTETQKKRLLSWKQQVQKLFRSFPRKTLLDISGYRQQRNRGFGQSNSLPTAGSVGGGMGRRNPRQYQIPSRNVPSARLGLLGTSGFVSSNQRNTTATPTIMKQGRQNLWFANPGGSNSMPSRTHSSVQRTRSLPVHTSPQNMLMFQQPEFQLPVTEPDINNRLESLCLSMTEHALGDGVDRTSTI

SEQ ID NO: 43994 - protein, 665 aa, Homo sapiens
MFRDQVGVLAGWFKGWNECEQTVALLSLLKRVSQTQARFLQLCLEHSLADCAELHVLEREANSPGIINQWQQESKDKVISLLLTHLPLLKPGNLDAKVEYMKLLPKILAHSIEHNQHIEESRQLLSYALIHPATSLEDRSALAMWLNHLEDRTSTSFGGQNRGRSDSVDYGQTHYYHQRQNSDDKLNGWQNSRDSGICINASNWQDKSMGCENGHVPLYSSSSVPTTINTIGTSTSTNVPAWLKSLRLHKYAALFSQMTYEEMMALTECQLEAQNVTKGARHKIVISIQKLKERQNLLKSLERDIIEGGSLRIPLQELHQMILTPIKAYSSPSTTPEARRREPQAPRQPSLMGPESQSPDCKDGAAATGATATPSAGASGGLQPHQLSSCDGELAVAPLPEGDLPGQFTRVMGKVCTQLLVSRPDEENISSYLQLIDKCLIHEAFTETQKKRLLSWKQQVQKLFRSFPRKTLLDISGYRQQRNRGFGQSNSLPTAGSVGGGMGRRNPRQYQIPSRNVPSARLGLLGTSGFVSSNQRNTTATPTIMKQGRQNLWFANPGGSNSMPSRTHSSVQRTRSLPVHTSPQNMLMFQQPGSQVHSGLCLTDLRGWLSLSGAPSMPALTVPKSSQGEFQLPVTEPDINNRLESLCLSMTEHALGDGVDRTSTI

SEQ ID NO: 43995 - protein, 313 aa, Homo sapiens
MLDKCPFPPRSDLAFRWHFIKRHTAPINSKSDEWVSTDLSQTELRDGQLKRRNMEENINCFSHTNVQPCVITTDNALCREGPMTGSVMNLVSNNSIEDSDMDSDDEILTLCTSSRKRNKPKWDLDDEILQLETPPKYHTQIDYVHCLVPDLLQINNNPCYWGVMDKYAAEALLEGKPEGTFLLRDSAQEDYLFSVSFRRYSRSLHARIEQWNHNFSFDAHDPCVFHSPDITGLLEHYKDPSACMFFEPLLSTPLIRTFPFSLQHICRTVICNCTTYDGIDALPIPSSMKLYLKEYHYKSKVRVLRIDAPEQQC

SEQ ID NO: 43996 - protein, 375 aa, Homo sapiens [sequence omitted]

SEQ ID NO: 43997 - protein, 1329 aa, Homo sapiens [sequence omitted]

SEQ ID NO: 43998 - protein, 1272 aa, Homo sapiens [sequence omitted]

SEQ ID NO: 43999 - protein, 370 aa, Homo sapiens [sequence omitted]

SEQ ID NO: 44000 - protein, 228 aa, Homo sapiens
MKAVENSSTAIGIRCKDGVVFGVEKLVLSKLYEEGSNKRLFNVDRHVGMAVAGLLADARSLADIAREEASNFRSNFGYNIPLKHLADRVAMYVHAYTLYSAVRPFGCSFMLGSYSVNDGAQLYMIDPSGVSYGYWGCAIGKARQAAKTEIEKLQMKEMTCRDIVKEVAKIIYIVHDEVKDKAFELELSWVGELTNGRHEIVPKDIREEAEKYAKESLKEEDESDDDNM

SEQ ID NO: 44001 - protein, 330 aa, Homo sapiens
MHTGGEPLRIVLAGCPEVSGPTLLAKRRYMRQHLDHVRRRLMFEPRGHRDMYGAVLVPSELPDAHLGVLFLHNEGYSSMCGHAVLALGRFALDFGLVPAPPAGTREARVNIHCPCGLVTAFVACEDGRSHGPVRFHSVPAFVLATDLMVDVPGHGKVMVDIAYGGAFYAFVTAEKLGLDICSAKTRDLVDAASAVTEAVKAQFKINHPDSEDLAFLYGTILTDGKDAYTKEPTTNICVFADEQVDRSPTGSGVTARIALQYHKGLLELNQMRAFKSSATGSVFTGKAVREAKCGDFKAVIVEVSGQAHYTGTASFIIEDDDPLRDGFLLK

SEQ ID NO: 44002 - protein, 188 aa, Homo sapiens
MLSDWYTMLYNPSPDYVTTVHCTHEAVYPLYTIVFIYYAFCLVLMMLLRPLLVKKIACGLGKSDRFKSIYAALYFFPILTVLQAVGGGLLYYAFPYIILVLSLVTLAVYMSASEIENCYDLLVRKKRLIVLFSHWLLHAYGIISISRVDKLEQDLPLLALVPTPALFYLFTAKFTEPSRILSEGANGH

SEQ ID NO: 44003 - protein, 688 aa, Homo sapiens
MDHTFSTTSKDGEGSCYTSLISDICYPPQEDSTYFTGILQKENGHVTISESPEELGTPGPSLPDVPGIESRGLFSSDSGIEMTPAESTEVNKILADPLDQMKAEAYKYIDITRPEEVKHQEQHHPELEDKDLDFKNKDTDISIKPEGVREPDKPAPVEGKIIKDHLLEESTFAPYIDDLSEEQRRAPQITTPVKITLTEIEPSVETTTQEKTPEKQDICLKPSPDTVPTVTVSEPEDDSPGSITPPSSGTEPSAAESQGKGSISEDELITAIKEAKGLSYETAENPRPVGQLADRPEVKARSGPPTIPSPLDHEASSAESGDSEIELVSEDPMAAEDALPSGYVSFGHVGGPPPSPASPSIQYSILREEREAELDSELIIESCDASSASEESPKREQDSPPMKPSALDAIREETGVRAEERAPSRRGLAEPGSFLDYPSTEPQPGPELPPGDGALEPETPMLPRKPEEDSSSNQSPAATKGPGPLGPGAPPPLLFLNKQKAIDLLYWRDIKQTGIVFGSFLLLLFSLTQFSVVSVVAYLALAALSATISFRIYKSVLQAVQKTDEGHPFKAYLELEITLSQEQIQKYTDCLQFYVNSTLKELRRLFLVQDLVDSLKFAVLMWLLTYVGALFNGLTLLLMAVVSMFTLPVVYVKHQAQIDQYLGLVRTHINAVVAKIQAKIPGAKRHAE

SEQ ID NO: 44004 - protein, 622 aa, Homo sapiens
MIAFLSLDSSLQGLHSVSVCIGFTRAFRMVWQNTENALLETVIVSTVHLISSTDIWWNRSLDTGLRLLLFAVTVLLTSWTEKKQRRKTTATLCILNIVFSPFVLVIIVFSTLLSSPLLPLFTLPVFLVGFPRPIQSWPGAAGTTACVCADTVYYYQMVPRLTAVLQTAMAAGSLGLLLPGSHYLGRFQDRLMWIMILECGYTYCSINIKGLELQETSCHTAEARRVDEVFEDAFEQEYTRVCSLNEHFGNVLTPCTVLPVKLYSDARNVLSGIIDSHENLKEFKGDLIKVLVWILVQYCSKRPGMKENVHNTENKGKAPLMLPALNTLPPPKSPEDIDSLNSETFNDWSDDNIFDDEPTIKKVIEEKHQLKDLPGTNLFIPGSVESQRVGDHSTGTVPENDLYKAVLLGYPAVDKGKQEDMPYIPLMEFSCSHSHLVCLPAEWRTSCMPSSKMKEMSSLFPEDWYQFVLRQLECYHSEEKASNVLEEIAKDKVLKDFYVHTVMTCYFSLFGIDNMAPSPGHILRVYGGVLPWSVALDWLTEKPELFQLALKAFRYTLKLMIDKASLGPIEDFRELIKYLEEYERDWYIGLVSDEKWKEAILQEKPYLFSLGYDSNMVRLKNF

SEQ ID NO: 44005 - protein, 282 aa, Homo sapiens
MLPSFGFTQEQVACVCEVLQQGGNLERLGRFLWSLPACDHLHKNESVLKAKAVVAFHRGNFRELYKILESHQFSPHNHPKLQQLWLKAHYVEAEKLRGRPLGAVGKYRVRRKFPLPRTIWDGEETSYCFKEKSRGVLREWYAHNPYPSPREKRELAEATGLTTTQVSNWFKNRRQRDRAAEAKERENTENNNSSSNKQNQLSPLEGGKPLMSSSEEEFSPPQSPDQNSVLLLQGNMGHARSSNYSLPGLTASQPSHGLQTHQHQLQDSLLGPLTSSLVDLGS

SEQ ID NO: 44006 - protein, 760 aa, Homo sapiens
MESASEGQEAHREVAGGAAVGLSPPAPAPFPLEPGDAATAAARVSGEEGAVAAAAAGAAADQVQLHSELLGRHHHAAAAAAQTPLAFSPDHVACVCEALQQGGNLDRLARFLWSLPQSDLLRGNESLLKARALVAFHQGIYPELYSILESHSFESANHPLLQQLWYKARYTEAERARGRPLGAVDKYRLRRKFPLPRTIWDGEETVYCFKEKSRNALKELYKQNRYPSPAEKRHLAKITGLSLTQVSNWFKNRRQRDRNPSETQSKSESDGNPSTEDESSKGHEDLSPHPLSSSSDGITNLSLSSHMEPVYMQQIGNAKISLSSSGVLLNGSLVPASTSPVFLNGNSFIQGPSGVILNGLNVGNTQAVALNPPKMSSNIVSNGISMTDILGSTSQDVKEFKVLQSSANSATTTSYSPSVPVSFPGLIPSTEVKREGIQTVASQDGGSVVTFTTPVQINQYGIVQIPNSGANSQFLNGSIGFSPLQLPPVSVAASQGNISVSSSTSDGSTFTSESTTVQQGKVFLSSLAPSAVVYTVPNTGQTIGSVKQEGLERSLVFSQLMPVNQNAQVNANLSSENISGSGLHPLASSLVNVSPTHNFSLSPSTLLNPTELNRDIADSQPMSAPVASKSTVTSVSNTNYATLQNCSLITGQDLLSVPMTQAALGEIVPTAEDQVGHPSPAVHQDFVQEHRLVLQSVANMKENFLSNSESKATSSLMMLDSKSKYVLDGMVDTVCEDLETDKKELAKLQTVQLDEDMQDL

SEQ ID NO: 44007 - protein, 375 aa, Homo sapiens
MGLQPGNISPTSKLVSRSTLRRQGKESSKEGNGIGVNSSNRLGIDNFEFIRVLGKGSFGKVMLARVKETGDLYAVKVLKKDVILQDDDVECTMTEKRILSLARNHPFLTQLFCCFQTPDRLFFVMEFVNGGDLMFHIQKSRRFDEARARFYAAEIISALMFLHDKGIIYRDLKLDNVLLDHEGHCKLADFGMCKEGICNGVTTATFCGTPDYIAPEILQEMLYGPAVDWWAMGVLLYEMLCGHAPFEAENEDDLFEAILNDEVVYPTWLHEDATGILKSFMTKNPTMRLGSLTQGGEHAILRHPFFKEIDWAQLNHRQIEPPFRPRIKSREDVSNFDPDFIKEEPVLTPIDEGHLPMINQDEFRNFSYVSPELQP

SEQ ID NO: 44008 - protein, 176 aa, Homo sapiens
MSYANDAFPEEYVPTVFDHYAVTVTVGGKQHLLGLYDTAGQEDYNQLRPLSYPNTDVFLICFSVVNPASYHNVQEEWVPELKDCMPHVPYVLIGTQIDLRDDPKTLARLLYMKEKPLTYEHGVKLAKAIGAQCYLECSALTQKGLKAVFDEAILTIFHPKKKKKRCSEGHSCCSII

SEQ ID NO: 44009 - protein, 203 aa, Homo sapiens [sequence omitted]

SEQ ID NO: 44010 - protein, 1184 aa, Homo sapiens
MEEPSSSEAPAKNGAGSLRSRHLPNSNNNSSSWLNVKGPLSPFNSRAAAGPAHHKLSYLGRVVREIVETERMYVQDLRSIVEDYLLKIIDTPGLLKPEQVSALFGNIENIYALNSQLLRDLDSCNSDPVAVASCFVERSQEFDIYTQYCNNYPNSVAALTECMRDKQQAKFFRDRQELLQHSLPLGSYLLKPVQRILKYHLLLQEIAKHFDEEEDGFEVVEDAIDTMTCVAWYINDMKRRHEHAVRLQEIQSLLINWKGPDLTTYGELVLEGTFRVHRVRNERTFFLFDKTLLITKKRGDHFVYKGNIPCSSLMLIESTRDSLCFTVTHYKHSKQQYSIQAKTVEEKRNWTHHIKRLILENHHATIPQKAKEAILEMDSYYPNRYRCSPERLKKAWSSQDEVSTNVRQGRRQSEPTKHLLRQLNEKARAAGMKGKGRRESESSRSSRRPSGRSPTSTEKRMSFESISSLPEVEPDPEAGSEQEVFSAVEGPSAEETPSDTESPEVLETQLDAHQGLLGMDPPGDMVDFVAAESTEDLKALSSEEEEEMGGAAQEPESLLPPSVLDQASVIAERFVSSFSRRSSVAQEDSKSSGFGSPRLVSRSSSVLSLEGSEKGLARHGSATDSLSCQLSPEVDISVGVATEDSPSVNGMEPPSPGCPVEPDRSSCKKKESALSTRDRLLLDKIKSYYENAEHHDAGFSVRRRESLSYIPKGLVRNSISRFNSLPRPDPEPVPPVGSKRQVGSRPTSWALFELPGPSQAVKGDPPPISDAEFRPSSEIVKIWEGMESSGGSPGKGPGQGQANGFDLHEPLFILEEHELGAITEESATASPESSSPTEGRSPAHLARELKELVKELSSSTQGELVAPLHPRIVQLSHVMDSHVSERVKNKVYQLARQYSLRIKSNKPVMARPPLQWEKVAPERDGKSPTVPCLQEEAGEPLGGKGKRKPVLSLFDYEQLMAQEHSPPKPSSAGEMSPQRFFFNPSAVSQRTTSPGGRPSARSPLSPTETFSWPDVRELCSKYASRDEARRAGGGRPRGPPVNRSHSVPENMVEPPLSGRVGRCRSLSTKRGRGGGEAAQSPGPLPQSKPDGGETLYVTADLTLEDNRRVIVMEKGPLPSPTAGLEESSGQGPSSPVALLGQVQDFQQSAECQPKEEGSRDPADPSQQGRVRNLREKFQALNSVG

SEQ ID NO: 44011 - protein, 659 aa, Homo sapiens
MALAMLMGSLNVTPLGMLSRPVCGIRGKTLIINLPGSKKGSQECFQFILPALPHAIDLLRDAIVKVKEVHDELEDLPSPPPPLSPPPTTSPHKQTEDKGVQCEEEEEEKKDSGVASTEDSSSSHITAAAIAAKKHPFYTSPAVVMAHGEQPIPGLINYSHHSTDERIPDSIISRGVQVLPRDTASLSTTPSESPRAQATSRLSTASCPTPKVQSRCSSKENILRASHSAVDITKVARRHRMSPFPLTSMDKAFITVLEMTPVLGTEIINYRDGMGRVLAQDVYAKDNLPPFPASVKDGYAVRAADGPGDRFIIGESQAGEQPTQTVMPGQVMRVTTGAPIPCGADAVVQVEDTELIRESDDGTEELEVRILVQARPGQDIRPIGHDIKRGECVLAKGTHMGPSEIGLLATVGVTEVEVNKFPVVAVMSTGNELLNPEDDLLPGKIRDSNRSTLLATIQEHGYPTINLGIVGDNPDDLLNALNEGISRADVIITSGGVSMGEKDYLKQVLDIDLHAQIHFGRVFMKPGLPTTFATLDIDGVRKIIFALPGNPVSAVVTCNLFVVPALRKMQGILDPRPTIIKARLSCDVKLDPRPEYHRCILTWHHQEPLPWAQSTGNQMSSRLMSMRSANGLLMLPPKTEQYVELHKGEVVDVMVIGRL

SEQ ID NO: 44012 - protein, 1298 aa, Homo sapiens
MEEKVKLSNLKNVDSEGSLHRKYQELLKAIKGKDELISQLEAQLEKQKQMRAEEAKTVQEKAAKIKEWVTLKLAKLEMENQHLKSHNQRLVEQVGSLQDALEAIQIAPSRKLLVPPYGAAEQDSVPSEPGIQPMGQDSGSQAQGLKAAVLAPSPGALQSKDSVSEAASPLEDSSSSTVHSGETVEAKPLQPHLGRESPPHQPCMKLLTFRCSSASWGEGLVTAQRGMLPGTKTSAREGGPGSSLTLPKVRAPGTPRDSIQLAKRHHSQPQVGHGHFGRVVNIETEAFSALHPSGLPELESRARSREEPEKMEMEEPPPAGKNEERESPKALGAELEEVELGNKPPTPPLHQFSSWESRIYAVATSGMRLSDMSPRSNTACCASSPPALVSPGSFSGLVYKNVTVPVYTALKGRATQISNMPFMDESSGSDDDCSSQASFRISVPSSESRKTSGLGSPRAIKRGVSMSSLSSEGDYAIPPDACSLDSDYSEPEHKLQRTSSYSTDGLGLGGESLEKSGYLLKMGSQVKTWKRRWFVLRQGQIMYYKSPSDVIRKPQGQVDLNSRCQIVRGEGSQTFQLISEKKTYYLTADSPSLLEEWIRVLQSLLKVQATGPPALLRGGTKPTVKGWLTKVKHGHSKVVWCALVGKIFYYYRSHEDKRPLGCLPVRDAHIEEVDRSCDSDEDYEAGGTRRLLSSHCTLVIHPTEHSPTYLLIGTKHEKDTWLYHLTVAAGGSSAKVGTAYEQLIGKLMDGEGDPDSPLWRHPMLCYSKDGLYASLTTLPSEALQTEALKLFKSCQLFINVPVEAASVDYHVSLAQTALQVCLVHPELQSEIYCQLMKQTSCRPPQKYSLMQCWQLLALCAPLFLPQHHFLWYVKQQLQRHADPRSETGQYATYCQRAVERTLRTGEREARPSRMEVVSILLRNPFHHSLPFSIPVHFTNGTYHVVGFDGSSTVDEFLQRLNQEIGMRKPSHSGFALFTDDPSGRDLEHCLQGSVKICDAISKWEQAMKELHPGKSEGGTRVVKLMYKNRLYFRSQVKGETDRERLLLASQTSREIVAGRFPINKELALEMAALMAQVEYGDLEKPALPGPGGTSPAKAQHLLQQVLDRFHPRRYRHGAPAEQLRHLADMLTTKWATLQGCSPPECIRIYLTVARKWPFFGAKLFAAQPAQLSSKENALVWIAVNEDGVSILDHNTMQVHITYPYSSVTTFGGCRDDFMLVIRSIPDKSSGKSHIEKLIFRMAAPKIAEATFIMASYMNHCTTTVNPPTNPPGACQLWELDGRQFFSSVSCATKGPTLL

SEQ ID NO: 44013 - protein, 126 aa, Homo sapiens [sequence omitted]

SEQ ID NO: 44014 - protein, 125 aa, Homo sapiens
MILSAAIFITLLGLLGYLHFVKIDQETLLIIDSLGIQMTSSYASGKESTTFIEMGKVKDIVINEAIYMKVIYYLCILLKDPVEPHGISQVVPVFQSAKPRLDCLIEVYRSCQEILAHQKATSTSP

SEQ ID NO: 44015 - protein, 706 aa, Homo sapiens
MSVRFNSNGTQLLALRRRLPPVLYDIHSRLPVFQFDNQGYFNSCTMKSCCFAGDRDQYILSGSDDFNLYMWRIPADPEAGGIGRVVNGAFMVLKGHRSIVNQVRFNPHTYMICSSGVEKIIKIWSPYKQPGCTGDLDGRIEDDSRCLYTHEEYISLVLNSGSGLSHDYANQSVQEDPRMMAFFDSLVRREIEGWSSDSDSDLSESTILQLHAGVSERSGYTDSESSASLPRSPPPTVDESADNAFHLGPLRVTTTNTVASTPPTPTCEDAASRQQRLSALRRYQDKRLLALSNESDSEENVCEVELDTDLFPRPRSPSPEDESSSSSSSSSSEDEEELNERRASTWQRNAMRRRQKTTREDKPSAPIKPTNTYIGEDNYDYPQIKVDDLSSSPTSSPERSTSTLEIQPSRASPTSDIESVERKIYKAYKWLRYSYISYSNNKDGETSLVTGEADEGRAGTSHKDNPAPSSSKEACLNIAMAQRNQDLPPEGCSKDTFKEETPRTPSNGPGHEHSSHAWAEVPEGTSQDTGNSGSVEHPFETKKLNGKALSSRAEEPPSPPVPKASGSTLNSGSGNCPRTQSDDSEERSLETICANHNNGRLHPRPPHPHNNGQNLGELEVVAYSSPGHSDTDRDNSSLTGTLLHKDCCGSEMACETPNAGTREDPTDTPATDSSRAVHGHSGLKRQRIELEDTDSENSSSEKKLKT

SEQ ID NO: 44016 - protein, 145 aa, Homo sapiens
MRQAGEVTFADAHRPKLNEGVVEFASYGDLKNAIEKLSGKEINGRKIKLIEGSKRHSRSRSRSRSRTRSSSRSRSRSRSRSRKSYSRSRSRSRSRSRSKSRSVSRSPVPEKSQKRGSSSRSKSPASVDRQRSRSRSRSRSVDSGN

SEQ ID NO: 44017 - protein, 24 aa, Homo sapiens
MVLVPVFALTMVAAWAFMRYRQQL

SEQ ID NO: 44018 - protein, 195 aa, Homo sapiens
MQRLTLEHLNQMVGIEYILLHAQEPILFIIRKQQRQSPAQVIPLADYYIIAGVIYQAPDLGSVINSRVLTAVHGIQSAFDEAMSYCRYHPSKGYWWHFKDHEEQDKVRPKAKRKEEPSSIFQRQRVDALLLDLRQKFPPKFVQLKPGEKPVPVDQTKKEAEPIPETVKPEEKETTKNVQQTVSAKGPPEKRMRLQ

SEQ ID NO: 44019 - protein, 202 aa, Homo sapiens [sequence omitted]

SEQ ID NO: 44020 - protein, 384 aa, Homo sapiens
MLFVPVTLCMVVVVATIKSVSFYTRKDGQLIYTPFTEDTETVGQRALHSILNAAIMISVIVVMTILLVVLYKYRCYKVIHAWLIISSLLLLFFFSFIYLGEVFKTYNVAVDYITVALLIWNFGVVGMISIHWKGPLRLQQAYLIMISALMALVFIKYLPEWTAWLILAVISVYDLVAVLCPKGPLRMLVETAQERNETLFPALIYSSTMVWLVNMAEGDPEAQRRVSKNSKYNAESTERESQDTVAENDDGGFSEEWEAQRDSHLGPHRSTPESRAAVQELSSSILAGEDPEERGVKLGLGDFIFYSVLVGKASATASGDWNTTIACFVAILIGLCLTLLLLAIFKKALPALPISITFGLVFYFATDYLVQPFMDQLAFHQFYI

SEQ ID NO: 44021 - protein, 549 aa, Homo sapiens
MHICEDAVKRLKAERKFFKGFFGKTGKKAVKAVLWVSADGLRVVDEKTKDLIVDQTIEKVSFCAPDRNFDRAFSYICRDGTTRRWICHCFMAVKDTGERLSHAVGCAFAACLERKQKREKECGVTATFDASRTTFTREGSFRVTTATEQAEREEIMKQMQDAKKAETDKIVVGSSVAPGNTAPSPSSPTSPTSDATTSLEMNNPHAIPRRHAPIEQLARQGSFRGFPALSQKMSPFKRQLSLRINELPSTMQRKTDFPIKNAVPEVEGEAESISSLCSQITNAFSTPEDPFSSAPMTKPVTVVAPQSPTFQGTEWGQSSGAASPGLFQAGHRRTPSEADRWLEEVSKSVRAQQPQASAAPLQPVLQPPPPTAISQPASPFQGNAFLTSQPVPVGVVPALQPAFVPAQSYPVANGMPYPAPNVPVVGITPSQMVANVFGTAGHPQAAHPHQSPSLVRQQTFPHYEASSATTSPFFKPPAQHLNGSAAFNGVDDGRLASADRHTEVPTGTCPVDPFEAQWAALENKSKQRTNPSPTNPFSSDLQKTFEIEL

SEQ ID NO: 44022 - protein, 538 aa, Homo sapiens
MHICEDAVKRLKATGKKAVKAVLWVSADGLRVVDEKTKDLIVDQTIEKVSFCAPDRNFDRAFSYICRDGTTRRWICHCFMAVKDTGERLSHAVGCAFAACLERKQKREKECGVTATFDASRTTFTREGSFRVTTATEQAEREEIMKQMQDAKKAETDKIVVGSSVAPGNTAPSPSSPTSPTSDATTSLEMNNPHAIPRRHAPIEQLARQGSFRGFPALSQKMSPFKRQLSLRINELPSTMQRKTDFPIKNAVPEVEGEAESISSLCSQITNAFSTPEDPFSSAPMTKPVTVVAPQSPTFQGTEWGQSSGAASPGLFQAGHRRTPSEADRWLEEVSKSVRAQQPQASAAPLQPVLQPPPPTAISQPASPFQGNAFLTSQPVPVGVVPALQPAFVPAQSYPVANGMPYPAPNVPVVGITPSQMVANVFGTAGHPQAAHPHQSPSLVRQQTFPHYEASSATTSPFFKPPAQHLNGSAAFNGVDDGRLASADRHTEVPTGTCPVDPFEAQWAALENKSKQRTNPSPTNPFSSDLQKTFEIEL

SEQ ID NO: 44023 - protein, 597 aa, Homo sapiens
MHICEDAVKRLKAERKFFKGFFGKTGKKAVKAVLWVSADGLRVVDEKTKDLIVDQTIEKVSFCAPDRNFDRAFSYICRDGTTRRWICHCFMAVKDTGERLSHAVGCAFAACLERKQKREKECGVTATFDASRTTFTREGSFRVTTATEQAEREEIMKQMQDAKKAETDKIVVGSSVAPGNTAPSPSSPTSPTSDATTSLEMNNPHAIPRRHAPIEQLARQGSFRGFPALSQKMSPFKRQLSLRINELPSTMQRKTDFPIKNAVPEVEGEAESISSLCSQITNAFSTPEDPFSSAPMTKPVTVVAPQSPTFQANGTDSAFHVLAKPAHTALAPVAMPVRETNPWAHAPDAANKEIAATCSGTEWGQSSGAASPGLFQAGHRRTPSEADRWLEEVSKSVRAQQPQASAAPLQPVLQPPPPTAISQPASPFQGNAFLTSQPVPVGVVPALQPAFVPAQSYPVANGMPYPAPNVPVVGITPSQMVANVFGTAGHPQAAHPHQSPSLVRQQTFPHYEASSATTSPFFKPPAQHLNGSAAFNGVDDGRLASADRHTEVPTGTCPVDPFEAQWAALENKSKQRTNPSPTNPFSSDLQKTFEIEL

SEQ ID NO: 44024 - protein, 586 aa, Homo sapiens
MHICEDAVKRLKATGKKAVKAVLWVSADGLRVVDEKTKDLIVDQTIEKVSFCAPDRNFDRAFSYICRDGTTRRWICHCFMAVKDTGERLSHAVGCAFAACLERKQKREKECGVTATFDASRTTFTREGSFRVTTATEQAEREEIMKQMQDAKKAETDKIVVGSSVAPGNTAPSPSSPTSPTSDATTSLEMNNPHAIPRRHAPIEQLARQGSFRGFPALSQKMSPFKRQLSLRINELPSTMQRKTDFPIKNAVPEVEGEAESISSLCSQITNAFSTPEDPFSSAPMTKPVTVVAPQSPTFQANGTDSAFHVLAKPAHTALAPVAMPVRETNPWAHAPDAANKEIAATCSGTEWGQSSGAASPGLFQAGHRRTPSEADRWLEEVSKSVRAQQPQASAAPLQPVLQPPPPTAISQPASPFQGNAFLTSQPVPVGVVPALQPAFVPAQSYPVANGMPYPAPNVPVVGITPSQMVANVFGTAGHPQAAHPHQSPSLVRQQTFPHYEASSATTSPFFKPPAQHLNGSAAFNGVDDGRLASADRHTEVPTGTCPVDPFEAQWAALENKSKQRTNPSPTNPFSSDLQKTFEIEL

SEQ ID NO: 44025 - protein, 16 aa, Homo sapiens
MHICEDAVKRLKAVCI

SEQ ID NO: 44026 - protein, 199 aa, Homo sapiens [sequence omitted]

SEQ ID NO: 44027 - protein, 533 aa, Homo sapiens
MVQVQCPQALRCGSTRRCSSLNNLPSNIPRPQTQPPSGSRPPSQHRSVSSWASSITVPRPFRMTLREARKKAEWLGSPASFEQERQRAQRQGEEEAECHRQFRAQPVPAHVYLPLYQEIMERSEARRQAGIQKRKELLLSSLKPFSFLEKEEQLKEAARQRDLAATAEAKISKQKATRRIPKSILEPALGDKLQEAELFRKIRIQMRALDMLQMASSPIASSSNRANPQPRTATRTQQEKLGFLHTNFRFQPRVNPVVPDYEGLYKAFQRRAAKRRETQEATRNKPFLLRTANLRHPQRPCDAATTGRRQDSPQPPATPLPRSRSLSGLASLSANTLPVHITDATRKRESAVRSALEKKNKADESIQWLEIHKKKSQAMSKSVTLRAKAMDPHKSLEEVFKAKLKENRNNDRKRAKEYKKELEEMKQRIQTRPYLFEQVAKDLAKKEAEQWYLDTLKQAGLEEDFVRNKGQGTRAVQEKETKIKDFPRFQETTKLSIRDPEQGLEGSLEQPASPRKVLEELSHQSPENLVSLA

SEQ ID NO: 44028 - protein, 433 aa, Homo sapiens
MASKLIISPFTLVYYTYQCFQSTGWLGPVSIFGYFILGTVVNKTLMGPIVMKLVHQEKLEGDFRFKHMQIRVNAEPAAFYRAGHVEHMRTDRRLQRLLQTQRELMSKELWLYIGINTFDYLGSILSYVVIAIPIFSGVYGDLSPAELSTLVSKNAFVCIYLISCFTQLIDLSTTLSDVAGYTHRIGQLRETLLDMSLKSQDCEILGESEWGLDTPPGWPAAEPADTAFLLERVSISAPSSDKPLIKDLSLKISEGQSLLITGNTGTGKTSLLRVLGGLWTSTRGSVQMLTDFGPHGVLFLPQKPFFTDGTLREQVIYPLKEVYPDSGSADDERILRFLELAGLSNLVARTEGLDQQVDWNWYDVLSPGEMQRLSFARLFYLQPKYAVLDEATSALTEEVESELYRIGQQLGMTFISVGHRQSLEKVPVLTRMA

SEQ ID NO: 44029 - protein, 17 aa, Homo sapiens
MWKLEDKVKGAKSYLLW

SEQ ID NO: 44030 - protein, 1407 aa, Homo sapiens
METFQVQVIDNGFGMGSDDVEKVGNRYFTSKCHSVQDLENPRFYGFRGEALANIADMASAVEISSKKNRTMKTFVKLFQSGKALKACEADVTRASAGTTVTVYNLFYQLPVRRKCMDPRLEFEKVRQRIEALSLMHPSISFSLRNDVSGSMVLQLPKTKDVCSRFCQIYGLGKSQKLREISFKYKEFELSGYISSEAHYNKNMQFLFVNKRLVLRTKLHKLIDFLLRKESIICKPKNGPTSRQMNSSLRHRSTPELYGIYVINVQCQFCEYDVCMEPAKTLIEFQNWDTLLFCIQEGVKMFLKQEKLFVELSGEDIKEFSEDNGFSLFDATLQKRVTSDERSNFQEACNNILDSYEMFNLQSKAVKRKTTAENVNTQSSRDSEATRKNTNDAFLYIYESGGPGHSKMTEPSLQNKDSSCSESKMLEQETIVASEAGENEKHKKSFLEHSSLENPCGTSLEMFLSPFQTPCHFEESGQDLEIWKESTTVNGMAANILKNNRIQNQPKRFKDATEVGCQPLPFATTLWGVHSAQTEKEKKKESSNCGRRNVFSYGRVKLCSTGFITHVVQNEKTKSTETEHSFKNYVRPGPTRAQETFGNRTRHSVETPDIKDLASTLSKESGQLPNKKNCRTNISYGLENEPTATYTMFSAFQEGSKKSQTDCILSDTSPSFPWYRHVSNDSRKTDKLIGFSKPIVRKKLSLSSQLGSLEKFKRQYGKVENPLDTEVEESNGVTTNLSLQVEPDILLKDKNRLENSDVCKITTMEHSDSDSSCQPASHILNSEKFPFSKDEDCLEQQMPSLRESPMTLKELSLFNRKPLDLEKSSESLASKLSRLKGSERETQTMGMMSRFNELPNSDSSRKDSKLCSVLTQDFCMLFNNKHEKTENGVIPTSDSATQDNSFNKNSKTHSNSNTTENCVISETPLVLPYNNSKVTGKDSDVLIRASEQQIGSLDSPSGMLMNPVEDATGDQNGICFQSEESKARACSETEESNTCCSDWQRHFDVALGRMVYVNKMTGLSTFIAPTEDIQAACTKDLTTVAVDVVLENGSQYRCQPFRSDLVLPFLPRARAERTVMRQDNRDTVDDTVSSESLQSLFSEWDNPVFARYPEVAVDVSSGQAESLAVKIHNILYPYRFTKGMIHSMQVLQQVDNKFIACLMSTKTEENGEAGGNLLVLVDQHAAHERIRLEQLIIDSYEKQQAQGSGRKKLLSSTLIPPLEITVTEEQRRLLWCYHKNLEDLGLEFVFPDTSDSLVLVGKVPLCFVEREANELRRGRSTVTKSIVEEFIREQLELLQTTGGIQGTLPLTVQKVLASQACHGAIKFNDGLSLQESCRLIEALSSCQLPFQCAHGRPSMLPLADIDHLEQEKQIKPNLTKLRKMAQAWRLFGKAECDTRQSLQQSMPPCEPP

SEQ ID NO: 44031 - protein, 495 aa, Homo sapiens [sequence omitted]

SEQ ID NO: 44032 - protein, 386 aa, Homo sapiens [sequence omitted]

SEQ ID NO: 44033 - protein, 461 aa, Homo sapiens
MGRKKKMSNALAIQVDSEGKIKYDAIARQGQSKDKVIYSKYTDLVPKEVMNADDPDLQRPDEEAIKEITEKTRVALEKSVSQKVAAAMPVRAADKLAPAQYIRYTPSQQGVAFNSGAKQRVIRMVEMQKDPMEPPRFKINKKIPRGPPSPPAPVMHSPSRKMTVKEQQEWKIPPCISNWKNAKGYTIPLDKRLAADGRGLQTVHINENFAKLAEALYIADRKAREAVEMRAQVERKMAQKEKEKHEEKLREMAQKARERRAGIKTHVEKEDGEARERDEIRHDRRKERQHDRNLSRAAPDKRSKLQRNENRDISEVIALGVPNPRTSNEVQYDQRLFNQSKGMDSGFAGGEDEIYNVYDQAWRGGKDMAQSIYRPSKNLDKDMYGDDLEARIKTNRFVPDKEFSGSDRRQRGREGPVQFEEDPFGLDKFLEEAKQHGGSKRPSDSSRPKEHEHEGKKRRKE

SEQ ID NO: 44034 - protein, 615 aa, Homo sapiens
MQEAEMMYQTGMKILNGSNKKSQKREAYRYLQKAASMNHTKALERVSYALLFGDYLPQNIQAAREMFEKLTEEGSPKGQTALGFLYASGLGVNSSQAKALVYYTFGALGGNLIAHMVLGYRYWAGIGVLQSCESALTHYRLVANHVASDISLTGGSVVQRIRLPDEVENPGMNSGMLEEDLIQYYQFLAEKGDVQAQVGLGQLHLHGGRGVEQNHQRAFDYFNLAANAGNSHAMAFLGKMYSEGSDIVPQSNETALHYFKKAADMGNPVGQSGLGMAYLYGRGVQVNYDLALKYFQKAAEQGWVDGQLQLGSMYYNGIGVKRDYKQALKYFNLASQGGHILAFYNLAQMHASGTGVMRSCHTAVELFKNVCERGRWSERLMTAYNSYKDGDYNAAVIQYLLLAEQGYEVAQSNAAFILDQREASIVGENETYPRALLHWNRAASQGYTVARIKLGDYHFYGFGTDVDYETAFIHYRLASEQQHSAQAMFNLGYMHEKGLGIKQDIHLAKRFYDMAAEASPDAQVPVFLALCKLGVVYFLQYIRETNIRDMFTQLDMDQLLGPEWDLYLMTIIALLLGTVIAYRQRQHQDMPAPRPPGPRPAPPQQEGPPEQQPPQ

SEQ ID NO: 44035 - protein, 196 aa, Homo sapiens
MLNYQGLQRVKIIASDNLWESISASMLLDAELFKVVDVIGAHYPGTHSAKDAKLTGKKLWSSEDFSTLNSDMGAGCWGRILNQNYINGYMTSTIAWNLVASYYEQLPYGRCGLMTAQEPWSGHYVVESPVWVSAHTTQFTQPGWYYLKTVGHLEKGGSYVALTDGLGNLTIIIETMVNFCCCYWINSLLYYWKNKI

SEQ ID NO: 44036 - protein, 493 aa, Homo sapiens
MRANYKNNSKSLFNTLQKPSGEPQIEDDMLKEEMNGFSSFARSLVPSSERLHLSLHKSSKVITNGPEKNSSSSPSSVDYAASGPRKLSSGALYGRRPRSTFPNSHRFQLVISKAPSGDLLDKHSELFSNKQLPFTPRTLKTEAKSFLSQYRYYTPAKRKKDFTDQRIEAETQTELSFKSELGTAETKNMTDSEMNIKQASNCVTYDAKEKIAPLPLEGHDSTWDEIKDDALQHSSPRAMCQYSLKPPSTRKIYSDEEELLYLSFIEDVTDEILKLGLFSNRFLERLFERHIKQNKHLEEEKMRHLLHVLKVDLGCTSEENSVKQNDVDMLNVFDFEKAGNSEPNELKNESEVTIQQERQQYQKALDMLLSAPKDENEIFPSPTEFFMPIYKSKHSEGVIIQQVNDETNLETSTLDENHPSISDSLTDRETSVNVIEGDSDPEKVEISNGLCGLNTSPSQSVQFSSVKGDNNHDMELSTLKIMEMSIEDCPLDV

SEQ ID NO: 44037 - protein, 702 aa, Homo sapiens
MVMVANKKSQDQMTEDLSLFLGNNTIRFTVWLHGVLDKLRSVTTEPSSLKSSDTNIFDSNVPSNKSNFSRGDERRHEAAVPPLAIPSARPEKRDSRVSTSSQESKTTNVRQTYDDGAATRLMSTVKPLREPAPSEDVIDIKPEPDDLIDEDLNFVQENPLSQKKPTVTLTYGSSRPSIEIYRPPASRNADSGVHLNRLQFQQQQNSIHAAKQLDMQSSWVYETGRLCEPEVLNSLEETYSPFFRNNSEKMSMEDENFRKRKLPVVSSVVKVKKFNHDGEEEEEDDDYGSRTGSISSSVSVPAKPERRPSLPPSKQANKNLILKAISEAQESVTKTTNYSTVPQKQTLPVAPRTRTSQEELLAEVVQGQSRTPRISPPIKEEETKGDSVEKNQGTQQRQLLSRLQIDPVMAETLQMSQDYYDMESMVHADTRSFILKKPKLSEEVVVAPNQESGMKTADSLRVLSGHLMQTRDLVQPDKPASPKFIVTLDGVPSPPGYMSDQEEDMCFEGMKPVNQTAASNKGLRGLLHPQQLHLLSRQLEDPNGSFSNAEMSELSVAQKPEKLLERCKYWPACKNGDECAYHHPISPCKAFPNCKFAEKCLFVHPNCKYDAKCTKPDCPFTHVSRRIPVLSPKPAVAPPAPPSSSQLCRYFPACKKMECPFYHPKHCRFNTQCTRPDCTFYHPTINVPPRHALKWIRPQTSE

SEQ ID NO: 44038 - protein, 162 aa, Homo sapiens
MAETLQMSQAEMSELSVAQKPEKLLERCKYWPACKNGDECAYHHPISPCKAFPNCKFAEKCLFVHPNCKYDAKCTKPDCPFTHVSRRIPVLSPKPVAPPAPPSSSQLCRYFPACKKMECPFYHPKHCRFNTQCTRPDCTFYHPTINVPPRHALKWIRPQTSE

SEQ ID NO: 44039 - protein, 501 aa, Homo sapiens [sequence omitted]

SEQ ID NO: 44040 - protein, 486 aa, Homo sapiens [sequence omitted]

SEQ ID NO: 44041 - protein, 464 aa, Homo sapiens [sequence omitted]

SEQ ID NO: 44042 - protein, 1941 aa, Homo sapiens
MEGTEEVEAELPDSRTKEIEAIHAILRSENERLKKLCTDLEEKHEASEIQIKQQSTSYRNQLQQKEVEISHLKARQIALQDQLLKLQSAAQSVPSGAGVPATTASSSFAYGISHHPSAFHDDDMDFGDIISSQQEINRLSNEVSRLESEVGHWRHIAQTSKAQGTDNSDQSEICKLQNIIKELKQNRSQEIDDHQHEMSVLQNAHQQKLTEISRRHREELSDYEERIEELENLLQQGGSGVIETDLSKIYEMQKTIQVLQIEKVESTKKMEQLEDKIKDINKKLSSAENDRDILRREQEQLNVEKRQIMEECENLKLECSKLQPSAVKQSDTMTEKERILAQSASVEEVFRLQQALSDAENEIMRLSSLNQDNSLAEDNLKLKMRIEVLEKEKSLLSQEKEELQMSLLKLNNEYEVIKSTATRDISLDSELHDLRLNLEAKEQELNQSISEKETLIAEIEELDRQNQEATKHMILIKDQLSKQQNEGDSIISKLKQDLNDEKKRVHQLEDDKMDITKELDVQKEKLIQSEVALNDLHLTKQKLEDKVENLVDQLNKSQESNVSIQKENLELKEHIRQNEEELSRIRNELMQSLNQDSNSNFKDTLLKEREAEVRNLKQNLSELEQLNENLKKVAFDVKMENEKLVLACEDVRHQLEECLAGNNQLSLEKNTIVETLKMEKGEIEAELCWAKKRLLEEANKYEKTIEELSNARNLNTSALQLEHEHLIKLNQKKDMEIAELKKNIEQMDTDHKETKDVLSSSLEEQKQLTQLINKKEIFIEKLKERSSKLQEELDKYSQALRKNEILRQTIEEKDRSLGSMKEENNHLQEELERLREEQSRTAPVADPKTLDSVTELASEVSQLNTIKEHLEEEIKHHQKIIEDQNQSKMQLLQSLQEQKKEMDEFRYQHEQMNATHTQLFLEKDEEIKSLQKTIEQIKTQLHEERQDIQTDNSDIFQETKVQSLNIENGSEKHDLSKAETERLVKGIKERELEIKLLNEKNISLTKQIDQLSKDEVGKLTQIIQQKDLEIQALHARISSTSHTQDVVYLQQQLQAYAMEREKVFAVLNEKTRENSHLKTEYHKMMDIVAAKEAALIKLQDENKKLSTRFESSGQDMFRETIQNLSRIIREKDIEIDALSQKCQTLLAVLQTSSTGNEAGGVNSNQFEELLQERDKLKQQVKKMEEWKQQVMTTVQNMQHESAQLQEELHQLQAQVLVDSDNNSKLQVDYTGLIQSYEQNETKLKNFGQELAQVQHSIGQLCNTKDLLLGKLDIISPQLSSASLLTPQSAECLRASKSEVLSESSELLQQELEELRKSLQEKDATIRTLQENNHRLSDSIAATSELERKEHEQTDSEIKQLKEKQDVLQKLLKEKDLLIKAKSDQLLSSNENFTNKVNENELLRQAVTNLKERILILEMDIGKLKGENEKIVETYRGKETEYQALQETNMKFSMMLREKEFECHSMKEKALAFEQLLKEKEQGKTGELNQLLNAVKSMQEKTVVFQQERDQVMLALKQKQMENTALQNEVQRLRDKEFRSNQELERLRNHLLESEDSYTREALAAEDREAKLRKKVTVLEEKLVSSSNAMENASHQASVQVESLQEQLNVVSKQRDETALQLSVSQEQVKQYALSLANLQMVLEHFQQEEKAMYSAELEKQKQLIAEWKKNAENLEGKVISLQECLDEANAALDSASRLTEQLDVKEEQIEELKRQNELRQEMLDDVQKKLMSLANSSEGKVDKVLMRNLFIGHFHTPKNQRHEVLRLMGSILGVRREEMEQLFHDDQGGVTRWMTGWLGGGSKSVPNTPLRPNQQSVVNSSFSELFVKFLETESHPSIPPPKLSVHDMKPLDSPGRRKRDTNAPESFKDTAESRSGRRTDVNPFLAPRSAAVPLINPAGLGPGGPGHLLLKPISDVLPTFTPLPALPDNSAGVVLKDLLKQ

SEQ ID NO: 44043 - protein, 263 aa, Homo sapiens
MAEGGVTSEDYRTFLQQPSGNMDDSGFFSIQWFNLNSLLTGPELISDTYLALFLAQLQQEGYSIFVVKGDLPDCEADQLLQMIRVQQMHRPKLIGEELAQLKEQRVHKTDLERVLEANDGSGMLDEDEEDLQRALALSRQEIDMEDEEADLRRAIQLSMQGSSRNISQDMTQTSGTNLTSEELRKRREAYFEKQQQKQQQQQQQQQQGDLSGQSSHPCERPATSSGALGSDLGDAMSEEDMLQAAVTMSLETVRNDLKTEGKK

SEQ ID NO: 44044 - protein, 314 aa, Homo sapiens
MAEGGVTSEDYRTFLQQPSGNMDDSGFFSIQVISNALKVWGLELILFNSPEYQRLRIDPINERSFICNYKEHWFTVRKLGKQWFNLNSLLTGPELISDTYLALFLAQLQQEGYSIFVVKGDLPDCEADQLLQMIRVQQMHRPKLIGEELAQLKEQRVHKTDLERVLEANDGSGMLDEDEEDLQRALALSRQEIDMEDEEADLRRAIQLSMQGSSRNISQDMTQTSGTNLTSEELRKRREAYFEKQQQKQQQQQQQQQQGDLSGQSSHPCERPATSSGALGSDLGDAMSEEDMLQAAVTMSLETVRNDLKTEGKK

SEQ ID NO: 44045 - protein, 284 aa, Homo sapiens
MELTSLCGDDTMRLLEKNGLTFPFICKTRVAHGTNSHEMAIVFNQEGLNAIQPPCVVQNFINHNAVLYKVFVVGESYTVVQRPSLKNFSAGTSDRESIFFNSHNVSKPESSSVLTELDKIEGVFERPSDEVIRELSRALRQALGVSLFGIDIIINNQTGQHAVIDINAFPGYEGVSEFFTDLLNHIATVLQGQSTAMAATGDVALLRHSKLLAEPAGGLVGERTCSASPGCCGSMMGQDAPWKAEADAGGTAKLPHQRLGCNAGVSPSFQQHCVASLATKASSQ

SEQ ID NO: 44046 - protein, 337 aa, Homo sapiens [sequence omitted]

SEQ ID NO: 44047 - protein, 939 aa, Homo sapiens
MFSALLHYLYTGEFGMEDSRFQNVDILVQLSEEFGTPNSLDVDMRGLFDYMCYYDVVLSFSSDSELVEAFGGNQNCLDEELKAHKAVISARSPFFRNLLQRRIRTGEEITDRTLRTPTRIILDESIIPKKYATVILHCMYTDVVDLSVLHCSPSVGSLSEVQALVAGKPNMTRAEEAMELYHIALFLEFNMLAQGCEDIIAESISLDTLIAILKWSSHPYGSKWVHRQALHFLCEEFSQVMTSDVFYELSKDHLLTAIQSDYLQASEQDILKYLIKWGEHQLMKRIADREPNLLSGTAHSVNKRGVKRRDLDMEELREILSSLLPFVRIEHILPINSEVLSDAMKRGLISTPPSDMLPTTEGGKSNAWLRQKNAGIYVRPRLFSPYVEEAKSVLDEMMVEQTDLVRLRMVRMSNVPDTLYMVNNAVPQCCHMISHQQISSNQSSPPSVVANEIPVPRLLIMKDMVRRLQELRHTEQVQRAYALNCGEGATVSYEIQIRVLREFGLADAAAELLQNPHKFFPDERFGDESPLLTMRQPGRCRVNSTPPAETMFTDLDSFVAFHPPLPPPPPPYHPPATPIHNQLKAGWKQRPPSQHPSRSFSYPCNHSLFHSRTAPKAGPPPVYLPSVKAAPPDCTSTAGLGRQTVAAAAATTTSTATAAAAAASEKQVRTQPVLNDLMPDIAVGVSTLSLKDRRLPELAVDTELSQSVSEAGPGPPQHLSCIPQRHTHTSRKKHTLEQKTDTRENPQEYPDFYDFSNAACRPSTPALSRRTPSPSQGGYFGPDLYSHNKASPSGLKSAYLPGQTSPKKQEEARREYPLSPDGHLHRQKNEPIHLDVVEQPPQRSDFPLAAPENASTGPAHVRGRTAVETDLTFGLTPNRPSLSACSSEAPEERSGRRLADSESLGHGAQRNTDLEREDSISRGRRSPSKPDFLYKKSAL

SEQ ID NO: 44048 - protein, 129 aa, Homo sapiens
MKRAAAAAVGGALAVGAVPVVLSAMGFTGAGIAASSIAAKMMSAAAIANGGGVSAGSLVATLQSVGAAGLSTSSNILLASVGSVLGACLGNSPSSSLPAEPEAKEDEARENVPQGEPPKPPLKSEKHEE

SEQ ID NO: 44049 - protein, 420 aa, Homo sapiens [sequence omitted]

SEQ ID NO: 44050 - protein, 213 aa, Homo sapiens
MLPLLALGLLAAGFCPAVLCHPNSPLDEENLTQENQDRGTHVDLGLASANVDFAFSLYKQLVLKAPDKNVIFSPLSISTALAFLSLGAHNTTLTEILKGLKFNLTETSEAEIHQSFQHLLRTLNQSSDELQLSMGNAMFVKEQLSLLDRFTEDAKRLYGSEAFATDFQDSAAAKKLINDYVKNGTRGKITDLIKDLDSQTMMVLVNYIFFKER

SEQ ID NO: 44051 - protein, 956 aa, Homo sapiens
MKAVQDQLQVNDNTQGPRAALEARLWETEKICQLEPEGRVRVDLVLRMAEALLACCPGDQKPGILARLKDIKAQWEETVTYMTHCHSRIEWVWLHWSEYLLARDEFYRWFQKMMVTLEPHIELQLGLKEKQWQLSHAQVLLHNVDNQAVLLDRLLEEAASLFNRIGDPSVDEDAQKRMKAEYDAVKAKAQKRVDLLEQVAREHEEYQAGVDEFQLWLKAVVEKVNGCLGRNCKLPITQRLSTLQDIAKDFPRGEESLETLEEQSAGVIRNTSPLGAEKITGELEEMRKVLEKLRALWEEEEERLRGLLRSRGAWEQQIKQLEAELSEFRMVLQRLAQEGLQPAAKAGTEDELVAHWRRYSATRAALASEEPRVDRLQAQLKELIVFPHNLKPLSDSVIATIQEYQSLKVKSARLRNAAAVELWQHFQRPLQDLQLWKALAQRLLEVTASLPDLPSLHTFLPQIEAALMESSRLKELLTMLQLKKDLLIGIFGQERATALLEQVAGSMRDRDLLHNSLLQRKSKLQSLLAQHKDFGAAFEPLQRKLLDLQVRVQAEKGLQRDLPGKQAQLSRLQGLQEEGLDLGAQMEAARPLVQENPNHQHKMDQLSSDFQALQRSLEDLVDRCRQSVQEHCTFSHQLLELRQWIVVTTQKLEAHRGEAGPGDAESQEAEFERLVAEFPEKEAQLSLVEAQGWLVMEKSSPEGAAVVQEELRELAESWRALRLLEESLLSLIRNWHLQRMEVDSGKKMVFTNNIPKSGFLINPMDPIPRHRRRANLLQEEEGSHEDFSQLLRNFGQWLQVENSKLVRIIAMRTSTAEDLRTRKSKLQELEARVPEGQHLFENLLRLGPARGTSDELEDLRYQWMLYKSKLKDSGHLLTQSSPGEPTGFQKTRRWRGLGSLFRRACCVALPLQLLLLLFLLLLFLLPIREEDRSCTLANNFARSFTLMLRYNGPPPT

SEQ ID NO: 44052 - protein, 951 aa, Homo sapiens
MKAVQDQLQVNDNTQGPRAALEARLWETEKICQLEPEGRVRVDLVLRMAEALLACCPGDQKPGILARLKDIKAQWEETVTYMTHCHSRIEWVWLHWSEYLLARDEFYRWFQKMMVTLEPHIELQLGLKEKQWQLSHAQVLLHNVDNQAVLLDRLLEEAASLFNRIGDPSVDEDAQKRMKAEYDAVKAKAQKRVDLLEQVAREHEEYQAGVDEFQLWLKAVVEKVNGCLGRNCKLPITQRLSTLQDIAKDFPRGEESLETLEEQSAGVIRNTSPLGAEKITGELEEMRKVLEKLRALWEEEEERLRGLLRSRGAWEQQIKQLEAELSEFRMVLQRLAQEGLQPAAKAGTEDELVAHWRRYSATRAALASEEPRVDRLQAQLKELIVFPHNLKPLSDSVIATIQEYQSLKVKSARLRNAAAVELWQHFQRPLQDLQLWKALAQRLLEVTASLPDLPSLHTFLPQIEAALMESSRLKELLTMLQLKKDLLIGIFGQERATALLEQVAGSMRDRDLLHNSLLQRKSKLQSLLAQHKDFGAAFEPLQRKLLDLQVRVQAEKGLQRDLPGKQAQLSRLQGLQEEGLDLGAQMEAARPLVQENPNHQHKMDQLSSDFQALQRSLEDLVDRCRQSVQEHCTFSHQLLELRQWIVVTTQKLEAHRGEAGPGDAESQEAEFERLVAEFPEKEAQLSLVEAQGWLVMEKSSPEGAAVVQEELRELAESWRALRLLEESLLSLIRNWHLQRMEVDSGKKMVFTNNIPKSGFLINPMDPIPRHRRREEEGSHEDFSQLLRNFGQWLQVENSKLVRIIAMRTSTAEDLRTRKSKLQELEARVPEGQHLFENLLRLGPARGTSDELEDLRYQWMLYKSKLKDSGHLLTQSSPGEPTGFQKTRRWRGLGSLFRRACCVALPLQLLLLLFLLLLFLLPIREEDRSCTLANNFARSFTLMLRYNGPPPT

SEQ ID NO: 44053 - protein, 495 aa, Homo sapiens
MLVARTCQLYPNAIASTLVHKFFLVFSKWEWPNPVLLKQPEECNLNLPVWDPRVNPSDRYHLMPIITPAYPQQNSTYNVSVSTRMVMVEEFKQGLAITDEILLSKAEWSKLFEAPNFFQKYKHYIVLLASAPTEKQRLEWVGLVESKIRILVGSLEKNEFITLAHVNPQSFPAPKENPDKEEFRTMWVIGLVFKKTENSENLSVDLTYDIQSFTDTVYRQAINSKMFEVDMKIAAMHVKRKQLHQLLPNHVLQKKKKHSTEGVKLTALNDSSLDLSMDSDNSMSVPSPTSATKTSPLNSSGSSQGRNSPAPAVTAASVTNIQATEVSVPQVNSSESSGGTSSESIPQTATQPAISPPPKPTVSRVVSSTRLVNPPPRSSGNAATSGNAATKIPTPIVGVKRTSSPHKEESPKKTKTEEDETSEDANCLALSGHDKTEAKEQLDTETSTTQSETIQTAASLLASQKTSSTDLSDIPALPANPIPVIKNSIKLRLNR

SEQ ID NO: 44054 - protein, 35 aa, Homo sapiens
MLVARTCQLYPNAIASTLVHKFFLVFSKWYVFRLY

SEQ ID NO: 44055 - protein, 173 aa, Homo sapiens
MDSDNSMSVPSPTSATKTSPLNSSGSSQGRNSPAPAVTAASVTNIQATEVSVPQVNSSESSGGTSSESIPQTATQPAISPPPKPTVSRVVSSTRLVNPPPRSSGNAATSGNAATKIPTPIVGVKRTSSPHKEESPKKTKTEEKTSSTDLSDIPALPANPIPVIKNSIKLRLNR

SEQ ID NO: 44056 - protein, 512 aa, Homo sapiens
MKWASENGASVEGFEMVNFKEEGFGLRATRDIKAEELFLWVPRKLLMTVESAKNSVLGPLYSQDRILQAMGNIALAFHLLCERASPNSFWQPYIQTLPSEYDTPLYFEEDEVRYLQSTQAIHDVFSQYKNTARQYAYFYKVIQTHPHANKLPLKDSFTYEDYRWAVSSVMTRQNQIPTEDGSRVTLALIPLWDMCNHTNGLITTGYNLEDDRCECVALQDFRAGEQIYIFYGTRSNAEFVIHSGFFFDNNSHDRVKIKLGVSKSDRLYAMKAEVLARAGIPTSSVFALHFTEPPISAQLLAFLRVFCMTEEELKEHLLGDSAIDRIFTLGNSEFPVSWDNEVKLWTFLEDRASLLLKTYKTTIEEDKSVLKNHDLSVRAKMAIKLRLGEKEILEKAVKSAAVNREYYRQQMEEKAPLPKYEESNLGLLESSVGDSRLPLVLRNLEEEAGVQDALNIREAISKAKATENGLVNGENSIPNGTRSENESLNQESKRAVEDAKGSSSDSTAGVKE

SEQ ID NO: 44057 - protein, 408 aa, Homo sapiens
MTVESAKNSVLGPLYSQDRILQAMGNIALAFHLLCERASPNSFWQPYIQTLPSEYDTPLYFEEDEVRYLQSTQAIHDVFSQYKNTARQYAYFYKVIQITTGYNLEDDRCECVALQDFRAGEQIYIFYGTRSNAEFVIHSGFFFDNNSHDRVKIKLGVSKSDRLYAMKAEVLARAGIPTSSVFALHFTEPPISAQLLAFLRVFCMTEEELKEHLLGDSAIDRIFTLGNSEFPVSWDNEVKLWTFLEDRASLLLKTYKTTIEEDKSVLKNHDLSVRAKMAIKLRLGEKEILEKAVKSAAVNREYYRQQMEEKAPLPKYEESNLGLLESSVGDSRLPLVLRNLEEEAGVQDALNIREAISKAKATENGLVNGENSIPNGTRSENESLNQESKRAVEDAKGSSSDSTAGVKE

SEQ ID NO: 44058 - protein, 769 aa, Homo sapiens [sequence omitted]

SEQ ID NO: 44059 - protein, 418 aa, Homo sapiens [sequence omitted]

SEQ ID NO: 44060 - protein, 723 aa, Homo sapiens
MLTPLSASDPLAVTSLSSSSAHPFISNLHTRHTEKLKKSLKVKTRSGRVSRPPKYKAKDYKFIKTEDLADGHLSDSDDYSELCVEEDEDQRERHALFDLSSCSLRPKSFKCQTCEKSYIGKGGLARHFKLNPGHGQLDPEMVLSEKASGSTLRGCTEERTLSLTSLGLSMPADPCEGGARSCLVTESARGGLQNGQSVDVEETLPSEPENGALLRSERYQGPRRRACSETLAESRTAVLQQRRAAQLPGGPAAAGEQRASPSKARLKEFLQQCDREDLVELALPQLAQVVTVYEFLLMKVEKDHLAKPFFPAIYKEFEELHKMVKKMCQDYLSSSGLCSQETLEINNDKVAESLGITEFLRKKEIHPDNLGPKHLSRDMDGEQLEGASSEKREREAAEEGLASVKRPRREALSNDTTESLAANSRGREKPRPLHALAAGFSPPVNVTVSPRSEESHTTTVSGGNGSVFQAGPQLQALANLEARRGSIGAALSSRDVSGLPVYAQSGEPRRLTQAQVAAFPGENALEHSSDQDTWDSLRSPGFCSPLSSGGGAESLPPGGPGHAEAGHLGKVCDFHLNHQQPSPTSVLPTEVAAPPLEKILSVDSVAVDCAYRTVPKPGPQPGPHGSLLTEGCLRSLSGDLNRFPCGMEVHSGQRELESVVAVGEAMAFEISNGSHELLSQGQKQIFIQTSDGLILSPPGTIVSQEEDIVTVTDAEGRACGWAR

SEQ ID NO: 44061 - protein, 104 aa, Homo sapiens
MEKLSSTTKGICELENYHYGEESKRPPLFHTWPTTHFYEVSHKLLEMYRKELLLKRTVAKELAHTGDPDLTLSYLSMWLHQPYVESDSRLHLESMLLETGHRAL

SEQ ID NO: 44062 - protein, 1345 aa, Homo sapiens
MRKYNFEGKTESITVVKLLSCFDDLVAAGTASGRVAVFQLVSSLPGRNKQLRRFDVTGIHKNSITALAWSPNGMKLFSGDDKGKIVYSSLDLDQGLCNSQLVLEEPSSIVQLDYSQKVLLVSTLQRSLLFYTEEKSVRQIGTQPRKSTGKFGACFIPGLCKQSDLTLYASRPGLRLWKADVHGTVQATFILKDAFAGGVKPFELHPRLESPNSGSCSLPERHLGLVSCFFQEGWVLSWNEYSIYLLDTVNQATVAGLEGSGDIVSVSCTENEIFFLKGDRNIIRISSRPEGLTSTVRDGLEMSGCSERVHVQQAEKLPGATVSETRLRGSSMASSVASEPRSRSSSLNSTDSGSGLLPPGLQATPELGKGSQPLSQRFNAISSEDFDQELVVKPIKVKRKKKKKKTEGGSRSTCHSSLESTPCSEFPGDSPQSLNTDLLSMTSSVLGSSVDQLSAESPDQESSFNGEVNGVPQENTDPETFNVLEVSGSMPDSLAEEDDIRTEMPHCHHAHGRELLNGAREDVGGSDVTGLGDEPCPADDGPNSTQLPFQEQDSSPGAHDGEDIQPIGPQSTFCEVPLLNSLTVPSSLSWAPSAEQWLPGTRADEGSPVEPSQEQDILTSMEASGHLSTNLWHAVTDDDTGQKEIPISERVLGSVGGQLTPVSALAASTHKPWLEQPPRDQTLTSSDEEDIYAHGLPSSSSETSVTELGPSCSQQDLSRLGAEDAGLLKPDQFAESWMGYSGPGYGILSLVVSEKYIWCLDYKGGLFCSALPGAGLRWQKFEDAVQQVAVSPSGALLWKIEQKSNRAFACGKVTIKGKRHWYEALPQAVFVALSDDTAWIIRTSGDLYLQTGLSVDRPCARAVKVDCPYPLSQITARNNVVWALTEQRALLYREGVSSFCPEGEQWKCDIVSERQALEPVCITLGDQQTLWALDIHGNLWFRTGIISKKPQGDDDHWWQVSITDYVVFDQCSLFQTIIHATHSVATAAQAPVEKVADKLRMAFWSQQLQCQPSLLGVNNSGVWISSGKNEFHVAKGSLIGTYWNHVVPRGTASATKWAFVLASAAPTKEGSFLWLCQSSKDLCSVSAQSAQSRPSTVQLPPEAEMRAYAACQDALWALDSLGQVFIRTLSKSCPTGMHWTRLDLSQLGAVKLTSLACGNQHIWACDSRGGVYFRVGTQPLNPSLMLPAWIMIEPPVQPAGVSLVSVHSSPNDQMLWVLDSRWNVHVRTGITEEMPVGTAWEHVPGLQACQLALSTRTVWARCPNGDLARRYGVTDKNPAGDYWKKIPGSVSCFTVTASDELWAVGPPGYLLQRLTKTFSHSHGTQKSSQAAMPHPEDLEDEWEVI

SEQ ID NO: 44063 - protein, 562 aa, Homo sapiens [sequence omitted]

SEQ ID NO: 44064 - protein, 1643 aa, Homo sapiens
MQLHREDFEIIKVIGRGAFGEVAVVKMKNTERIYAMKILNKWEMLKRAETACFREERDVLVNGDCQWITALHYAFQDENHLYLVMDYYVGGDLLTLLSKFEDKLPEDMARFYIGEMVLAIDSIHQLHYVHRDIKPDNVLLDVNGHIRLADFGSCLKMNDDGTVQSSVAVGTPDYISPEILQAMEDGMGKYGPECDWWSLGVCMYEMLYGETPFYAESLVETYGKIMNHEERFQFPSHVTDVSEEAKDLIQRLICSRERRLGQNGIEDFKKHAFFEGLNWENIRNLEAPYIPDVSSPSDTSNFDVDDDVLRNTEILPPGSHTGFSGLHLPFIGFTFTTESCFSDRGSLKSIMQSNTLTKDEDVQRDLEHSLQMEAYERRIRRLEQEKLELSRKLQESTQTVQSLHGSSRALSNSNRDKEIKKLNEEIERLKNKIADSNRLERQLEDTVALRQEREDSTQRLRGLEKQHRVVRQEKEELHKQLVEASERLKSQAKELKDAHQQRKLALQEFSELNERMAELRAQKQKVSRQLRDKEEEMEVATQKVDAMRQEMRRAEKLRKELEAQLDDAVAEASKERKLREHSENFCKQMESELEALKVKQGGRGAGATLEHQQEISKIKSELEKKVLFYEEELVRREASHVLEVKNVKKEVHDSESHQLALQKEILMLKDKLEKSKRERHNEMEEAVGTIKDKYERERAMLFDENKKLTAENEKLCSFVDKLTAQNRQLEDELQDLAAKKESVAHWEAQIAEIIQWVSDEKDARGYLQALASKMTEELEALRSSSLGSRTLDPLWKVRRSQKLDMSARLELQSALEAEIRAKQLVQEELRKVKDANLTLESKLKDSEAKNRELLEEMEILKKKMEEKFRADTGLKLPDFQDSIFEYFNTAPLAHDLTFRTSSASEQETQAPKPEASPSMSVAASEQQEDMARPPQRPSAVPLPTTQALALAGPKPKAHQFSIKSFSSPTQCSHCTSLMVGLIRQGYACEVCSFACHVSCKDGAPQVCPIPPEQSKRPLGVDVQRGIGTAYKGHVKVPKPTGVKKGWQRAYAVVCDCKLFLYDLPEGKSTQPGVIASQVLDLRDDEFSVSSVLASDVIHATRRDIPCIFRVTASLLGAPSKTSSLLILTENENEKRKWVGILEGLQSILHKNRLRNQVVHVPLEAYDSSLPLIKAILTAAIVDADRIAVGLEEGLYVIEVTRDVIVRAADCKKVHQIELAPREKIVILLCGRNHHVHLYPWSSLDGAEGSFDIKLPETKGCQLMATATLKRNSGTCLFVAVKRLILCYEIQRTKPFHRKFNEIVAPGSVQCLAVLRDRLCVGYPSGFCLLSIQGDGQPLNLVNPNDPSLAFLSQQSFDALCAVELESEEYLLCFSHMGLYVDPQGRRARAQELMWPAAPVACSCSPTHVTVYSEYGVDVFDVRTMEWVQTIGLRRIRPLNSEGTLNLLNCEPPRLIYFKSKFSGAVLNVPDTSDNSKKQMLRTRSKRRFVFKVPEEERLQQRREMLRDPELRSKMISNPTNFNHVAHMGPGDGMQVLMDLPLSAVPPSQEERPGPAPTNLARQPPSRNKPYISWPSSGGSEPSVTVPLRSMSDPDQDFDKEPDSDSTKHSTPSNSSNPSGPPSPNSPHRSQLPLEGLEQPACDT

SEQ ID NO: 44065 - protein, 431 aa, Homo sapiens [sequence omitted]

SEQ ID NO: 44066 - protein, 199 aa, Homo sapiens
MEALHLHLVKEYIIQLSKGRLVLKTAEQQQQLAGYILANADTIQHFCTQHGSPATWLQPALPTLAEIIRLQDPSAIKIEVATYATCYPDFSKGHLSAILAIKGNLSNSEVKRIRSILDVSMGAQEPSRPLFSLIKPRAAVSGIQQWWNGRQNWKRKKEKMSSRLAGAFRVLWRAVSTASIRRHIQVAPRPLQAGPAMGP

SEQ ID NO: 44067 - protein, 462 aa, Homo sapiens
MSTDCENLLKRFLVLNPIKRGTLEQIMKDRWINAGHEEDELKPFVEPELDISDQKRIDIMVGMGYSQEEIQESLSKMKYDEITATYLLLGRKSSEVRPSSDLNNSTGQSPHHKVQRSVSSSQKQRRYSDHAGPAIPSVVAYPKRSQTSTADSDLKEDGISSRKSSGSAVGGKGIAPASPMLGNASNPNKADIPERKKSSTVPSSNTASGGMTRRNTYVCSERTTADRHSVIQNGKENSTIPDQRTPVASTHSISSAATPDRIRFPRGTASRSTFHGQPRERRTATYNGPPASPSLSHEATPLSQTRSRGSTNLFSKLTSKLTRRNMSFRFIKRLPTEYERNGRYEGSSRNVSAEQKDENKEAKPRSLRFTWSMKTTSSMDPGDMMREIRKVLDANNCDYEQRERFLLFCVHGDGHAENLVQWEMEVCKLPRLSLNGVRFKRISGTSIAFKNIASKIANELKL

SEQ ID NO: 44068 - protein, 258 aa, Homo sapiens [sequence omitted]

SEQ ID NO: 44069 - protein, 565 aa, Homo sapiens
MYYNRMYDNMSTMVYIKEDKLEKLTQDEIISKTKQVIQGLEALKNEHNSILQSLLETLKCLKKDDESNLVEEKSNMIRKSLEMLELGLSEAQVMMALSNHLNAVESEKQKLRAQVRRLCQENQWLRDELANTQQKLQKSEQSVAQLEEEKKHLEFMNQLKKYDDDISPSEDKDTDSTKEPLDDLFPNDEDDPGQGIQQQHSSAAAAAQQGGYEIPARLRTLHNLVIQYASQGRYEVAVPLCKQALEDLEKTSGHDHPDVATMLNILALVYRDQNKYKDAANLLNDALAIREKTLGKDHPAVAATLNNLAVLYGKRGKYKEAEPLCKRALEIREKVLGKDHPDVAKQLNNLALLCQNQGKYEEVEYYYQRALEIYQTKLGPDDPNVAKTKNNLASCYLKQGKFKQAETLYKEILTRAHEREFGSVDDENKPIWMHAEEREECKGKQKDGTSFGEYGGWYKACKVDSPTVTTTLKNLGALYRRQGKFEAAETLEEAAMRSRKQGLDNVHKQRVAEVLNDPENMEKRRSRESLNVDVVKYESGPDGGEEVSMSVEWNGMRKMKLGLVN

SEQ ID NO: 44070 - protein, 1027 aa, Homo sapiens
MYEHLQKWGPRREEVKFFLRHEDSPTENSEQGGRQTQEQRTQRNVINVPGEKRTENGVGNPRVELTLSELQDMAARQQQQIENQQQMLVAKRLHFLKQQERRQQQSISENEKLQKLKERVEAQENKLKKIRAMRGQVDYSKIMNGNLSAEIERFSAMFQEKKQEVQTAILRVDQLSQQLEDLKKGKLNGFQSYNGKLTGPAAVELKRLYQELQIRNQLNQEQNSKLQQQKELLNKRNMEVAMMDKRISELRERLYGKKIQLNRVNGTSSPQSPLSTSGRVAAVGPYIQVPSAGSFPVLGDPIKPQSLSIASNAAHGRSKSANDGNWPTLKQNSSSSVKPVQVAGADWKDPSVEGSVKQGTVSSQPVPFSALGPTEKPGIEIGKVPPPIPGVGKQLPPSYGTYPSPTPLGPGSTSSLERRKEGSLPRPSAGLPSRQRPTLLPATGSTPQPGSSQQIQQRISVPPSPTYPPAGPPAFPAGDSKPELPLTVAIRPFLADKGSRPQSPRKGPQTVNSSSIYSMYLQQATPPKNYQPAAHSALNKSVKAVYGKPVLPSGSTSPSPLPFLHGSLSTGTPQPQPPSESTEKEPEQDGPAAPADGSTVESLPRPLSPTKLTPIVHSPLRYQSDADLEALRRKLANAPRPLKKRSSITEPEGPGGPNIQKLLYQRFNTLAGGMEGTPFYQPSPSQDFMGTLADVDNGNTNANGNLEELPPAQPTAPLPAEPAPSSDANDNELPSPEPEELICPQTTHQTAEPAEDNNNNVATVPTTEQIPSPVAEAPSPGEEQVPPAPLPPASHPPATSTNKRTNLKKPNSERTGHGLRVRFNPLALLLDASLEGEFDLVQRIIYEVEDPSKPNDEGITPLHNAVCAGHHHIVKFLLDFGVNVNAADSDGWTPLHCAASCNSVHLCKQLVESGAAIFASTISDIETAADKCEEMEEGYIQCSQFLYGVQEKLGVMNKGVAYALWDYEAQNSDELSFHEGDALTILRRKDESETEWWWARLGDREGYVPKNLLGLYPRIKPRQRTLA

SEQ ID NO: 44071 - protein, 1522 aa, Homo sapiens
MLQSRSVDKQHAVINYDQDRDEHWVKDLGSLNGTFVNDMRIPDQKYVTLKLNDVIRFGYDSNMYVLERVQHRVPEEALKHEKYTSQLQVSVKGLAPKRSEALPEHTPYCEASNPRPEKGDRRPGTEAASYRTPLYGQPSWWGEDDGSTLPDAQRQGEPYPERPKGPVQQDGELHGFRAPAEPQGCSFRREPSYFEIPTKETPQPSQPPEVPAHEMPTKDAEAGGGGAAPVVQSHASFTIEFDDCSPGKMKIKDHITKFSLRQRRPPGKEATPGEMVSAETKVADWLVQNDPSLLHRVGPGDDRHSTKSDLPVHTRTLKGHKHEDGTQSDSEDPLAKAASAAGVPLEASGEQVRLQRQIKRDPQELLHNQQAFVIEFFDEDTPRKKRSQSFTHSPSGDPKADKRRGPTPADRDRPSVPAPVQAGGRSSGPQRAGSLKREKTEERLGSPSPASRTPARPFGSVGRRSRLAQDFMAQCLRESSPAARPSPEKVPPVLPAPLTPHGTSPVGPPTPPPAPTDPQLTKARKQEEDDSLSDAGTYTIETEAQDTEVEEARKMIDQVFGVLESPELSRASSATFRPVIRGDRDESDDGGVAQRMALLQEFASRPLGAAPQAEHQGLPVPGSPGGQKWVSRWASLADSYSDPGLTEDGLGRRGGEPEGSLPVRMRRRLPQLPSERADSPAGPESSRRSGPGPPELDSEQPSRLFGQEELDPDSLSDASGSDGGRGPEPGVEPQDSRRRSPQEGPTWSRGRRSPRAPGEPTPASFFIGDQNGDAVLSRKPLAAPGDGEGLGQTAQPSPPARDGVYVSANGRMVIQLRPGRSPEPDGPAPAFLRQESFTKEPASGPPAPGKPPHISSHPLLQDLAATRAARMDFHSQDTHLILKETETALAALEARLLSNSVDAECEGGSTPRPPEDALSGDSDVDTASTVSLRSGKSGPSPTTPQPLRAQKEMSPSPPAAQDPGGTALVSAREQSSERQHHPLGPTDMGRGEPVRRSAIRRGHRPRGSLDWPSEERGPVLAHLPSSDVMASNHETPEATGAGRLGSRRKPAAPPPSPAAREEQSRSSASSQKGPQALTRSNSLSTPRPTRASRLRRARLGDASDTEAADGERGSLGNPEPVGRPAAEQAKKLSRLDILAMPRKRAGSFTGTSDPEAAPARTSFSGRSVELCCASRKPTMAEARAVSRKAANTATTTGPRQPFSRARSGSARYTSTTQTPRAGSSSRARSRAPGPRDTDDDEEEPDPYGFIVQTAEIAEIARLSQTLVKDVAILAQEIHDVAGDGDTLGSSEPAHSASLSNMPSTPASTISAREELVQRIPEASLNFQKVPPGSLNSRDFDQNMNDSCEDALANKTRPRNREEVIFDNLMLNPVSQLSQAIRENTEHLAEKMKILFQNTGRAWEDLEARINAENEVPILKTSNKEISSILKELRRVQKQLEVINAIVDPSGSLDLLTGNRSLASSAQPGLGKGRVAAQSPPSPASAEALLPALPLRNFPQRASCGPPSLPDPTFLPDAERFLI

SEQ ID NO: 44072 - protein, 5695 aa, Homo sapiens
MSRPEAVQEATEVTLKTEVEAGASGYSVTGGGDQGIFVKQVLKDSSAAKLFNLREGDQLLSTTVFFENIKYEDALKILQYSEPYKVQFKIRRQLPAPQDEEWASSDAQHGPQGKEKEDTDVADGCRETPTKTLEGDGDQERLISKPRVGRGRQSQRERLSWPKFQSIKSKRGPGPQRSHSSSEAYEPRDAHDVSPTSTDTEAQLTVERQEQKAGPGSQRRRKFLNLRFRTGSGQGPSSTGQPGRGFQSGVGRAGVLEELGPWGDSLEETGAATGSRREERAEQDREVMPAQSMPLPTELGDPRLCEGTPQEGGLRAARLHGKTLEGQAQETAVAQRKPRAQPTPGMSREGEGEGLQSLEIGIARLSLRDTTEGGTQIGPPEIRVRVHDLKTPKFAFSTEKEPERERRLSTPQRGKRQDASSKAGTGLKGEEVEGAGWMPGREPTTHAEAQGDEGDGEEGLQRTRITEEQDKGREDTEGQIRMPKFKIPSLGWSPSKHTKTGREKATEDTEQGREGEATATADRREQRRTEEGLKDKEDSDSMTNTTKIQLIHDEKRLKKEQILTEKEVATKDSKFKMPKFKMPLFGASAPGKSMEASVDVSAPKVEADVSLLSMQGDLKTTDLSVQTPSADLEVQDGQVDVKLPEGPLPEGASLKGHLPKVQRPSLKMPKVDLKGPKLDLKGPKAEVTAPDVKMSLSSMEVDVQAPRAKLDGARLEGDLSLADKEVTAKDSKFKMPKFKMPSFGVSAPGKSMEDSVDVSAPKVEADVSLSSMQGDLKATDLSIQPPSADLEVQAGQVDVKLPEGPVPEGAGPKVHLPKVEMPSFKMPKVDLKGPQIDVKGPKLDLKGPKAEVTAPDGEVSLPSMEVDVQAQKAKLDGAWLEGDLSLADKDVTAKDSKFKMPKFKMPSFGVSAPGKSIKALVDVSAPKVEADLSLPSMQGDLKTTDLSIQPASTDLKVQADQVDVKLPEGHLPEGAGLKGHLPKVEMPSFKMPKVALKGPQVDVKGPKLDLKSPKAEVTAPDVEVSLPSVEVDVEAPGAKLDSARLEGELSLADKDVTAKDSRFKMPKFKMPSFGASAPGKSIEASVDVSAPKVEADVSLPSMQGDLKTTDLSIQPPSADLEVHAGQVDVKLLEGHVPEGAGFKGHLPKVQMPSLKMPKVDLKGPQVEVRGPKLDLKGHKAEVTAHEVAVSLPSVEVDMQAPGAKLDGAQLDGDLSLADKDVTAKDSKFKMPKFKMPSFGVSAPGKSIEASVDLSAPKVEADMSLPSMQGDLKTTDLSIQPPSTDLELQAGQLDVKLPEGPVPEGAGLKGHLPKLQMPSFKVPKVDLKGPEIDIKGPKLDLKDPKVEVTAPDVEVSLPSVEVDVEAPGAKLDGGRLEEDMSLADKDLTTKDSKFKMPKFKMPSFGVSAPGKSIEASVDVSAPKVEADVSLPSMQGDLKATDLSIQPPSADLEVQAGQVDVKLPEGPVSEGAGLKGHLPKVQMPSFKMPKVDLKGPQIDVKGPKLDLKGPKVEVTAPDVKMSLSSMEVDVQAPRAKLDGAQLEGDLSLADKAVTAKDSKFKMPKFKMPSFGVSAPGKSIEASVDVSEPKVEADVSLPSMQGDLKTTDLSIQSPSADLEVQAGQVNVKLPEGPLPEGAGFKGHLPKVQMPSLKMPKVALKGPQMDVKGPKLDLKGPKAEVMAPDVEVSLPSVEVDVEAPGAKLDSVRLEGDLSLADKDVTAKDSKFKMPKFKMPSFGVSAPGKSIEASVDVSAPKVEAEVSLPSMQGDLKTTDLCIPLPSADLVVQAGQVDMKLPEGQVPEGAGLKGHLPKVDMPSFKMPKVDLKGPQTDVKGAKLDLKGPKAEVTAPDVEVSLPSMEVDVQAQKAKLDGARLEGDLSLADKDMTAKDSKFKMPKFKMPSFGVSAPGRSIEASVDVPAPKVEADVSLPSMQGDLKTTDLSIQPPSADLKVQTGQVDVKLPEGHVPEGAGLKGHLPKVEMPSLKMPKVDLKGPQVDIKGPKLDLKDPKVEMRVPDVEVSLPSMEVDVQAPRAKLDSAHLQGDLTLANKDLTTKDSKFKMPKFKMPSFGVSAPGKSIEASVDVSPPKVEADMSLPSMQGDLKTTDLSIQPLSADVKVQAGQVDVKLLEGPVPEEVGLKGHLPKLQMPSFKVPKVDLKGPEIDIKGPKLDLKDPKVEVTAPDVEVSLPSVEVDVKAPGAKLDGARLEGDMSLADKDVTAKDSKFKMPKFKMLSFGVSALGKSIEASADVSALKVEADVSLPSMQGDLKTTDLSVQPPSADLEVQAGQVDVKLPEGPVPEGAGLKGHLPKLQMPSFKMPKVDLKGPQIDVKGPKLDLKGPKTDVMAPDVEVSQPSVEVDVEAPGAKLDGAWLEGDLSVADKDVTTKDSRFKIPKFKMPSFGVSAPGKSIEASVDVSAPKVEADGSLSSMQGDLKATDLSIQPPSADLEVQAGQVDVKLPEGPVPEGAGLKGHLPKVQMPSFKMPEMDLKGPQLDVKGPKLDLKGPKAEVTAPDVEMSLSSMEVDVQAPRAKLDGARLEGDLSLADKGVTAKDSKFKMPKFKMPSFRVSAPGESIEALVDVSELKVEADMSLPSMQGDLKTTDISIQPPSAQLEVQAGQVDVKLPEGHVPEGAGLKGHLPKLQMPSFKMPEVDLKGPQIDVKGPNVDLKGPKAEVTAPDVKMSLSSMEVDVQAPRAKLDGARLEGDLSLADKGMTAKDSKFKMPKFKMPSFGVSAPGKSIEASVDVSELKVEADGSFPSMQGDLKTTDIRIQPPSAQLEVQAGQVDVKLPEGHVPEGAGLKGHLPKVQMPSFKMPKVDLKGPQIDVKGPKLDLKGPKAEVTAPDVEVSLPSVEVDVEAPRAKLDGARLEGDLSLADKDVTAKDSKFKMPKFKMPSFGVSAPGKSIEVSVDVSAPKVEAEVSLPSMQGDLKTTDISIEPPSAQLEVQAGQVDLKLPEGHVPEGAGLKGHLPKLQMPSFKMPKVDRKGPQIDVKGPKLDLKGPKTDVTAPDVEVSQPGMEVDVEAPGAKLDGARLEGDLSLADKDVTAKDSKFKMPKFKMPSFGVSAPGKSIEVLVDVSAPKVEADLSLPSMQGDLKNTDISIEPPSAQLEVQAGQVDVKLPEGHVLEGAGLKGHLPKLQMPSFKMPKVDRKGPQIDIKGPKLDLKGPKMDVTAPDVEVSQPSMEVDVEAPGAKLDGARLEGDLSLADKDVTAKDSKFKMPKFKMPSYRASAPGKSIQASVDVSAPKAEADVSLPSMQGDLKTTDLSIQLPSVDLEVQAGQVDVKLPEGHVPEGAGLKGHLPKVEMPSFKMPKVDLKSPQVDIKGPKLDLKVPKAEVTVPDVEVSLPSVEVDVQAPRAKLDGARLEGDLSLAEKDVTAKDSKFKMPKFKMPSFGVSAPGRSIEASLDVSAPKVEADVSLSSMQGDLKATDLSIQPPSADLEVQAVQVDVELLEGPVPEGAGLKGHLPKVEMPSLKTPKVDLKGPQIDVKGPKLDLKGPKAEVRVPDVEVSLPSVEVDVQAPKAKLDAGRLEGDLSLADKDVTAKDSKFKMPKFKMPSFRVSAPGKSMEASVDVSAPKVEADVSLPSMQGDLKTTDLSIQPPSADLKVQAGQMDVKLPEGQVPEGAGLKEHLPKVEMPSLKMPKVDLKGPQVDIKGPKLDLKVSKAEVTAPDVEVSLPSVEVDVQAPRAKLDSAQLEGDLSLADKDVTAKDSKFKMPKFKMPSFGVSAPGKSIEASVHVSAPKVEADVSLPSMQGDLKTTDLSIQPHSADLTVQARQVDMKLLEGHVPEEAGLKGHLPKVQMPSFKMPKVDLKGPEIDIKGPKLDLKDPKVEVTAPDVEVSLPSVEVDVEAPGAKLDGARLEGDLSLADKDMTAKDSKFKMPKFKMPSFGVSAPGKSMEASVDVTAPKVEADVSLPSMQGDLKATDLSVQPPSADLEVQAGQVDVKLPEGPVPEGASLKGHLPKVQMPSFKMPKVDLKGPQIDVKGPKLDLKGPKAEVTAPDVKMSLSSMEVDVQAPRAKLDGVQLEGDLSLADKDVTAKDSKFKMPKFKMPSFGVSAPGKSMEASVDVSELKAKADVSLPSMQGDLKTTDLSIQSPSADLEVQAGQVDVKLPEGPLPKGAGLKGHLPKVQMPCLKMPKVALKGPQVDVKGPKLDLKGPKADVMTPVVEVSLPSMEVDVEAPGAKLDSVRLEGDLSLADKDMTAKDSKFKMPKFKMPSFGVSAPGKSIEASLDVSALKVEADVSLPSMQGDLKTTHLSIQPPSADLEVQAGQEDVKLPEGPVHEGAGLKGHLPKLQMPSFKVPKVDLKGPQIDVNVPKLDLKGPKVEVTSPNLDVSLPSMEVDIQAPGAKLDSTRLEGDLSLADKDVTAKDSKFKMPKFKMPSFGMLSPGKSIEVSVDVSAPKMEADMSIPSMQGDLKTTDLRIQAPSADLEVQAGQVDLKLPEGHMPEVAGLKGHLPKVEMPSFKMPKVDLKGPQVDVKGPKLDLKGPKAEVMAPDVEVSLPSVETDVQAPGSMLDGARLEGDLSLAHEDVAGKDSKFQGPKLSTSGFEWSSKKVSMSSSEIEGNVTFHEKTSTFPIVESVVHEGDLHDPSRDGNLGLAVGEVGMDSKFKKLHFKVPKVSFSSTKTPKDSLVPGAKSSIGLSTIPLSSSECSSFELQQVSACSEPSMQMPKVGFAGFPSSRLDLTGPHFESSILSPCEDVTLTKYQVTVPRAALAPELALEIPSGSQADIPLPKTECSTDLQPPEGVPTSQAESHSGPLNSMIPVSLGQVSFPKFYKPKFVFSVPQMAVPEGDLHAAVGAPVMSPLSPGERVQCPLPSTQLPSPGTCVSQGPEELVASLQTSVVAPGEAPSEDADHEGKGSPLKMPKIKLPSFRWSPKKETGPKVDPECSVEDSKLSLVLDKDEVAPQSAIHMDLPPERDGEKGRSTKPGFAMPKLALPKMKASKSGVSLPQRDVDPSLSSATAGGSFQDTEKASSDGGRGGLGATASATGSEGVNLHRPQVHIPSLGFAKPDLRSSKAKVEVSQPEADLPLPKHDLSTEGDSRGCGLGDVPVSQPCGEGIAPTPEDPLQPSCRKPDAEVLTVESPEEEAMTKYSQESWFKMPKFRMPSLRRSFRDRGGAGKLEVAQTQAPAATGGEAAAKVKEFLVSGSNVEAAMSLQLPEADAEVTASESKSSTDILRCDLDSTGLKLHLSTAGMTGDELSTSEVRIHPSKGPLPFQMPGMRLPETQVLPGEIDETPLSKPGHDLASMEDKTEKWSSQPEGPLKLKASSTDMPSQISVVNVDQLWEDSVLTVKFPKLMVPRFSFPAPSSEDDVFIPTVREVQCPEANIDTALCKESPGLWGASILKAGAGVPGEQPVDLNLPLEAPPISKVRVHIQGAQVESQEVTIHSIVTPEFVDLSVPRTFSTQIVRESEIPTSEIQTPSYGFSLLKVKIPEPHTQARVYTTMTQHSRTQEGTEEAPIQATPGVDSISGDLQPDTGEPFEMISSSVNVLGQQTLTFEVPSGHQLADSCSDEEPAEILEFPPDDSQEATTPLADEGRAPKDKPESKKSGLLWFWLPNIGFSSSVDETGVDSKNDVQRSAPIQTQPEARPEAELPKKQEKAGWFRFPKLGFSSSPTKKSKSTEDGAELEEQKLQEETITFFDARESFSPEEKEEGELIGPVGTGLDSRVMVTSAARTELILPEQDRKADDESKGSGLGPNEG

SEQ ID NO: 44073 - protein, 169 aa, Homo sapiens
MTQDGTWRTVAPQAAERAPLDRLVSTEILCRAAWGQEGAHPAPGLGDGHTQGPVSDLCPVTSAQAPRHLQSSAWEMDGPRENRGSFHKSLDQIFETLETKNPSCMEELFSDVDSPYYDLDTVLTGMMGGARPGPCEGLEGLAPATPGPSSSCKSDLGELDHVVEILVET

SEQ ID NO: 44074 - protein, 538 aa, Homo sapiens
MLLPLACLHGRVAQCLTSLLLLAEPLPRPRRGARARGAASTGAEAAPAAPPAKMAAELYAPASAAAADLANSNAGAAVGRKAGPRSPPSAPAPAPPPPAPAPPTLGNNHQESPGWRCCRPTLRERNALMFNNELMADVHFVVGPPGATRTVPAHKYVLAVGSSVFYAMFYGDLAEVKSEIHIPDVEPAAFLILLKYMYSDEIDLEADTVLATLYAAKKYIVPALAKACVNFLETSLEAKNACVLLSQSRLFEEPELTQRCWEVIDAQAEMALRSEGFCEIDRQTLEIIVTREALNTKEAVVFEAVLNWAEAECKRQGLPITPRNKRHVLGRALYLVRIPTMTLEEFANGAAQSDILTLEETHSIFLWYTATNKPRLDFPLTKRKGLAPQRCHRFQSSAYRSNQWRYRGRCDSIQFAVDRRVFIAGLGLYGSSSGKAEYSVKIELKRLGVVLAQNLTKFMSDGSSNTFPVWFEHPVQVEQDTFYTASAVLDGSELSYFGQEGMTEVQCGKVAFQFQCSSDSTNGTGVQGGQIPELIFYA

SEQ ID NO: 44075 - protein, 776 aa, Homo sapiens
MLQRRKRYKNRTILGYKTLAAGSISMAEVMQHPSEGGQVLSLCSSIKEAPVKAAEIWIASLSSQPIDHEDSTMQAGPKAKSTDNYSEEEYESFSSEQEASDDAVQGQDLDEDDFDVGKPKKQRRSIVRTTSMTRQQNFKQKVVALLRRFKVSDEVLDSEQDPAEHIPEAEEDLDLLYDTLDMEHPSDSGPDMEDDDSVLSTPKPKLRPYFEGLSHSSSQTEIGSIHSARSHKEPPSPADVPEKTRSLGGRQPSDSVSDTVALGVPGPREHPGQPEDSPEAEASTLDVFTERLPPSGRITKTESLVIPSTRSEGKQAGRRGRSTSLKERQAARPQNERANSLDNERCPDARSQLQIPRKTVYDQLNHILISDDQLPENIILVNTSDWQGQFLSDVLQRHTLPVVCTCSPADVQAAFSTIVSRIQRYCNCNSQPPTPVKIAVAGAQHYLSAILRLFVEQLSHKTPDWLGYMRFLVIPLGSHPVARYLGSVDYRYNNFFQDLAWRDLFNKLEAQSAVQDTPDIVSRITQYIAGANCAHQLPIAEAMLTYKQKSPDEESSQKFIPFVGVVKVGIVEPSSATSGDSDDAAPSGSGTLSSTPPSASPAAKEASPTPPSSPSVSGGLSSPSQGVGAELMGLQVDYWTAAQPADRKRDAEKKDLPVTKNTLKCTFRSLQVSRLPSSGEAAATPTMSMTVVTKEKNKKVMFLPKKAKDKDVESKSQCIEGISRLICTARQQQNMLRVLIDGVECSDVKFFQLAAQWSSHVKHFPICIFGHSKATF

SEQ ID NO: 44076 - protein, 221 aa, Homo sapiens
MLQRRKRYKNRTILGYKTLAAGSISMAEVMQHPSEGGQVLSLCSSIKEAPVKAAEIWIASLSSQPIDHEDSTMQAGPKAKSTDNYSEEEYESFSSEQEASDDAVQGQDLDEDDFDVGKPKKQRRSIVRTTSMTRQQNFKQKVVALLRRFKVSDEVSAPRLLLAAPTPATAPGREEASGVCLRATSGSAAHRLHGPASIAQSARRSDSGTASRAPGHPLGLC

SEQ ID NO: 44077 - protein, 295 aa, Homo sapiens
MDAYLVEQNQGPRKIGVCIIVLVGDVCFLLVLRYVAVWVGAEVRTAKRGYAMILWFLYIFVLEIKLYFIFQNYKAARRGAADPVARKALTLLLSVCVPGLFLLLVALDRMEYVRTFRKREDLRGRLFWVALDLLDLLDMQASLWEPPRSGLPLWAEGLTFFYCYMLLLVLPCVALSEVSMQGEHIAPQKMMLYPVLSLATVNVVAVLARAANMALFRDSRVSAIFVGKNVVALATKACTFLEYRRQVRDFPPPALSLELQPPPPQRNSVPPPPPPLHGPPGRPHMSSPTRDPLDT

SEQ ID NO: 44078 - protein, 35 aa, Homo sapiens
MRIKGGIYEEMRVNKSSLTSPSLFFIRETILNLHV

SEQ ID NO: 44079 - protein, 673 aa, Homo sapiens
MEEDSEASSSRIGDSSQGDNNLQKLGPDDVSVDIDAIRRVYTRLLSNEKIETAFLNALVYLSPNVECDLTYHNVYSRDPNYLNLFIIVMENRNLHSPEYLEMALPLFCKAMSKLPLAAQGKLIRLWSKYNADQIRRMMETFQQLITYKVISNEFNSRNLVNDDDAIVAASKCLKMVYYANVVGGEVDTNHNEEDDEEPIPESSELTLQELLGEERRNKKGPRVDPLETELGVKTLDCRKPLIPFEEFINEPLNEVLEMDKDYTFFKVETENKFSFMTCPFILNAVTKNLGLYYDNRIRMYSERRITVLYSLVQGQQLNPYLRLKVRRDHIIDDALVRLEMIAMENPADLKKQLYVEFEGEQGVDEGGVSKEFFQLVVEEIFNPDIGMFTYDESTKLFWFNPSSFETEGQFTLIGIVLGLAIYNNCILDVHFPMVVYRKLMGKKGTFRDLGDSHPVLYQSLKDLLEYEGNVEDDMMITFQISQTDLFGNPMMYDLKENGDKIPITNENRKEFVNLYSDYILNKSVEKQFKAFRRGFHMVTNESPLKYLFRPEEIELLICGSRNLDFQALEETTEYDGGYTRDSVLIREFWEIVHSFTDEQKRLFLQFTTGTDRAPVGGLGKLKMIIAKNGPDTERLPTSHTCFNVLLLPEYSSKEKLKERLLKAITYAKGFGML

SEQ ID NO: 44080 - protein, 452 aa, Homo sapiens
MIKNLLLFCISMNLSSHFGFSQMPTSSVKDETNDNITIFTRILDGLLDGYDNRLRPGLGERITQVRTDIYVTSFGPVSDTEMEYTIDVFFRQSWKDERLRFKGPMQRLPLNNLLASKIWTPDTFFHNGKKSIAHNMTTPNKLLRLEDDGTLLYTMRLTISAECPMQLEDFPMDAHACPLKFGSYAYPNSEVVYVWTNGSTKSVVVAEDGSRLNQYHLMGQTVGTENISTSTGEYTIMTAHFHLKRKIGYFVIQTYLPCIMTVILSQVSFWLNRESVPARTVFGVTTVLTMTTLSISARNSLPKVAYATAMDWFIAVCYAFVFSALIEFATVNYFTKRGWAWDGKKALEAAKIKKKREVILNKSTNAFTTGKMSHPPNIPKEQTPAGTSNTTSVSVKPSEEKTSESKKTYNSISKIDKMSRIVFPVLFGTFNLVYWATYLNREPVIKGAASPK

SEQ ID NO: 44081 - protein, 731 aa, Homo sapiens
MSSSRSKDSCFTENTPLLRNSLQEKGSRCIPVYHPEFITAEESWEDSSADWERRYLLSREVSGLSASASSEKGDLLDSPHIRLRLSKLRRCVQWLKVMGLFAFVVLCSILFSLYPDQGKLWQLLALSPLENYSVNLSSHVDSTLLQVDLAGALVASGPSRPGREEHIVVELTQADALGSRWRRPQQVTHNWTVYLNPRRSEHSVMSRTFEVLTRETVSISIRASLQQTQAVPLLMAHQYLRGSVETQVTIATAILAGVYALIIFERPSLTHVVEWIDFETLALLFGMMILVAIFSETGFFDYCAVKAYRLSRGRVWAMIIMLCLIAAVLSAFLDNVTTMLLFTPVTIRLCEVLNLDPRQVLIAEVIFTNIGGAATAIGDPPNVIIVSNQELRKMGLDFAGFTAHMFIGICLVLLVCFPLLRLLYWNRKLYNKEPSEIVELKHEIHVWRLTAQRISPASREETAVRRLLLGKVLALEHLLARRLHTFHRQISQEDKNWETNIQELQKKHRISDGILLAKCLTVLGFVIFMFFLNSFVPGIHLDLGWIAILGAIWLLILADIHDFEIILHRVEWATLLFFAALFVLMEALAHLHLIEYVGEQTALLIKMVPEEQRLIAAIVLVVWVSALASSLIDNIPFTATMIPVLLNLSHDPEVGLPAPPLMYALAFGACLGGNGTLIGASANVVCAGIAEQHGYGFSFMEFFRLGFPMMVVSCTVGMCYLLVAHVVVGWN

SEQ ID NO: 44082 - protein, 4796 aa, Homo sapiens
MVKDGEIVYTGTESTQNGELPPRKDDSVEPSGTKKEDLNDKEKKDEEETPAPIYRAKSILDSWVWGKQPDVNELKECLSVLVKEQQALAVQSATTTLSALRLKQRLVILERYFIALNRTVFQENVKVKWKSSGISLPPVDKKSSRPAGKGVEGLARVGSRAALSFAFAFLRRAWRSGEDADLCSELLQESLDALRALPEASLFDESTVSSVWLEVVERATRFLRSVVTGDVHGTPATKGPGSIPLQDQHLALAILLELAVQRGTLSQMLSAILLLLQLWDSGAQETDNERSAQGTSAPLLPLLQRFQSIICRKDAPHSEGDMHLLSGPLSPNESFLRYLTLPQDNELAIDLRQTAVVVMAHLDRLATPCMPPLCSSPTSHKGSLQEVIGWGLIGWKYYANVIGPIQCEGLANLGVTQIACAEKRFLILSRNGRVYTQAYNSDTLAPQLVQGLASRNIVKIAAHSDGHHYLALAATGEVYSWGCGDGGRLGHGDTVPLEEPKVISAFSGKQAGKHVVHIACGSTYSAAITAEGELYTWGRGNYGRLGHGSSEDEAIPMLVAGLKGLKVIDVACGSGDAQTLAVTENGQVWSWGDGDYGKLGRGGSDGCKTPKLIEKLQDLDVVKVRCGSQFSIALTKDGQVYSWGKGDNQRLGHGTEEHVRYPKLLEGLQGKKVIDVAAGSTHCLALTEDSEVHSWGSNDQCQHFDTLRVTKPEPAALPGLDTKHIVGIACGPAQSFAWSSCSEWSIGLRVPFVVDICSMTFEQLDLLLRQVSEGMDGSADWPPPQEKECVAVATLNLLRLQLHAAISHQVDPEFLGLGLGSILLNSLKQTVVTLASSAGVLSTVQSAAQAVLQSGWSVLLPTAEERARALSALLPCAVSGNEVNISPGRRFMIDLLVGSLMADGGLESALHAAITAEIQDIEAKKEAQKEKEIDEQEANASTFHRSRTPLDKDLINTGICESSGKQCLPLVQLIQQLLRNIASQTVARLKDVARRISSCLDFEQHSRERSASLDLLLRFQRLLISKLYPGESIGQTSDISSPELMGVGSLLKKYTALLCTHIGDILPVAASIASTSWRHFAEVAYIVEGDFTGVLLPELVVSIVLLLSKNAGLMQEAGAVPLLGGLLEHLDRFNHLAPGKERDDHEELAWPGIMESFFTGQNCRNNEEVTLIRKADLENHNKDGGFWTVIDGKVYDIKDFQTQSLTGNSILAQFAGEDPVVALEAALQFEDTRESMHAFCVGQYLEPDQEIVTIPDLGSLSSPLIDTERNLGLLLGLHASYLAMSTPLSPVEIECAKWLQSSIFSGGLQTSQIHYSYNEEKDEDHCSSPGGTPASKSRLCSHRRALGDHSQAFLQAIADNNIQDHNVKDFLCQIERYCRQCHLTTPIMFPPEHPVEEVGRLLLCCLLKHEDLGHVALSLVHAGALGIEQVKHRTLPKSVVDVCRVVYQAKCSLIKTHQEQGRSYKEVCAPVIERLRFLFNELRPAVCNDLSIMSKFKLLSSLPRWRRIAQKIIRERRKKRVPKKPESTDDEEKIGNEESDLEEACILPHSPINVDKRPIAIKSPKDKWQPLLSTVTGVHKYKWLKQNVQGLYPQSPLLSTIAEFALKEEPVDVEKMRKCLLKQLERAEVRLEGIDTILKLASKNFLLPSVQYAMFCGWQRLIPEGIDIGEPLTDCLKDVDLIPPFNRMLLEVTFGKLYAWAVQNIRNVLMDASAKFKELGIQPVPLQTITNENPSGPSLGTIPQARFLLVMLSMLTLQHGANNLDLLLNSGMLALTQTALRLIGPSCDNVEEDMNASAQGASATVLEETRKETAPVQLPVSGPELAAMMKIGTRVMRGVDWKWGDQDGPPPGLGRVIGELGEDGWIRVQWDTGSTNSYRMGKEGKYDLKLAELPAAAQPSAEDSDTEDDSEAEQTERNIHPTAMMFTSTINLLQTLCLSAGVHAEIMQSEATKTLCGLLRMLVESGTTDKTSSPNRLVYREQHRSWCTLGFVRSIALTPQVCGALSSPQWITLLMKVVEGHAPFTATSLQRQILAVHLLQAVLPSWDKTERARDMKCLVEKLFDFLGSLLTTCSSDVPLLRESTLRRRRVRPQASLTATHSSTLAEEVVALLRTLHSLTQWNGLINKYINSQLRSITHSFVGRPSEGAQLEDYFPDSENPEVGGLMAVLAVIGGIDGRLRLGGQVMHDEFGEGTVTRITPKGKITVQFSDMRTCRVCPLNQLKPLPAVAFNVNNLPFTEPMLSVWAQLVNLAGSKLEKHKIKKSTKQAFAGQVDLDLLRCQQLKLYILKAGRALLSHQDKLRQILSQPAVQETGTVHTDDGAVVSPDLGDMSPEGPQPPMILLQQLLASATQPSPVKAIFDKQELEAAALAVCQCLAVESTHPSSPGFEDCSSSEATTPVAVQHIRPARVKRRKQSPVPALPIVVQLMEMGFSRRNIEFALKSLTGASGNASSLPGVEALVGWLLDHSDIQVTELSDADTVSDEYSDEEVVEDVDDAAYSMSTGAVVTESQTYKKRADFLSNDDYAVYVRENIQVGMMVRCCRAYEEVCEGDVGKVIKLDRDGLHDLNVQCDWQQKGGTYWVRYIHVELIGYPPPSSSSHIKIGDKVRVKASVTTPKYKWGSVTHQSVGVVKAFSANGKDIIVDFPQQSHWTGLLSEMELVPSIHPGVTCDGCQMFPINGSRFKCRNCDDFDFCETCFKTKKHNTRHTFGRINEPGQSAVFCGRSGKQLKRCHSSQPGMLLDSWSRMVKSLNVSSSVNQASRLIDGSEPCWQSSGSQGKHWIRLEIFPDVLVHRLKMIVDPADSSYMPSLVVVSGGNSLNNLIELKTININPSDTTVPLLNDCTEYHRYIEIAIKQCRSSGIDCKIHGLILLGRIRAEEEDLAAVPFLASDNEEEEDEKGNSGSLIRKKAAGLESAATIRTKVFVWGLNDKDQLGGLKGSKIKVPSFSETLSALNVVQVAGGSKSLFAVTVEGKVYACGEATNGRLGLGISSGTVPIPRQITALSSYVVKKVAVHSGGRHATALTVDGKVFSWGEGDDGKLGHFSRMNCDKPRLIEALKTKRIRDIACGSSHSAALTSSGELYTWGLGEYGRLGHGDNTTQLKPKMVKVLLGHRVIQVACGSRDAQTLALTDEGLVFSWGDGDFGKLGRGGSEGCNIPQNIERLNGQGVCQIECGAQFSLALTKSGVVWTWGKGDYFRLGHGSDVHVRKPQVVEGLRGKKIVHVAVGALHCLAVTDSGQVYAWGDNDHGQQGNGTTTVNRKPTLVQGLEGQKITRVACGSSHSVAWTTVDVATPSVHEPVLFQTARDPLGASYLGVPSDADSSAASNKISGASNSKPNRPSLAKILLSLDGNLAKQQALSHILTALQIMYARDAVVGALMPAAMIAPVECPSFSSAAPSDASAMASPMNGEECMLAVDIEDRLSPNPWQEKREIVSSEDAVTPSAVTPSAPSASARPFIPVTDDLGAASIIAETMTKTKEDVESQNKAAGPEPQALDEFTSLLIADDTRVVVDLLKLSVCSRAGDRGRDVLSAVLSGMGTAYPQVADMLLELCVTELEDVATDSQSGRLSSQPVVVESSHPYTDDTSTSGTVKIPGAEGLRVEFDRQCSTERRHDPLTVMDGVNRIVSVRSGREWSDWSSELRIPGDELKWKFISDGSVNGWGWRFTVYPIMPAAGPKELLSDRCVLSCPSMDLVTCLLDFRLNLASNRSIVPRLAASLAACAQLSALAASHRMWALQRLRKLLTTEFGQSININRLLGENDGETRALSFTGSALAALVKGLPEALQRQFEYEDPIVRGGKQLLHSPFFKVLVALACDLELDTLPCCAETHKWAWFRRYCMASRVAVALDKRTPLPRLFLDEVAKKIRELMADSENMDVLHESHDIFKREQDEQLVQWMNRRPDDWTLSAGGSGTIYGWGHNHRGQLGGIEGAKVKVPTPCEALATLRPVQLIGGEQTLFAVTADGKLYATGYGAGGRLGIGGTESVSTPTLLESIQHVFIKKVAVNSGGKHCLALSSEGEVYSWGEAEDGKLGHGNRSPCDRPRVIESLRGIEVVDVAAGGAHSACVTAAGDLYTWGKGRYGRLGHSDSEDQLKPKLVEALQGHRVVDIACGSGDAQTLCLTDDDTVWSWGDGDYGKLGRGGSDGCKVPMKIDSLTGLGVVKVECGSQFSVALTKSGAVYTWGKGDYHRLGHGSDDHVRRPRQVQGLQGKKVIAIATGSLHCVCCTEDGEVYTWGDNDEGQLGDGTTNAIQRPRLVAALQGKKVNRVACGSAHTLAWSTSKPASAGKLPAQVPMEYNHLQEIPIIALRNRLLLLHHLSELFCPCIPMFDLEGSLDETGLGPSVGFDTLRGILISQGKEAAFRKVVQATMVRDRQHGPVVELNRIQVKRSRSKGGLAGPDGTKSVFGQMCAKMSSFGPDSLLLPHRVWKVKFVGESVDDCGGGYSESIAEICEELQNGLTPLLIVTPNGRDESGANRDCYLLSPAARAPVHSSMFRFLGVLLGIAIRTGSPLSLNLAEPVWKQLAGMSLTIADLSEVDKDFIPGLMYIRDNEATSEEFEAMSLPFTVPSASGQDIQLSSKHTHITLDNRAEYVRLAINYRLHEFDEQVAAVREGMARVVPVPLLSLFTGYELETMVCGSPDIPLHLLKSVATYKGIEPSASLIQWFWEVMESFSNTERSLFLRFVWGRTRLPRTIADFRGRDFVIQVLDKYNPPDHFLPESYTCFFLLKLPRYSCKQVLEEKLKYAIHFCKSIDTDDYARIALTGEPAADDSSDDSDNEDVDSFASDSTQDYLTGH

SEQ ID NO: 44083 - protein, 695 aa, Homo sapiens
MELPLEGYVPEGLELAALRPESPAPEEQECHNHSPDGDSSSDYVNNTSEEEDYDEGLPEEEEGITYYIRYCPEDDSYLEGMDCNGEEYLAHSAHPVDTDECQEAVEEWTDSAGPHPHGHEAEGSQDYPDGQLPIPEDEPSVLEAHDQEEDGHYCASKEGYQDYYPEEANGNTGASPYRLRRGDGDLEDQEEDIDQIVAEIKMSLSMTSITSASEASPEHGPEPGPEDSVEACPPIKASCSPSRHEARPKSLNLLPEAKHPGDPQRGFKPKTRTPEERLKWPHEQVCNGLEQPRKQQRSDLNGPVDNNNIPETKKVASFPSFVAVPGPCEPEDLIDGIIFAANYLGSTQLLSERNPSKNIRMMQAQEAVSRVKNSEGDAQTLTEVDLFISTQRIKVLNADTQETMMDHALRTISYIADIGNIVVLMARRRMPRSASQDCIETTPGAQEGKKQYKMICHVFESEDAQLIAQSIGQAFSVAYQEFLRANGINPEDLSQKEYSDIINTQEMYNDDLIHFSNSENCKELQLEKHKGEILGVVVVESGWGSILPTVILANMMNGGPAARSGKLSIGDQIMSINGTSLVGLPLATCQGIIKGLKNQTQVKLNIVSCPPVTTVLIKRPDLKYQLGFSVQNGIVSSPSCSGPPPPLQGPGRGSSSRPMGQAMSGSLVGPGLWLQLPTARPPGAGTFHGSLGGPG

SEQ ID NO: 44084 - protein, 1688 aa, Homo sapiens
MSARAAAAKSTAMEETAIWEQHTVTLHRAPGFGFGIAISGGRDNPHFQSGETSIVISDVLKGGPAEGQLQENDRVAMVNGVSMDNVEHAFAVQQLRKSGKNAKITIRRKKKVQIPVSRPDPEPVSDNEEDSYDEEIHDPRSGRSGVVNRRSEKIWPRDRSASRERSLSPRSDRRSVASSQPAKPTKVTLVKSRKNEEYGLRLASHIFVKEISQDSLAARDGNIQEGDVVLKINGTVTENMSLTDAKTLIERSKGKLKMVVQRDERATLLNVPDLSDSIHSANASERDDISEIQSLASDHSGRSHDRPPRRSRSRSPDQRSEPSDHSRHSPQQPSNGSLRSRDEERISKPGAVSTPVKHADDHTPKTVEEVTVERNEKQTPSLPEPKPVYAQVGQPDVDLPVSPSDGVLPNSTHEDGILRPSMKLVKFRKGDSVGLRLAGGNDVGIFVAGVLEDSPAAKEGLEEGDQILRVNNVDFTNIIREEAVLFLLDLPKGEEVTILAQKKKDVYRRIVESDVGDSFYIRTHFEYEKESPYGLSFNKGEVFRVVDTLYNGKLGSWLAIRIGKNHKEVERGIIPNKNRAEQLASVQYTLPKTAGGDRADFWRFRGLRSSKRNLRKSREDLSAQPVQTKFPAYERVVLREAGFLRPVTIFGPIADVAREKLAREEPDIYQIAKSEPRDAGTDQRSSGIIRLHTIKQIIDQDKHALLDVTPNAVDRLNYAQWYPIVVFLNPDSKQGVKTMRMRLCPESRKSARKLYERSHKLRKNNHHLFTTTINLNSMNDGWYGALKEAIQQQQNQLVWVSEGKADGATSDDLDLHDDRLSYLSAPGSEYSMYSTDSRHTSDYEDTDTEGGAYTDQELDETLNDEVGTPPESAITRSSEPVREDSSGMHHENQTYPPYSPQAQPQPIHRIDSPGFKPASQQVYRKDPYPEEMMRQNHVLKQPAVSHPGHRPDKEPNLTYEPQLPYVEKQASRDLEQPTYRYESSSYTDQFSRNYEHRLRYEDRVPMYEEQWSYYDDKQPYPSRPPFDNQHSQDLDSRQHPEESSERGYFPRFEEPAPLSYDSRPRYEQAPRASALRHEEQPAPGYDTHGRLRPEAQPHPSAGPKPAESKQYFEQYSRSYEQVPPQGFTSRAGHFEPLHGAAAVPPLIPSSQHKPEALPSNTKPLPPPPTQTEEEEDPAMKPQSVLTRVKMFENKRSASLETKKDVNDTGSFKPPEVASKPSGAPIIGPKPTSQNQFSEHDKTLYRIPEPQKPQLKPPEDIVRSNHYDPEEDEEYYRKQLSYFDRRSFENKPPAHIAASHLSEPAKPAHSQNQSNFSSYSSKGKPPEADGVDRSFGEKRYEPIQATPPPPPLPSQYAQPSQPVTSASLHIHSKGAHGEGNSVSLDFQNSLVSKPDPPPSQNKPATFRPPNREDTAQAAFYPQKSFPDKAPVNGTEQTQKTVTPAYNRFTPKPYTSSARPFERKFESPKFNHNLLPSETAHKPDLSSKTPTSPKTLVKSHSLAQPPEFDSGVETFSIHAEKPKYQINNISTVPKAIPVSPSAVEEDEDEDGHTVVATARGIFNSNGGVLSSIETGVSIIIPQGAIPEGVEQEIYFKVCRDNSILPPLDKEKGETLLSPLVMCGPHGLKFLKPVELRLPHCASMTPDGWSFALKSSDSSSGDPKTWQNKCLPGDPNYLVGANCVSVLIDHF

SEQ ID NO: 44085 - protein, 448 aa, Homo sapiens
MVDLTSVTLEDVTPKKSPPPKTNLTPGQSDSAKREVKQKISPYFKSNDVVCKNQDELRNRSVKVICLGSLASKLSRKYVKAKKSIDKDEEFAGSSPQSSKSTVVKSLIDNSSEIEDEDQILENSSQKENVFKCDSLKEECIPEHMVRGSKIMEAESQKATRECEKSALTPGFSDNAIMLFSPDFTLRNTLKSTSEDSLVKQECIKEVVEKREACHCEEVKMTVASEAKIQLSDSEAKSHSSADDASAWSNIQEAPLQDDSCLNNDIPHSIPLEQGSSCNGPGQTTGHPYYLRSFLVVLKTVLENEDDMLLFDEQEKGIVTKFYQLSATGQKLYVRLFQRKLSWIKMTKLEYEEIALDLTPVIEELTNAGFLQTESELQELSEVLELLSAPELKSLAKTFHLVNPNGQKQQLVDAFLKLAKQRSVCTWGKNKPGIGAVILKRFCWLLLQ

SEQ ID NO: 44086 - protein, 746 aa, Homo sapiens
MVDLTSVTLEDVTPKKSPPPKTNLTPGQSDSAKREVKQKISPYFKSNDVVCKNQDELRNRSVKVICLGSLASKLSRKYVKAKKSIDKDEEFAGSSPQSSKSTVVKSLIDNSSEIEDEDQILENSSQKENVFKCDSLKEECIPEHMVRGSKIMEAESQKATRECEKSALTPGFSDNAIMLFSPDFTLRNTLKSTSEDSLVKQECIKEVVEKREACHCEEVKMTVASEAKIQLSDSEAKSHSSADDASAWSNIQEAPLQDDSCLNNDIPHSIPLEQGSSCNGPGQTTGHPYYLRSFLVVLKTVLENEDDMLLFDEQEKGIVTKFYQLSATGQKLYVRLFQRKLSWIKMTKLEYEEIALDLTPVIEELTNAGFLQTESELQELSEVLELLSAPELKSLAKTFHLVNPNGQKQQLVDAFLKLAKQRSVCTWGKNKPGIGAVILKRAKALAGQSVRICKGPRAVFSRILLLFSLTDSMEDEDAACGGQGQLSTVLLVNLGRMEFPSYTINRKTHIFQDRDDLIRYAAATHMLSDISSAMANGNWEEAKELAQCAKRDWNRLKNHPSLRCHEDLPLFLRCFTVGWIYTRILSRFVEILQRLHMYEEAVRELESLLSQRIYCPDSRGRWWDRLALNLHQHLKRLEPTIKCITEGLADPEVRTGHRLSLYQRAVRLRESPSCKKFKHLFQQLPEMAVQDVKHVTITGRLCPQRGMCKSVFVMEAGEAADPTTVLCSVEELALAHYRRSGFDQGN

SEQ ID NO: 44087 - protein, 772 aa, Homo sapiens [sequence omitted]

SEQ ID NO: 44088 - protein, 117 aa, Homo sapiens
MPGEEVLESSQEALHVTERKYLKRDWCKTQPLKQTIHEEGCNSRTIINRFCYGQCNSFYIPRHIRKEEGSFQSCSFCKPKKFTTMMVTLNCPELQPPTKKKRVTRVKQCRCISIDLD

SEQ ID NO: 44089 - protein, 136 aa, Homo sapiens
MQLKGPLGPGGRGPIFELKSVAAGCPVLLGKDNPSPGPSRDSQKPTSPLQSAGDHLEEELDLLLNLDAPIKEGDNILPDQTSQDLKSKEDGEVVQEEEVCAKPSVTEEKNMEPEQPSTSKNVTEEELEDWLDSMIS

SEQ ID NO: 44090 - protein, 125 aa, Homo sapiens
MRARYVNYIKTSEVVRLPYPLQMKSSGPPSYFIKRESWGWTDFLMNPMVMMMVLPLLIFVLLPKVVNTSDPDMRREMEQSMNMLNSNHELPDVSEFMTRLFSSKSSGKSSSGSSKTGKSGAGKRR

SEQ ID NO: 44091 - protein, 68 aa, Homo sapiens
MNLFIMYMAGNTISIFPTMMVCMMAWRPIQALMAISAKNGVQWWRTAFVNMRKQRLVPMYLGLIYILL

SEQ ID NO: 44092 - protein, 102 aa, Homo sapiens
MNLFIMYMAGNTISIFPTMMVCMMAWRPIQALMAISATFKMLESSSQKFLQGLVYLIGNLMGLALAVYKCQSMGLLPTHASDWLAFIEPPERMEFSGGGLLL

SEQ ID NO: 44093 - protein, 457 aa, Homo sapiens
MDGVGVPASMYGDPHAPRPIPPVHHLNHGPPLHATQHYGAHAPHPNVMPASMGSAVNDALKRDKDAIYGHPLFPLLALVFEKCELATCTPREPGVAGGDVCSSDSFNEDIAVFAKQVRAEKPLFSSNPELDNLMIQAIQVLRFHLLELEKVHELCDNFCHRYISCLKGKMPIDLVIDERDGSSKSDHEELSGSSTNLADHNPSSWRDHDDATSTHSAGTPGPSSGGHASQSGDNSSEQGDGLDNSVASPGTGDDDDPDKDKKRQKKRGIFPKVATNIMRAWLFQHLTHPYPSEEQKKQLAQDTGLTILQVNNWFINARRRIVQPMIDQSNRAVSQGAAYSPEGQPMGSFVLDGQQHMGIRPAGLQSMPGDYVSQGGPMGMSMAQPSYTPPQMTPHPTQLRHGPPMHSYLPSHPHHPAMMMHGGPPTHPGMTMSAQSPTMLNSVDPNVGGQVMDIHAQ

SEQ ID NO: 44094 - protein, 464 aa, Homo sapiens
MDGVGVPASMYGDPHAPRPIPPVHHLNHGPPLHATQHYGAHAPHPNVMPASMGSAVNDALKRDKDAIYGHPLFPLLALVFEKCELATCTPREPGVAGGDVCSSDSFNEDIAVFAKQVRAEKPLFSSNPELDNLMIQAIQVLRFHLLELEKVHELCDNFCHRYISCLKGKMPIDLVIDERDGSSKSDHEELSGSSTNLADHNPSSWRDHDDATSTHSAGTPGPSSGGHASQSGDNSSEQGDGLDNSVASPGTGDDDDPDKDKKRQKKRGIFPKVATNIMRAWLFQHLTHPYPSEEQKKQLAQDTGLTILQVNNWFINARRRIVQPMIDQSNRAGFLLDPSVSQGAAYSPEGQPMGSFVLDGQQHMGIRPAGLQSMPGDYVSQGGPMGMSMAQPSYTPPQMTPHPTQLRHGPPMHSYLPSHPHHPAMMMHGGPPTHPGMTMSAQSPTMLNSVDPNVGGQVMDIHAQ

SEQ ID NO: 44095 - protein, 422 aa, Homo sapiens
MEGDVLDTLEALGYKGPLLEEQALTKAAEGGLSSPEFSELCIWLGSQIKSLCNLEESITSAGRDDLESFQLEISGFLKEMACPYSVLISGDIKDRLKKKEDCLKLLLFLSTELQASQILQNKKHKNSQLDKNSEVYQEVQAMFDTLGIPKSTTSDIPHMLNQVESKVKDILSKVQKNHVGKPLLKMDLNSEQAEQLERINDALSCEYECRRRMLMKRLDVTVQSFGWSDRAKVKTDDIARIYQPKRYALSPKTTITMAHLLAAREDLSKIIRTSSGTSREKTACAINKVLMGRVPDRGGRPNEIEPPPPEMPPWQKRQEGGGGRGGWGGGGGGGGRGGGGGGGGRGGWGGGGGGWGGGGGGGGGWGGGGGGGRGGFQGRGDYGGRGGYGGRGGYGGRGYGDPYGGGGGGGGGGGGGGGYRRY

SEQ ID NO: 44096 - protein, 455 aa, Homo sapiens [sequence omitted]

SEQ ID NO: 44097 - protein, 1501 aa, Homo sapiens
MLERRAQEEQQRLLEAKRKEEQEQREILHEIQRRKEEIKEEKKRKEMAKQERLEIASLSNQDHTSKKDPGGHRTAAILHGGSPDFVGNGKHRANSSGRSRRERQYSVCNSEDSPGSCEILYFNMGSPDQLMVHKGKCIGSDEQLGKLVYNALETATGGFVLLYEWVLQWQKKMGPFLTSQEKEKIDKCKKQIQGTETEFNSLVKLSHPNVVRYLAMNLKEQDDSIVVDILVEHISGVSLAAHLSHSGPIPVHQLRRYTAQLLSGLDYLHSNSVVHKVLSASNVLVDAEGTVKITDYSISKRLADICKEDVFEQTRVRFSDNALPYKTGKKGDVWRLGLLLLSLSQGQECGEYPVTIPSDLPADFQDFLKKCVCLDDKERWSPQQLLKHSFINPQPKMPLVEQSPEDSEGQDYVETVIPSNRLPSAAFFSETQRQFSRYFIEFEELQLLGKGAFGAVIKVQNKLDGCCYAVKRIPINPASRQFRRIKGEVTLLSRLHHENIVRYYNAWIERHERPAGPGTPPPDSGPLAKDDRAARGQPASDTDGLDSVEAAAPPPILSSSVEWSTSGERSASARFPATGPGSSDDEDDDEDEHGGVFSQSFLPASDSESDIIFDNEDENSKSQNQDEDCNEKNGCHESEPSVTTEAVHYLYIQMEYCEKSTLRDTIDQGLYRDTVRLWRLFREILDGLAYIHEKGMIHRDLKPVNIFLDSDDHVKIGDFGLATDHLAFSADSKQDDQTGDLIKSDPSGHLTGMVGTALYVSPEVQGSTKSAYNQKVDLFSLGIIFFEMSYHPMVTASERIFVLNQLRDPTSPKFPEDFDDGEHAKQKSVISWLLNHDPAKRPTATELLKSELLPPPQMEESELHEVLHHTLTNVDGKAYRTMMAQIFSQRISPAIDYTYDSDILKGNFSIRTAKMQQHVCETIIRIFKRHGAVQLCTPLLLPRNRQIYEHNEAALFMDHSGMLVMLPFDLRIPFARYVARNNILNLKRYCIERVFRPRKLDRFHPKELLECAFDIVTSTTNSFLPTAEIIYTIYEIIQEFPALQERNYSIYLNHTMLLKAILLHCGIPEDKLSQVYIILYDAVTEKLTRREVEAKFCNLSLSSNSLCRLYKFIEQKGDLQDLMPTINSLIKQKTGIAQLVKYGLKDLEEVVGLLKKLGIKLQVLINLGLVYKVQQHNGIIFQFVAFIKRRQRAVPEILAAGGRYDLLIPQFRGPQALGPVPTAIGVSIAIDKISAAVLNMEESVTISSCDLLVVSVGQMSMSRAINLTQKLWTAGITAEIMYDWSQSQEELQEYCRHHEITYVALVSDKEGSHVKVKSFEKERQTEKRVLETELVDHVLQKLRTKVTDERNGREASDNLAVQNLKGSFSNASGLFEIHGATVVPIVSVLAPEKLSASTRRRYETQVQTRLQTSLANLHQKSSEIEILAVDLPKETILQFLSLEWDADEQAFNTTVKQLLSRLPKQRYLKLVCDEIYNIKVEKKVSVLFLYSYRDDYYRILF

SEQ ID NO: 44098 - protein, 257 aa, Homo sapiens
MPLACEHPVGVSSSVGNAGRAGVGTQAWGTTERTQHPGPAQHCPCGLRVFVLQEKRVVSRNWARGTCGPRVTNEMLEDEDAEDHGGTFCLGELVELAVTMENKAEGKRIVSEKPTRARNQGIEGSPGGRVTRSPPTQVAISSDSARKGSWEPWSRPVGEPPEAGWDYAQWKQEREQIDLARLARHRDAQGDWRRPWDLDKAKSTLQDCSQLRGEGPARAGSRRGEPTPTSSLPSLALFIFHPLVLSFLCLLVSYFQS

SEQ ID NO: 44099 - protein, 132 aa, Homo sapiens
MFESADSTATRSGQDLWAEICSCLPNPEQEDGANNAFSDSFVDSCPEGEGQREVADFAVQPAVKPWAPLQDSEVYLASLEKKLRRIKGLNQEVTSKDMLRTLAQAKKECWDRFLQEKLASEFFVDGLDSDER

SEQ ID NO: 44100 - protein, 183 aa, Homo sapiens
MFESADSTATRSGQDLWAEICSCLPNPEQEDGANNAFSDSFVDSCPEGEGQREVADFAVQPAVKPWAPLQDSEVYLASLEKKLRRIKGLNQEVTSKDMLRTLAQAKKECWDRFLQEKLASEFFVDGLDSDESTLEHFKRWLQPDKVAVSTEEVQYLIPPESQVEKPVAEDEPAAGDKPAAAEQ

SEQ ID NO: 44101 - protein, 264 aa, Homo sapiens
MFAKTAAVSERIHEQVRDRQLEKEYVCRVEGEFPTEEVTCKEPILVVSYKVGVCRVDPRGKPCETVFQRLSYNGQSSVVRCRPLTGRTHQIRVHLQFLGHPILNDPIYNSVAWGPSRGRGGYIPKTNEELLRDLVAEHQAKQSLDVLDLCEGDLSPGLTDSTAPSSELGKDDLEELAAAAQKMEEVAEAAPQELDTIALASEKAVETDVMNQETDPLCAECRLVRQDPLPQDLVMFLHALRYKGPGFEYFSPMPAWAQDDWQKD

SEQ ID NO: 44102 - protein, 335 aa, Homo sapiens [sequence omitted]

SEQ ID NO: 44103 - protein, 56 aa, Homo sapiens [sequence omitted]

SEQ ID NO: 44104 - protein, 193 aa, Homo sapiens [sequence omitted]

SEQ ID NO: 44105 - protein, 1336 aa, Homo sapiens
MLDNLPDLPPALVPSPPKRARPSPGHCLPEDEDPEERLRRHDQHITAVLTKIIERDTSSVAVNLPVPSGVAFPAVFLRSRDTQGKSATSGKRSIFAQEIAARRIAEAKGPSVGEVVPNVGPPEGAVTCETPTPRNQGCQLPGSSHSFQGPNLVTGKGLRDQEAEQEAQTIHEENIARLQAMAPEEILQEQQRLLAQLDPSLVAFLRSHSHTQEQTGETASEEQRPGGPSANVTKEEPLMSAFASEPRKRDKLEPEAPALALPVTPQKEWLHMDTVELEKLHWTQDLPPVRRQQTQERMQARFSLQGELLAPDVDLPTHLGLHHHGEEAERAGYSLQELFHLTRSQVSQQRALALHVLAQVISRAQAGEFGDRLAGSVLSLLLDAGFLFLLRFSLDDRVDGVIATAIRALRALLVAPGDEELLDSTFSWYHGALTFPLMPSQEDKEDEDEDEECPAGKAKRKSPEEESRPPPDLARHDVIKGLLATSLLPRLRYVLEVTYPGPAVVLDILAVLIRLARHSLESATRVLECPRLIETIVREFLPTSWSPVGAGPTPSLYKVPCATAMKLLRVLASAGRNIAARLLSSFDLRSRLCRIIAEAPQELALPPEEAEMLSTEALRLWAVAASYGQGGYLYRELYPVLMRALQVVPRELSTHPPQPLSMQRIASLLTLLTQLTLAAGSTPAETISDSAEASLSATPSLVTWTQVSGLQPLVEPCLRQTLKLLSRPEMWRAVGPVPVACLLFLGAYYQAWSQQPSSCPEDWLQDMQRLSEELLLPLLSQPTLGSLWDSLRHCSLLCNPLSCVPALEAPPSLVSLGCSGGCPRLSLAGSASPFPFLTALLSLLNTLAQIHKGLCGQLAAILAAPGLQNYFLQCVAPGAAPHLTPFSAWALRHEYHLQYLALALAQKAAALQPLPATHAALYHGMALALLSRLLPGSEYLTHELLLSCVFRLEFLPERTSGGPEAADFSDQLSLGSSRVPRCGQGTLLAQACQDLPSIRNCYLTHCSPARASLLASQALHRGELQRVPTLLLPMPTEPLLPTDWPFLPLIRLYHRASDTPSGLSPTDTMGTAMRVLQWVLVLESWRPQALWAVPPAARLARLMCVFLVDSELFRESPVQHLVAALLAQLCQPQVLPNLNLDCRLPGLTSFPDLYANFLDHFEAVSFGDHLFGALVLLPLQRRFSVTLRLALFGEHVGALRALSLPLTQLPVSLECYTVPPEDNLALLQLYFRTLVTGALRPRWCPVLYAVAVAHVNSFIFSQDPQSSDEVKAARRSMLQKTWLLADEGLRQHLLHYKLPNSTLPEGFELYSQLPPLRQHYLQRLTSTVLQNGVSET

SEQ ID NO: 44106 - protein, 1258 aa, Homo sapiens
MLDNLPDLPPALVPSPPKRARPSPGHCLPEDEDPEERLRRHDQHITAVLTKIIERDTSSVAVNLPVPSGVAFPAVFLRSRDTQGKSATSGKRSIFAQEIAARRIAEAKGPSVGEVVPNVGPPEGAVTCETPTPRNQGCQLPGSSHSFQGPNLVTGKGLRDQEAEQEAQTIHEENIARLQAMAPEEILQEQQRLLAQLDPSLVAFLRSHSHTQEQTGETASEEQRPGGPSANVTKEEPLMSAFASEPRKRDKLEPEAPALALPVTPQKEWLHMDTVELEKLHWTQDLPPVRRQQTQERMQARFSLQGELLAPDVDLPTHLGLHHHGEEAERAGYSLQELFHLTRSQVSQQRALALHVLAQVISRAQAGEFGDRLAGSVLSLLLDAGFLFLLRFSLDDRVDGVIATAIRALRALLVAPGDEELLDSTFSWYHGALTFPLMPSQEDKEDEDEDEECPAGKAKRKSPEEESRPPPDLARHDVIKGLLATSLLPRLRYVLEVTYPGPAVVLDILAVLIRLARHSLESATRVLECPRLIETIVREFLPTSWSPVGAGPTPSLYKVPCATAMKLLRVLASAGRNIAARLLSSFDLRSRLCRIIAEAPQELALPPEEAEMLSTEALRLWAVAASYGQGGYLYRELYPVLMRALQVVPRELSTHPPQPLSMQRIASLLTLLTQLTLAAGSTPAETISDSAEASLSATPSLVTWTQVSGLQPLVEPCLRQTLKLLSRPEMWRAVGPVPVACLLFLGAYYQAWSQQPSSCPEDWLQDMQRLSEELLLPLLSQPTLGSLWDSLRHCSLLCNPLSCVPALEAPPSLVSLGCSGGCPRLSLAGSASPFPFLTALLSLLNTLAQIHKGLCGQLAAILAAPGLQNYFLQCVAPGAAPHLTPFSAWALRHEYHLQYLALALAQKAAALQPLPATHAALYHGMALALLSRLLPGSEYLTHELLLSCVFRLEFLPERTSGGPEAADFSDQLSLGSSRVPRCGQGTLLAQACQDLPSIRNCYLTHCSPARASLLASQALHRGELQRVPTLLLPMPTEPLLPTDWPFLPLIRLYHRASDTPSGLSPTDTMGTAMRVLQWVLVLESWRPQALWAVPPAARLARLMCVFLVDSELFRESPVQHLVAALLAQLCQPQVLPNLNLDCRLPGLTSFPDLYANFLDHFEAVSFGDHLFGALVLLPLQRRFSVTLRLALFGEHVGALRALSLPLTQVLSQPSRTCKGTLHWASGAVLSLEELWKTSASSSYLLGALRGLRESMKRA

SEQ ID NO: 44107 - protein, 822 aa, Homo sapiens
MEEPDIQWVKDGAVVQNLDQLYIPVSEQHWIGFLSLKSVERSDAGRYWCQVEDGGETEISQPVWLTVEGVPFFTVEPKDLAVPPNAPFQLSCEAVGPPEPVTIVWWRGTTKIGGPAPSPSVLNVTGVTQSTMFSCEAHNLKGLASSRTATVHLQALPAAPFNITVTKLSSSNASVAWMPGADGRALLQSCTVQVTQAPGGWEVLAVVVPVPPFTCLLRDLVPATNYSLRVRCANALGPSPYADWVPFQTKGLAPASAPQNLHAIRTDSGLILEWEEVIPEAPLEGPLGPYKLSWVQDNGTQDELTVEGTRANLTGWDPQKDLIVRVCVSNAVGCGPWSQPLVVSSHDRAGQQGPPHSRTSWVPVVLGVLTALVTAAALALILLRKRRKETRFGQAFDSVMARGEPAVHFRAARSFNRERPERIEATLDSLGISDELKEKLEDVLIPEQQFTLGRMLGKGEFGSVREAQLKQEDGSFVKVAVKMLKADIIASSDIEEFLREAACMKEFDHPHVAKLVGVSLRSRAKGRLPIPMVILPFMKHGDLHAFLLASRIGENPFNLPLQTLIRFMVDIACGMEYLSSRNFIHRDLAARNCMLAEDMTVCVADFGLSRKIYSGDYYRQGCASKLPVKWLALESLADNLYTVQSDVWAFGVTMWEIMTRGQTPYAGIENAEIYNYLIGGNRLKQPPECMEDVYDLMYQCWSADPKQRPSFTCLRMELENILGQLSVLSASQDPLYINIERAEEPTAGGSLELPGRDQPYSGAGDGSGMGAVGGTPSDCRYILTPGGLAEQPGQAEHQPESPLNETQRLLLLQQGLLPHSSC

SEQ ID NO: 44108 - protein, 2971 aa, Homo sapiens
MILTKQGRRMFPYCRYWITGLDSNLKYILVMDISPVDNHRYKWNGRWWEPSGKAEPHVLGRVFIHPESPSTGHYWMHQPVSFYKLKLTNNTLDQEGHIILHSMHRYLPRLHLVPAEKAVEVIQLNGPGVHTFTFPQTEFFAVTAYQNIQITQLKIDYNPFAKGFRDDGLNNKPQRDGKQKNSSDQEGNNISSSSGHRVRLTEGQGSEIQPGDLDPLSRGHETSGKGLEKTSLNIKRDFLGFMDTDSALSEVPQLKQEISECLIASSFEDDSRVASPLDQNGSFNVVIKEEPLDDYDYELGECPEGVTVKQEETDEETDVYSNSDDDPILEKQLKRHNKVDNPEADHLSSKWLPSSPSGVAKAKMFKLDTGKMPVVYLEPCAVTRSTVKISELPDNMLSTSRKDKSSMLAELEYLPTYIENSNETAFCLGKESENGLRKHSPDLRVVQKYPLLKEPQWKYPDISDSISTERILDDSKDSVGDSLSGKEDLGRKRTTMLKIATAAKVVNANQNASPNVPGKRGRPRKLKLCKAGRPPKNTGKSLISTKNTPVSPGSTFPDVKPDLEDVDGVLFVSFESKEALDIHAVDGTTEESSSLQASTTNDSGYRARISQLEKELIEDLKTLRHKQVIHPGLQEVGLKLNSVDPTMSIDLKYLGVQLPLAPATSFPFWNLTGTNPASPDAGFPFVSRTGKTNDFTKIKGWRGKFHSASASRNEGGNSESSLKNRSAFCSDKLDEYLENEGKLMETSMGFSSNAPTSPVVYQLPTKSTSYVRTLDSVLKKQSTISPSTSYSLKPHSVPPVSRKAKSQNRQATFSGRTKSSYKSILPYPVSPKQKYSHVILGDKVTKNSSGIISENQANNFVVPTLDENIFPKQISLRQAQQQQQQQQGSRPPGLSKSQVKLMDLEDCALWEGKPRTYITEERADVSLTTLLTAQASLKTKPIHTIIRKRAPPCNNDFCRLGCVCSSLALEKRQPAHCRRPDCMFGCTCLKRKVVLVKGGSKTKHFQRKAAHRDPVFYDTLGEEAREEEEGIREEEEQLKEKKKRKKLEYTICETEPEQPVRHYPLWVKVEGEVDPEPVYIPTPSVIEPMKPLLLPQPEVLSPTVKGKLLTGIKSPRSYTPKPNPVIREEDKDPVYLYFESMMTCARVRVYERKKEDQRQPSSSSSPSPSFQQQTSCHSSPENHNNAKEPDSEQQPLKQLTCDLEDDSDKLQEKSWKSSCNEGESSSTSYMHQRSPGGPTKLIEIISDCNWEEDRNKILSILSQHINSNMPQSLKVGSFIIELASQRKSRGEKNPPVYSSRVKISMPSCQDQDDMAEKSGSETPDGPLSPGKMEDISPVQTDALDSVRERLHGGKGLPFYAGLSPAGKLVAYKRKPSSSTSGLIQVASNAKVAASRKPRTLLPSTSNSKMASSSGTATNRPGKNLKAFVPAKRPIAARPSPGGVFTQFVMSKVGALQQKIPGVSTPQTLAGTQKFSIRPSPVMVVTPVVSSEPVQVCSPVTAAVTTTTPQVFLENTTAVTPMTAISDVETKETTYSSGATTTGVVEVSETNTSTSVTSTQSTATVNLTKTTGITTPVASVAFPKSLVASPSTITLPVASTASTSLVVVTAAASSSMVTTPTSSLGSVPIILSGINGSPPVSQRPENAAQIPVATPQVSPNTVKRAGPRLLLIPVQQGSPTLRPVSNTQLQGHRMVLQPVRSPSGMNLFRHPNGQIVQLLPLHQLRGSNTQPNLQPVMFRNPGSVMGIRLPAPSKPSETPPSSTSSSAFSVMNPVIQAVGSSSAVNVITQAPSLLSSGASFVSQAGTLTLRISPPEPQSFASKTGSETKITYSSGGQPVGTASLIPLQSGSFALLQLPGQKPVPSSILQHVASLQMKRESQNPDQKDETNSIKREQETKKVLQSEGEAVDPEANVIKQNSGAATSEETLNDSLEDRGDHLDEECLPEEGCATVKPSEHSCITGSHTDQDYKDVNEEYGARNRKSSKEKVAVLEVRTISEKASNKTVQNLSKVQHQKLGDVKVEQQKGFDNPEENSSEFPVTFKEESKFELSGSKVMEQQSNLQPEAKEKECGDSLEKDRERWRKHLKGPLTRKCVGASQECKKEADEQLIKETKTCQENSDVFQQEQGISDLLGKSGITEDARVLKTECDSWSRISNPSAFSIVPRRAAKSSRGNGHFQGHLLLPGEQIQPKQEKKGGRSSADFTVLDLEEDDEDDNEKTDDSIDEIVDVVSDYQSEEVDDVEKNNCVEYIEDDEEHVDIETVEELSEEINVAHLKTTAAHTQSFKQPSCTHISADEKAAERSRKAPPIPLKLKPDYWSDKLQKEAEAFAYYRRTHTANERRRRGEMRDLFEKLKITLGLLHSSKVSKSLILTRAFSEIQGLTDQADKLIGQKNLLTRKRNILIRKVSSLSGKTEEVVLKKLEYIYAKQQALEAQKRKKKMGSDEFDISPRISKQQEGSSASSVDLGQMFINNRRGKPLILSRKKDQATENTSPLNTPHTSANLVMTPQGQLLTLKGPLFSGPVVAVSPDLLESDLKPQVAGSAVALPENDDLFMMPRIVNVTSLATEGGLVDMGGSKYPHEVPDSKPSDHLKDTVRNEDNSLEDKGRISSRGNRDGRVTLGPTQVFLANKDSGYPQIVDVSNMQKAQEFLPKKISGDMRGIQYKWKESESRGERVKSKDSSFHKLKMKDLKDSSIEMELRKVTSAIEEAALDSSELLTNMEDEDDTDETLTSLLNEIAFLNQQLNDDSVGLAELPSSMDTEFPGDARRAFISKVPPGSRATFQVEHLGTGLKELPDVQGESDSISPLLLHLEDDDFSENEKQLAEPASEPDVLKIVIDSEIKDSLLSNKKAIDGGKNTSGLPAEPESVSSPPTLHMKTGLENSNSTDTLWRPMPKLAPLGLKVANPSSDADGQSLKVMPCLAPIAAKVGSVGHKMNLTGNDQEGRESKVMPTLAPVVAKLGNSGASPSSAGK

SEQ ID NO: 44109 - protein, 49 aa, Homo sapiens
MLYLPALWFHHVQQSQGCIAVNFWYDMEYDLKYSYFQLLDSLTKASGLD

SEQ ID NO: 44110 - protein, 717 aa, Homo sapiens
MAWCENSICVGFKRDYYLIRVDGKGSIKELFPTGKQLEPLVAPLADGKVAVGQDDLTVVLNEEGICTQKCALNWTDIPVAMEHQPPYIIAVLPRYVEIRTFEPRLLVQSIELQRPRFITSGGSNIIYVASNHFVWRLIPVPMATQIQQLLQDKQFELALQLAEMKDDSDSEKQQQIHHIKNLYAFNLFCQKRFDESMQVFAKLGTDPTHVMGLYPDLLPTDYRKQLQYPNPLPVLSGAELEKAHLALIDYLTQKRSQLVKKLNDSDHQSSTSPLMEGTPTIKSKKKLLQIIDTTLLKCYLHTNVALVAPLLRLENNHCHIEESEHVLKKAHKYSELIILYEKKGLHEKALQVLVDQSKKANSPLKGHERTVQYLQHLGTENLHLIFSYSVWVLRDFPEDGLKIFTEDLPEVESLPRDRVLGFLIENFKGLAIPYLEHIIHVWEETGSRFHNCLIQLYCEKVQGLMKEYLLSFPAGKTPVPAGEEEGELGEYRQKLLMFLEISSYYDPGRLICDFPFDGLLEERALLLGRMGKHEQALFIYVHILKDTRMAEEYCHKHYDRNKDGNKDVYLSLLRMYLSPPSIHCLGPIKLELLEPKANLQAALQVLELHHSKLDTTKALNLLPANTQINDIRIFLEKVLEENAQKKRFNQVLKNLLHAEFLRVQEERILHQQVKCIITEEKVCMVCKKKIGNSAFARYPNGVVVHYFCSKEVNPADT

SEQ ID NO: 44111 - protein, 386 aa, Homo sapiens [sequence omitted]

SEQ ID NO: 44112 - protein, 1666 aa, Homo sapiens
MNNSNGNWKSSVRSTNNWNYSGPGDKFQPGRNRNSNCQMEDMTMLWNKKSNKSNKYSHDRYNWQRQENDKLGTVATYRGPSEGFTSDKFPSEGLLDFNFEQLESQTTKQADTATSKVSGKNGSAAREKPRRWTPYPSQKTLDLQSGLKDITGNKSEMIEKPLFDFSLITTGIQEPQTDETRNSPTQKTQKEIHTGSLNHKASSDSAASFEVVRQCPTAEKPEQEHTPNKMPSLKSPLLPCPATKSLSQKQDPKNISKNTKTNFFSPGEHSNPSNKPTVEDNHGPYISKLRSSCPHVLKGNKSTFGSQKQSGDNLNDTLRKAKEVLQCHESLQNPLLSTSKSTRNYAKASRNVEESEKGSLKIEFQVHALEDESDGETSDTEKHGTKIGTLGSATTELLSGSTRTADEKEEDDRILKTSRELSTSPCNPIVRQKESELQMTSAASPHPGLLLDLKTSLEDAQVDDSIKSHVSYETEGFESASLDAELQKSDISQPSGPLLPELSKLGFPASLQRDLTRHISLKSKTGVHLPEPNLNSARRIRNISGHRKSETEKESGLKPTLRQILNASRRNVNWEQVIQQVTKKKQELGKGLPRFGIEMVPLVQNEQEALDLDGEPDLSSLEGFQWEGVSISSSPGLARKRSLSESSVIMDRAPSVYSFFSEEGTGKENEPQQMVSPSNSLRAGQSQKATMHLKQEVTPRAASLRTGERAENVATQRRHSAQLSSDHIIPLMHLAKDLNSQERSIPPSENQNSQESNGEGNCLSSSASSALAISSLADAATDSSCTSGAEQNDGQSIRKKRRATGDGSSPELPSLERKNKRRKIKGKKERSQVDQLLNISLREEELSKSLQCMDNNLLQARAALQTAYVEVQRLLMLKQQITMEMSALRTHRIQILQGLQETYEPSEHPDQVPCSLTRERRNSRSQTSIDAALLPTPFFPLFLEPPSSHVSPSPTGASLQITTSPTFQTHGSVPAPDSSVQIKQEPMSPEQDENVNAVPPSSACNVSKELLEANREISDSCPVYPVITARLSLPESTESFHEPSQELKFSVEQRNTRNRENSPSSQSAGLSSINKEGEEPTKGNSGSEACTSSFLRLSFASETPLEKEPHSPADQPEQQAESTLTSAETRGSKKKKKLRKKKSLRAAHVPENSDTEQDVLTVKPVRKVKAGKLIKGGKVTTSTWEDSRTGREQESVRDEPDSDSSLEVLEIPNPQLEVVAIDSSESGEEKPDSPSKKDIWNSTEQNPLETSRSGCDEVSSTSEIGTRYKDGIPVSVAETQTVISSIKGSKNSSEISSEPGDDDEPTEGSFEGHQAAVNAIQIFGNLLYTCSADKTVRVYNLVSRKCIGVFEGHTSKVNCLLVTQTSGKNAALYTGSSDHTIRCYNVKSRECVEQLQLEDRVLCLHSRWRILYAGLANGTVVTFNIKNNKRLEIFECHGPRAVSCLATAQEGARKLLVVGSYDCTISVRDARNGLLLRTLEGHSKTILCMKVVNDLVFSGSSDQSVHAHNIHTGELVRIYKGHNHAVTVVNILGKVMVTACLDKFVRVYELQSHDRLQVYGGHKDMIMCMTIHKSMIYTGCYDGSIQAVRLNLMQNYRCWWHGCSLIFGVVDHLKQHLLTDHTNPNFQTLKCRWKNCDAFFTARKGSKQDAAGHIERHAEDDSKIDS

SEQ ID NO: 44113 - protein, 416 aa, Homo sapiens
MNEFYHCFLPAEERRRVENIEPFDEFEEWHLKCAHYFILAASRGDTLSHTLVFPSSEAFPRVNPASPSGVFPASVVSSEGQVPNLKRYGHASVFLSPDVILSAGGFGEQEGRHCRVSQFHLLSRDCDSEWKGSQIGSCGTGVQWDGRLYHTMTRLSESRVLVLGGRLSPVSPALGVLQLHFFKSEDNNTEDLKVTITKAGRKDDSTLCCWRHSTTEVSCQNQEYLFVYGGRSVVEPVLSDWHFLHVGTMAWVRIPVEGEVPEARHSHSACTWQGGALIAGGLGASEEPLNSVLFLRPISCGFLWESVDIQPPITPRYSHTAHVLNGKLLLVGGIWIHSSSFPGVTVINLTTGLSSEYQIDTTYVPWPLMLHNHTSILLPEEQQLLLLGGGGNCFSFGTYFNPHTVTLDLSSLSAGQ

SEQ ID NO: 44114 - protein, 851 aa, Homo sapiens
MAKSALRENGTNSETFRQRFRRFHYQEVAGPREAFSQLWELCCRWLRPEVRTKEQIVELLVLEQFLTVLPGEIQNWVQEQCPENGEEAVTLVEDLEREPGRPRSSVTVSVKGQEVRLEKMTPPKSSQELLSVRQESVEPQPRGVPKKERARSPDLGPQEQMNPKEKLKPFQRSGLPFPKSGVVSRLEQGEPWIPDLLGSKEKELPSGSHIGDRRVHADLLPSKKDRRSWVEQDHWSFEDEKVAGVHWGYEETRTLLAILSQTEFYEALRNCHRNSQVYGAVAERLREYGFLRTLEQCRTKFKGLQKSYRKVKSGHPPETCPFFEEMEALMSAQVIALPSNGLEAAASHSGLVGSDAETEEPGQRGWQHEEGAEEAVAQESDSDDMDLEATPQDPNSAAPVVFRSPGGVHWGYEETKTYLAILSETQFYEALRNCHRNSQLYGAVAERLWEYGFLRTPEQCRTKFKSLQTSYRKVKNGQAPETCPFFEEMDALVSVRVAAPPNDGQEETASCPVQGTSEAEAQKQAEEADEATEEDSDDDEEDTEIPPGAVITRAPVLFQSPRGFEAGFENEDNSKRDISEEVQLHRTLLARSERKIPRYLHQGKGNESDCRSGRQWAKTSGEKRGKLTLPEKSLSEVLSQQRPCLGERPYKYLKYSKSFGPNSLLMHQVSHQVENPYKCADCGKSFSRSARLIRHRRIHTGEKPYKCLDCGKSFRDSSNFITHRRIHTGEKPYQCGECGKCFNQSSSLIIHQRTHTGEKPYQCEECGKSFNNSSHFSAHRRIHTGERPHVCPDCGKSFSKSSDLRAHHRTHTGEKPYGCHDCGKCFSKSSALNKHGEIHAREKLLTQSAPK

SEQ ID NO: 44115 - protein, 1130 aa, Homo sapiens [sequence omitted]

SEQ ID NO: 44116 - protein, 2422 aa, Homo sapiens
MGRVLPMLLVPVPAEAMGQLGSRAQLRTQPEALGSLTAAGSLQVLSLTPGSRGGGRCCLEGPFWHFLWEDSRNSSTPTEKPKLLALGENYELLIYEFNLKDGRCDATILYSCSREALQKLIDDQDISISLLSLRILSFHNNTSLLFINKCVILHIIFPERDAAIRVLNCFTLPLPAQAVDMIIDTQLCRGILFVLSSLGWIYIFDVVDGTYVAHVDLALHKEDMCNEQQQEPAKISSFTSLKVSQDLDVAVIVSSSNSAVALNLNLYFRQHPGHLLCERILEDLPIQGPKGVDEDDPVNSAYNMKLAKFSFQIDRSWKAQLSSLNETIKNSKLEVSCCAPWFQDILHLESPESGNHSTSVQSWAFIPQDIMHGQYNVLQKDHAKTSDPGRSWKIMHISEQEEPIELKCVSVTGFTALFTWEVERMGYTITLWDLETQGMQCFSLGTKCIPVDSSGDQQLCFVLTENGLSLILFGLTQEEFLNRLMIHGSASTVDTLCHLNGWGRCSIPIHALEAGIENRQLDTVNFFLKSKENLFNPSSKSSVSDQFDHLSSHLYLRNVEELIPALDLLCSAIRESYSEPQSKHFSEQLLNLTLSFLNNQIKELFIHTEELDEHLQKGVNILTSYINELRTFMIKFPWKLTDAIDEYDVHENVPKVKESNIWKKLSFEEVIASAILNNKIPEAQTFFRIDSHSAQKLEELIGIGLNLVFDNLKKNNIKEASELLKNMGFDVKGQLLKICFYTTNKNIRDFLVEILKEKNYFSEKEKRTIDFVHQVEKLYLGHFQENMQIQSFPRYWIKEQDFFKHKSVLDSFLKYDCKDEFNKQDHRIVLNWALWWDQLTQESILLPRISPEEYKSYSPEALWRYLTARHDWLNIILWIGEFQTQHSYASLQQNKWPLLTVDVINQNTSCNNYMRNEILDKLARNGVFLASELEDFECFLLRLSRIGGVIQDTLPVQNYKTKEGWDFHSQFILYCLEHSLQHLLYVYLDCYKLSPENCPFLEKKELHEAHPWFEFLVQCRQVASNLTDPKLIFQASLANAQILIPTNQASVSSMLLEGHTLLALATTMYSPGGVSQVVQNEENENCLKKVDPQLLKMALTPYPKLKTALFPQCTPPSVLPSDITIYHLIQSLSPFDPSRLFGWQSANTLAIGDAWSHLPHFSSPDLVNKYAIVERLNFAYYLHNGRPSFAFGTFLVQELIKSKTPKQLIQQVGNEAYVIGLSSFHIPSIGAACVCFLELLGLDSLKLRVDMKVANIILSYKCRNEDAQYSFIRESVAEKLSKLADGEKTTTEELLVLLEEGTWNSIQQQEIKRLSSESSSQWALVVQFCRLHNMKLSISYLRECAKANDWLQFIIHSQLHNYHPAEVKSLIQYFSPVIQDHLRLAFENLPSVPTSKMDSDQVCNKCPQELQGSKQEMTDLFEILLQCSEEPDSWHWLLVEAVKQQAPILSVLASCLQGASAISCLCVWIITSVEDNVATEAMGHIQDSTEDHTWNLEDLSVIWRTLLTRQKSKTLIRGFQLFFKDSPLLLVMEMYELCMFFRNYKEAEAKLLEFQKSLETLNTAATKVHPVIPAMWLEDQVCFLLKLMLQQCKTQYELGKLLQLFVEREHLFSDGPDVKKLCILCQILKDTSIAINHTIITSYSIENLQHECRSILERLQTDGQFALARRVAELAELPVDNLVIKEITQEMQTLKHIEQWSLKQARIDFWKKCHENFKKNSISSKAASSFFSTQAHVACEHPTGWSSMEERHLLLTLAGHWLAQEDVVPLDKLEELEKQIWLCRITQHTLGRNQEETEPRFSRQISTSGELSFDSLASEFSFSKLAALNTSKYLELNSLPSKETCENRLDWKEQESLNFLIGRLLDDGCVHEASRVCRYFHFYNPDVALVLHCRALASGEASMEDLHPEIHALLQSAELLEEEAPDIPLRRVHSTSSLDSQKFVTVPSSNEVVTNLEVLTSKCLHGKNYCRQVLCLYDLAKELGCSYTDVAAQDGEAMLRKILASQQPDRCKRAQAFISTQGLKPDTVAELVAEEVTRELLTSSQGTGHKQMFNPTEESQTFLQLTTLCQDRTLVGMKLLDKISSVPHGELSCTTELLILAHHCFTLTCHMEGIIRVLQAAHMLTDNHLAPSEEYGLVVRLLTGIGRYNEMTYIFDLLHKKHYFEVLMRKKLDPSGTLKTALLDYIKRCRPGDSEKHNMIALCFSMCREIGENHEAAARIQLKLIESQPWEDSLKDGHQLKQLLLKALTLMLDAAESYAKDSCVRQAQHCQRLTKLITLQIHFLNTGQNTMLINLGRHKLMDCILALPRFYQASIVAEAYDFVPDWAEILYQQVILKGDFNYLEEFKQQRLLKSSIFEEISKKYKQHQPTDMVMENLKKLLTYCEDVYLYYKLAYEHKFYEIVNVLLKDPQTGCCLKDMLAG

SEQ ID NO: 44117 - protein, 369 aa, Homo sapiens
MPISSHVDLGLLAEMTVGYVGADLTALCREAAMHALLHSEKNQDNPVIDEIDFLEAFKNIQPSSFRSVIGLMDIKPVDWEEIGGLEDVKLKLKQSIEWPLKFPWEFVRMGLTQPKGVLLYGPPGCAKTTLVRALATSCHCSFVSVSGADLFSPFVGDSEKVLSQIFRQARASTPAILFLDEIDSILGARSASKTGCDVQERVLSVLLNELDGVGLKTIERRGSKSSQQEFQEVFNRSVMIIAATNRPDVLDTALLRPGRLDKIIYIPPPDHKGRLSILKVCTKTMPIGPDVSLENLAAETCFFSGADLRNLCTEAALLALQENGLDATTVKQEHFLKSLKTVKPSLSCKDLALYENLFKKEGFSNVEGI

SEQ ID NO: 44118 - protein, 4 aa, Homo sapiens
MPSW

SEQ ID NO: 44119 - protein, 393 aa, Homo sapiens [sequence omitted]

SEQ ID NO: 44120 - protein, 2773 aa, Homo sapiens [sequence omitted]

SEQ ID NO: 44121 - protein, 155 aa, Homo sapiens
MATNVNCSSPERHTRSYDYMEGGDIRVRRLFCRTQWYLRIDKRGKVKGTQEMKNNYNIMEIRTVAVGIVAIKGVESEFYLAMNKEGKLYAKKECNEDCNFKELILENHYNTYASAKWTHNGGEMFVALNQKGIPVRGKKTKKEQKTAHFLPMAIT

SEQ ID NO: 44122 - protein, 927 aa, Homo sapiens
MTDKNISLIIMDARRMQDYQDSCILHSLSVPEEAISPGVTASWIEAHLPDDSKDTWKKRGNVEYVVLLDWFSSAKDLQIGTTLRSLKDALFKWESKTVLRNEPLVLEGGYENWLLCYPQYTTNAKVTPPPRRQNEEVSISLDFTYPSLEESIPSKPAAQTPPASIEVDENIELISGQNERMGPLNISTPVEPVAASKSDVSPIIQPVPSIKNVPQIDRTKKPAVKLPEEHRIKSESTNHEQQSPQSGKVIPDRSTKPVVFSPTLMLTDEEKARIHAETALLMEKNKQEKELRERQQEEQKEKLRKEEQEQKAKKKQEAEENEITEKQQKAKEEMEKKESEQAKKEDKETSAKRGKEITGVKRQSKSEHETSDAKKSVEDRGKRCPTPEIQKKSTGDVPHTSVTGDSGSGKPFKIKGQPESGILRTGTFREDTDDTERNKAQREPLTRARSEEMGRIVPGLPSGWAKFLDPITGTFRYYHSPTNTVHMYPPEMAPSSAPPSTPPTHKAKPQIPAERDREPSKLKRSYSSPDITQAIQEEEKRKPTVTPTVNRENKPTCYPKAEISRLSASQIRNLNPVFGGSGPALTGLRNLGNTCYMNSILQCLCNAPHLADYFNRNCYQDDINRSNLLGHKGEVAEEFGIIMKALWTGQYRYISPKDFKITIGKINDQFAGYSQQDSQELLLFLMDGLHEDLNKADNRKRYKEENNDHLDDFKAAEHAWQKHKQLNESIIVALFQGQFKSTVQCLTCHKKSRTFEAFMYLSLPLASTSKCTLQDCLRLFSKEEKLTDNNRFYCSHCRARRDSLKKIEIWKLPPVLLVHLKRFSYDGRWKQKLQTSVDFPLENLDLSQYVIGPKNNLKKYNLFSVSNHYGGLDGGHYTAYCKNAARQRWFKFDDHEVSDISVSSVKSSAAYILFYTSLGPRVTDVAT

SEQ ID NO: 44123 - protein, 1493 aa, Homo sapiens
MKRKELITVFHIGSDEHQDIDVAILTALLKGTNASAFDQLILTLAWDRVDIAKNHVFVYGQQWLVGSLEQAMLDALVMDRVAFVKLLIENGVSMHKFLTIPRLEELYNTKQGPTNPMLFHLVRDVKQGNLPPGYKITLIDIGLVIEYLMGGTYRCTYTRKRFRLIYNSLGGNNRRSGRNTSSSTPQLRKSHESFGNRADKKEKMRHNHFIKTAQPYRPKIDTVMEEGKKKRTKDEIVDIDDPETKRFPYPLNELLIWACLMKRQVMARFLWQHGEESMAKALVACKIYRSMAYEAKQSDLVDDTSEELKQYSNDFGQLAVELLEQSFRQDETMAMKLLTYELKNWSNSTCLKLAVSSRLRPFVAHTCTQMLLSDMWMGRLNMRKNSWYKVILSILVPPAILLLEYKTKAEMSHIPQSQDAHQMTMDDSENNFQNITEEIPMEVFKEVRILDSNEGKNEMEIQMKSKKLPITRKFYAFYHAPIVKFWFNTLAYLGFLMLYTFVVLVQMEQLPSVQEWIVIAYIFTYAIEKVREIFMSEAGKVNQKIKVWFSDYFNISDTIAIISFFIGFGLRFGAKWNFANAYDNHVFVAGRLIYCLNIIFWYVRLLDFLAVNQQAGPYVMMIGKMVANMFYIVVIMALVLLSFGVPRKAILYPHEAPSWTLAKDIVFHPYWMIFGEVYAYEIDVCANDSVIPQICGPGTWLTPFLQAVYLFVQYIIMVNLLIAFFNNVYLQVKAISNIVWKYQRYHFIMAYHEKPVLPPPLIILSHIVSLFCCICKRRKKDKTSDGPKLFLTEEDQKKLHDFEEQCVEMYFNEKDDKFHSGSEERIRVTFERVEQMCIQIKEVGDRVNYIKRSLQSLDSQIGHLQDLSALTVDTLKTLTAQKASEASKVHNEITRELSISKHLAQNLIDDGPVRPSVWKKHGVVNTLSSSLPQGDLESNNPFHCNILMKDDKDPQCNIFGQDLPAVPQRKEFNFPEAGSSSGALFPSAVSPPELRQRLHGVELLKIFNKNQKLGSSSTSIPHLSSPPTKFFVSTPSQPSCKSHLETGTKDQETVCSKATEGDNTEFGAFVGHRDSMDLQRFKETSNKIKILSNNNTSENTLKRVSSLAGFTDCHRTSIPVHSKQEKISRRPSTEDTHEVDSKAALIPDWLQDRPSNREMPSEEGTLNGLTSPFKPAMDTNYYYSAVERNNLMRLSQSIPFTPVPPRGEPVTVYRLEESSPNILNNSMSSWSQLGLCAKIEFLSKEEMGGGLRRAVKVQCTWSEHDILKSGHLYIIKSFLPEVVNTWSSIYKEDTVLHLCLREIQQQRAAQKLTFAFNQMKPKSIPYSPRFLEVFLLYCHSAGQWFAVEECMTGEFRKYNNNNGDEIIPTNTLEEIMLAFSHWTYEYTRGELLVLDLQGVGENLTDPSVIKAEEKRSCDMVFGPANLGEDAIKNFRAKHHCNSCCRKLKLPDLKRNDYTPDKIIFPQDEPSDLNLQPGNSTKESESTNSVRLML

SEQ ID NO: 44124 - protein, 1494 aa, Homo sapiens
MKRKELITVFHIGSDEHQDIDVAILTALLKGTNASAFDQLILTLAWDRVDIAKNHVFVYGQQWLVGSLEQAMLDALVMDRVAFVKLLIENGVSMHKFLTIPRLEELYNTKQGPTNPMLFHLVRDVKQGNLPPGYKITLIDIGLVIEYLMGGTYRCTYTRKRFRLIYNSLGGNNRRSGRNTSSSTPQLRKSHESFGNRADKKEKMRHNHFIKTAQPYRPKIDTVMEEGKKKRTKDEIVDIDDPETKRFPYPLNELLIWACLMKRQVMARFLWQHGEESMAKALVACKIYRSMAYEAKQSDLVDDTSEELKQYSNDFGQLAVELLEQSFRQDETMAMKLLTYELKNWSNSTCLKLAVSSRLRPFVAHTCTQMLLSDMWMGRLNMRKNSWYKVILSILVPPAILLLEYKTKAEMSHIPQSQDAHQMTMDDSENNFQNITEEIPMEVFKEVRILDSNEGKNEMEIQMKSKKLPITRKFYAFYHAPIVKFWFNTLAYLGFLMLYTFVVLVQMEQLPSVQEWIVIAYIFTYAIEKVREIFMSEAGKVNQKIKVWFSDYFNISDTIAIISFFIGFGLRFGAKWNFANAYDNHVFVAGRLIYCLNIIFWYVRLLDFLAVNQQAGPYVMMIGKMVANMFYIVVIMALVLLSFGVPRKAILYPHEAPSWTLAKDIVFHPYWMIFGEVYAYEIDVCANDSVIPQICGPGTWLTPFLQAVYLFVQYIIMVNLLIAFFNNVYLQVKAISNIVWKYQRYHFIMAYHEKPVLPPPLIILSHIVSLFCCICKRRKKDKTSDGPKLFLTEEDQKKLHDFEEQCVEMYFNEKDDKFHSGSEERIRVTFERVEQMCIQIKEVGDRVNYIKRSLQSLDSQIGHLQDLSALTVDTLKTLTAQKASEASKVHNEITRELSISKHLAQNLIDDGPVRPSVWKKHGVVNTLSSSLPQGDLESNNPFHCNILMKDDKDPQCNIFGQDLPAVPQRKEFNFPEAGSSSGALFPSAVSPPELRQRLHGVELLKIFNKNQKLGSSSTSIPHLSSPPTKFFVSTPSQPSCKSHLETGTKDQETVCSKATEGDNTEFGAFVGHRDSMDLQRFKETSNKIKILSNNNTSENTLKRVSSLAGFTDCHRTSIPVHSKQAEKISRRPSTEDTHEVDSKAALIPDWLQDRPSNREMPSEEGTLNGLTSPFKPAMDTNYYYSAVERNNLMRLSQSIPFTPVPPRGEPVTVYRLEESSPNILNNSMSSWSQLGLCAKIEFLSKEEMGGGLRRAVKVQCTWSEHDILKSGHLYIIKSFLPEVVNTWSSIYKEDTVLHLCLREIQQQRAAQKLTFAFNQMKPKSIPYSPRFLEVFLLYCHSAGQWFAVEECMTGEFRKYNNNNGDEIIPTNTLEEIMLAFSHWTYEYTRGELLVLDLQGVGENLTDPSVIKAEEKRSCDMVFGPANLGEDAIKNFRAKHHCNSCCRKLKLPDLKRNDYTPDKIIFPQDEPSDLNLQPGNSTKESESTNSVRLML

SEQ ID NO: 44125 - protein, 306 aa, Homo sapiens
MMVLLYFFYKWLVYVMIAIFCIASAMSLYNCLAALIHKIPYGQCTIACRGKNMEVRLIFLSGLCIAVAVVWAVFRNEDRWAWILQDILGIAFCLNLIKTLKLPNFKSCVILLGLLLLYDVFFVFITPFITKNGESIMVELAAGPFGNNEKNDGNLVEATGQPSAPHEKLPVVIRVPKLIYFSVMSVCLMPVSILGFGDIIVPGLLIAYCRRFDVQTGSSYIYYVSSTVAYAIGMILTFVVLVLMKKGQPALLYLVPCTLITASVVAWRRKEMKKFWKGNSYQMMDHLDCATNEENPVISGEQIVQQ

SEQ ID NO: 44126 - protein, 483 aa, Homo sapiens
MPAATMPVLLLTGLFLLVWNYEGTSSIPGPGYCMGIGPLISHGRFLWMGIGSACNYYNRVYGEFMRVWISGEETLIISKSSSMFHIMKHNHYSSRFGSKLGLQCIGMHEKGIIFNNNPELWKTTRPFFMKALSGPGLVRMVTVCAESLKTHLDRLEEVTNESGYVDVLTLLRRVMLDTSNTLFLRIPLDESAIVVKIQGYFDAWQALLIKPDIFFKISWLYKKYEKSVKDLKDAIEVLIAEKRRRISTEEKLEECMDFATELILAEKRGDLTRENVNQCILEMLIAAPDTMSVSLFFMLFLIAKHPNVEEAIIKEIQTVIGERDIKIDDIQKLKVMENFIYESMRYQPVVDLVMRKALEDDVIDGYPVKKGTNIILNIGRMHRLEFFPKPNEFTLENFAKNVPYRYFQPFGFGPRGCAGKYIAMVMMKAILVTLLRRFHVKTLQGQCVESIQKIHDLSLHPDETKNMLEMIFTPRNSDRCLEH

SEQ ID NO: 44127 - protein, 124 aa, Homo sapiens
MLIAAPDTMSVSLFFMLFLIAKHPNVEEAIIKEIQTVIGERDIKIDDIQKLKVMENFIYESMRYQPVVDLVMRKALEDDVIDGYPVKKGTNIILNIGRMHRLEFFPKPNEFTLENFAKNVRALP

SEQ ID NO: 44128 - protein, 301 aa, Homo sapiens
MKTRRTLKGHGNKVLCMDWCKDKRRIVSSSQDGKVIVWDSFTTNKEHAVTMPCTWVMACAYAPSGCAIACGGLDNKCSVYPLTFDKNENMAAKKKSVAMHTNYLSACSFTNSDMQILTASGDGTCALWDVESGQLLQSFHGHGADVLCLDLAPSETGNTFVSGGCDKKAMVWDMRSGQCVQAFETHESDINSVRYYPSGDAFASGSDDATCRLYDLRADREVAIYSKESIIFGASSVDFSLSGRLLFAGYNDYTINVWDVLKGSRVSILFGHENRVSTLRVSPDGTAFCSGSWDHTLRVWA

SEQ ID NO: 44129 - protein, 49 aa, Homo sapiens
MATGAPGSRFGLVVSGPHGHLRQPRGPLRSILRSRWPCASRSLGSEVGV

SEQ ID NO: 44130 - protein, 550 aa, Homo sapiens
MKDYLSQCQQEQESFIDYKSLKENLARCWTLTEAEKMSFETQKTNLATENQYLRVSLEKEEKALSSLQEELNKLREQIRILEDKGTSTELVKENQKLKQHLEEEKQKKHSFLSQRETLLTEAKMLKRELERERLVTTALRGELQQLSGSQLHGKSDSPNVYTEKKEIAILRERLTELERKLTFEQQRSDLWERLYVEAKDQNGKQGTDGKKKGGRGSHRAKNKSKETFLGSVKETFDAMKNSTKEFVRHHKEKIKQAKEAVKENLKKFSDSVKSTFRHFKDTTKNIFDEKGNKRFGATKEAAEKPRTVFSDYLHPQYKAPTENHHNRGPTMQNDGRKEKPVHFKEFRKNTNSKKCSPGHDCRENSHSFRKACSGVFDCAQQESMSLFNTVVNPIRMDEFRQIIQRYMLKELDTFCHWNELDQFINKFFLNGVFIHDQKLFTDFVNDVKDYLRNMKEYEVDNDGVFEKLDEYIYRHFFGHTFSPPYGPSRPDKKQRMVNIENSRHRKQEQKHLQPQPYKREGKWHKYGRTNGRQMANLEIELGQLPFDPQY

SEQ ID NO: 44131 - protein, 500 aa, Homo sapiens
MKDYLSQCQQEQESFIDYKSLKENLARCWTLTEAEKMSFETQKTNLATENQYLRVSLEKEEKALSSLQEELNKLREQIRILEDKGTSTELVKENQKLKQHLEEEKQKKHSFLSQRETLLTEAKMLKRELERERLVTTALRGELQQLSGSQLHGKSDSPNVYTEKKEIAILRERLTELERKLTFEQQRSDLWERLYVEAKDQNGKQGTDGKKKGGRGSHRAKNKSKETFLGSVKETFDAMKNSTKEFVRHHKEKIKQAKEAVKENLKKFSDSVKSTFRHFKDTTKNIFDEKGNKRFGATKEAAEKPRTVFSDYLHPQYKAPTENHHNRGPTMQNDGRKEKPVHFKEFRKNTNSKKCSPGHDCRENSHSFRKACSGVFDCAQQESMSLFNTVVNPIRMDEFRQIIQRYMLKELDTFCHWNELDQFINKFFLNGVFIHDQKLFTDFVNDVKDYLRNMKEYEVDNDGVFEKLDEYIYRHFFGHTFSPPYGPRSVYIKPCHYSSL

SEQ ID NO: 44132 - protein, 102 aa, Homo sapiens [sequence omitted]

SEQ ID NO: 44133 - protein, 1072 aa, Homo sapiens
MKLPVSRNTKIPLKRYSSLVIFPRSPSTTRPTSPTSLCTLLSKGSYQTSHQFIISPSEIAHNEDGTSAKGFLSTAVNGLRLSKTICTPGEVRDIRPLHRKGSLQKKIVLSNNTPRQTVCEKSSEGYSCVSVHFTQRKAATLDCETTNGDCKPEMSEIKLNSDSEYIKLMHRTSACLPSSQNVDCQININGELERPHSQMNKNHGILRRSISLGGAYPNISCLSSLKHNCSKGGPSQLLIKFASGNEGKVDNLSRDSNRDCTNELSNSCKTRDDFLGQVDVPLYPLPTENPRLERPYTFKDFVLHPRSHKSRVKGYLRLKMTYLPKTSGSEDDNAEQAEELEPGWVVLDQPDAACHLQQQQEPSPLPPGWEERQDILGRTYYVNHESRRTQWKRPTPQDNLTDAENGNIQLQAQRAFTTRRQISEETESVDNRESSENWEIIREDEATMYSNQAFPSPPPSSNLDVPTHLAEELNARLTIFGNSAVSQPASSSNHSSRRGSLQAYTFEEQPTLPVLLPTSSGLPPGWEEKQDERGRSYYVDHNSRTTTWTKPTVQATVETSQLTSSQSSAGPQSQASTSDSGQQVTQPSEIEQGFLPKGWEVRHAPNGRPFFIDHNTKTTTWEDPRLKIPAHLRGKTSLDTSNDLGPLPPGWEERTHTDGRIFYINHNIKRTQWEDPRLENVAITGPAVPYSRDYKRKYEFFRRKLKKQNDIPNKFEMKLRRATVLEDSYRRIMGVKRADFLKARLWIEFDGEKGLDYGGVAREWFFLISKEMFNPYYGLFEYSATDNYTLQINPNSGLCNEDHLSYFKFIGRVAGMAVYHGKLLDGFFIRPFYKMMLHKPITLHDMESVDSEYYNSLRWILENDPTELDLRFIIDEELFGQTHQHELKNGGSEIVVTNKNKKEYIYLVIQWRFVNRIQKQMAAFKEGFFELIPQDLIKIFDENELELLMCGLGDVDVNDWREHTKYKNGYSANHQVIQWFWKAVLMMDSEKRIRLLQFVTGTSRVPMNGFAELYGSNGPQSFTVEQWGTPEKLPRAHTCFNRLDLPPYESFEELWDKLQMAIENTQGFDGVD

SEQ ID NO: 44134 - protein, 386 aa, Homo sapiens
MRQQVRENSIELRELEKKLKAAYMNKERAAQIAEKDAIKYEQMKRDAEIAKTMMEEHKRIIKEENAAEDKRNKAKAQYYLDLEKQLEEQEKKKQEAYEQLLKEKLMIDEIVRKIYEEDQLEKQQKLEKMNAMRRYIEEFQKEQALWRKKKREEMEEENRKIIEFANMQQQREEDRMAKVQENEEKRLQLQNALTQKLEEMLRQREDLEQVRQELYQEEQAEIYKSKLKEEAEKKLRKQKEMKQDFEEQMALKELVLQAAKEEEENFRKTMLAKFAEDDRIELMNAQKQRMKQLEHRRAVEKLIEERRQQFLADKQRELEEWQLQQRRQGFINAIIEEERLKLLKEHATNLLGYLPKGVFKKEDDIDLLGEEFRKVYQQRSEICEEK

SEQ ID NO: 44135 - protein, 452 aa, Homo sapiens
MKTRFLLFGETNQGCQIRINHPDTLQECGFNSSLPLVMIIHGWSVDGVLENWIWQMVAALKSQPAQPVNVGLVDWITLAHDHYTIAVRNTRLVGKEVAALLRWLEESVQLSRSHVHLIGYSLGAHVSGFAGSSIGGTHKIGRITGLDAAGPLFEGSAPSNRLSPDDANFVDAIHTFTREHMGLSVGIKQPIGHYDFYPNGGSFQPGCHFLELYRHIAQHGFNAITQTIKCSHERSVHLFIDSLLHAGTQSMAYPCGDMNSFSQGLCLSCKKGRCNTLGYHVRQEPRSKSKRLFLVTRAQSPFKVYHYQFKIQFINQTETPIQTTFTMSLLGTKEKMQKIPITLGKGIASNKTYSFLITLDVDIGELIMIKFKWENSAVWANVWDTVQTIIPWSTGPRHSGLVLKTIRVKAGETQQRMTFCSENTDDLLLRPTQEKIFVKCEIKSKTSKRKIR

SEQ ID NO: 44136 - protein, 478 aa, Homo sapiens
MVILDQTKGDHCRPSRRGRYEKIHGRSKEKERASLDKKRDKDYRRKEILPFEKMKEQRLREHLVRFERLRRAMELRRRREIAERERRERERIRIIREREERERLQRERERLEIERQKLERERMERERLERERIRIEQERRKEAERIAREREELRRQQQQLRYEQEKRNSLKRPRDVDHRRDDPYWSENKKLSLDTDARFGHGSDYSRQQNRFNDFDHRERGRFPESSAVQSSSFERRDRFVGQSEGKKARPTARREDPSFERYPKNFSDSRRNEPPPPRNELRESDRREVRGERDERRTVIIHDRPDITHPRHPREAGPNPSRPTSWKSEGSMSTDKRETRVERPERSGREVSGHSVRGAPPGNRSSASGYGSREGDRGVITDRGGGSQHYPEERHVVERHGRDTSGPRKEWHGPPSQGPSYHDTRRMGDGRAGAGMITQHSSNASPINRIVQISGNSMPRGSGSGFKPFKGGPPRRF

SEQ ID NO: 44137 - protein, 932 aa, Homo sapiens [sequence omitted]

SEQ ID NO: 44138 - protein, 940 aa, Homo sapiens
MINSKVGNEFSHLCDDSQKQEKEMNGNQQEQEKSLVVRKKRKSQQAGPSYVQNCVKENQGILGLRQHLGTPSDEDNDSSFSDCLSSPSSSLHFGDSDTVTSDEDKEVSVRHSQTILNAKSRSHSARSHKWPRTETESVSGLLMKRPCLHGSSLRRLPCRKRFVKNNSSQRTQKQKERILMQRKKREVLARRKYALLPSSSSSSENDLSSESSSSSSTEGEEDLFVSASENHQNNPAVPSGSIDEDVVVIEASSTPQVTANEEINVTSTDSEVEIVTVGESYRSRSTLGHSRSHWSQGSSSHASRPQEPRNRSRISTVIQPLRQNAAEVVDLTVDEDEPTVVPTTSARMESQATSASINNSNPSTSEQASDTASAVTSSQPSTVSETSATLTSNSTTGTSIGDDSRRTTSSAVTETGPPAMPRLPSCCPQHSPCGGSSQNHHALGHPHTSCFQQHGHHFQHHHHHHHTPHPAVPVSPSFSDPACPVERPPQVQAPCGANSSSGTSYHEQQALPVDLSNSGIRSHGSGSFHGASAFDPCCPVSSSRAAIFGHQAAAAAPSQPLSSIDGYGSSMVAQPQPQPPPQPSLSSCRHYMPPPYASLTRPLHHQASACPHSHGNPPPQTQPPPQVDYVIPHPVHAFHSQISSHATSHPVAPPPPTHLASTAAPIPQHLPPTHQPISHHIPATAPPAQRLHPHEVMQRMEVQRRRMMQHPTRAHERPPPHPHRMHPNYGHGHHIHVPQTMSSHPRQAPERSAWELGIEAGVTAATYTPGALHPHLAHYHAPPRLHHLQLGALPLMVPDMAGYPHIRYISSGLDGTSFRGPFRGNFEELIHLEERLGNVNRGASQGTIERCTYPHKYKKVTTDWFSQRKLHCKQDGEEGTEEDTEEKCTICLSILEEGEDVRRLPCMHLFHQVCVDQWLITNKKCPICRVDIEAQLPSES

SEQ ID NO: 44139 - protein, 299 aa, Homo sapiens [sequence omitted]

SEQ ID NO: 44140 - protein, 222 aa, Homo sapiens
MKGLGTDEDSLIEIICSRTNQELQEINRVYKEMYKTDLEKDIISDTSGDFRKLMVALAKGRRAEDGSVIDYELIDQDARDLYDAGVKRKGTDVPKWISIMTERSVPHLQKVFDRYKSYSPYDMLESIRKEVKGDLENAFLNLVQCIQNKPLYFADRLYDSMKGKGTRDKVLIRIMVSRSEVDMLKIRSEFKRKYGKSLYYYIQQDTKGDYQKALLYLCGGDD

SEQ ID NO: 44141 - protein, 845 aa, Homo sapiens
MKKHVNEEVTEFLKFLQNSAKKCAQDYNMLSDDARLFTEKILRACIEQVKKYSEFYTLHEVTSLMGFFPFRVEMGLKLEKTLLALGSVKYVKTVFPSMPIKLQLSKDDIATIETSEQTAEAMHYDISKDPNAEKLVSRYHPQIALTSQSLFTLLNNHGPTYKEQWEIPVCIQVIPVAGSKPVKVIYINSPLPQKKMTMRERNQIFHEVPLKFMMSKNTSVPVSAVFMDKPEEFISEMDMSCEVNECRKIESLENLYLDFDDDVTELETFGVTTTKVSKSPSPASTSTVPNMTDAPTAPKAGTTTVAPSAPDISANSRSLSQILMEQLQKEKQLVTGMDGGPEECKNKDDQGFESCEKVSNSDKPLIQDSDLKTSDALQLENSQEIETSNKNDMTIDILHADGERPNVLENLDNSKEKTVGSEAAKTEDTVLCSSDTDEECLIIDTECKNNSDGKTAVVGSNLSSRPASPNSSSGQASVGNQTNTACSPEESCVLKKPIKRVYKKFDPVGEILKMQDELLKPISRKVPELPLMNLENSKQPSVSEQLSGPSDSSSWPKSGWPSAFQKPKGRLPYELQDYVEDTSEYLAPQEGNFVYKLFSLQDLLLLVRCSVQRIETRPRSKKRKKIRRQFPVYVLPKVEYQACYGVEALTESELCRLWTESLLHSNSSFYVGHIDAFTSKLFLLEEITSEELKEKLSALKISNLFNILQHILKKLSSLQEGSYLLSHAAEDSSLLIYKASDGKVTRTAYNLYKTHCGLPGVPSSLSVPWVPLDPSLLLPYHIHHGRIPCTFPPKSLDTTTQQKIGGTRMPTRSHRNPVSMETKSSCLPAQQVETEGVAPHKRKIT

SEQ ID NO: 44142 - protein, 3413 aa, Homo sapiens
MIDLLESVDYMVRNAPYRKYKPYLPLHTNGRRWWKYAIDSVLEVHIRRYTQMWSWSNIKKHRQLLKSYKIAYKNKLTQSKVSEEIQKEIQDLEKTLDVFNIILARQQAQVEVIRSGQKLRKKSADTGEKRGGWFSGLWGKKESKKKDEESLIPETIDDLMTPEEKDKLFTAIGYSESTHNLTLPKQYVAHIMTLKLVSTSVTIRENKNIPEILKIQIIGLGTQVSQRPGAQALKVEAKLEHWYITGLRQQDIVPSLVASIGDTTSSLLKIKFETNPEDSPADQTLIVQSQPVEVIYDAKTVNAVVEFFQSNKGLDLEQITSATLMKLEEIKERTATGLTHIIETRKVLDLRINLKPSYLVVPQTGFHHEKSDLLILDFGTFQLNSKDQGLQKTTNSSLEEIMDKAYDKFDVEIKNVQLLFARAEETWKKCRFQHPSTMHILQPMDIHVELAKAMVEKDIRMARFKVSGGLPLMHVRISDQKMKDVLYLMNSIPLPQKSSAQSPERQVSSIPIISGGTKGLLGTSLLLDTVESESDDEYFDAEDGEPQTCKSMKGSELKKAAEVPNEELINLLLKFEIKEVILEFTKQQKEEDTILVFNVTQLGTEATMRTFDLTVVSYLKKISLDYHEIEGSKRKPLHLISSSDKPGLDLLKVEYIKADKNGPSFQTAFGKTEQTVKVAFSSLNLLLQTQALVASINYLTTIIPSDDQSISVAKEVQISTEKQQKNSTLPKAIVSSRDSDIIDFRLFAKLNAFCVIVCNEKNNIAEIKIQGLDSSLSLQSRKQSLFARLENIIVTDVDPKTVHKKAVSIMGNEVFRFNLDLYPDATEGDLYTDMSKVDGVLSLNVGCIQIVYLHKFLMSLLNFLNNFQTAKESLSAATAQAAERAATSVKDLAQRSFRVSINIDLKAPVIVIPQSSISTNAVVVDLGLIRVHNQFSLVSDEDYLNPPVIDRMDVQLTKLTLYRTVIQPGIYHPDIQLLHPINLEFLVNRNLAASWYHKVPVVEIKGHLDSMNVSLNQEDLNLLFRILTENLCEGTEDLDKVKPRVQETGEIKEPLEISISQDVHDSKNTLTTGVEEIRSVDIINMLLNFEIKEVVVTLMKKSEKKGRPLHELNVLQLGMEAKVKTYDMTAKAYLKKISMQCFDFTDSKGEPLHIINSSNVTDEPLLKMLLTKADSDGPEFKTIHDSTKQRLKVSFASLDLVLHLEALLSFMDFLSSAAPFSEPSSSEKESELKPLVGESRSIAVKAVSSNISQKDVFDLKITAELNAFNVFVCDQKCNIADIKIHGMDASISVKPKQTDVFARLKDIIVMNVDLQSIHKKAVSILGDEVFRFQLTLYPDATEGEAYADMSKVDGKLSFKVGCIQIVYVHKFFMSLLNFLNNFQTAKEALSTATVQAAERAASSMKDLAQKSFRLLMDINLKAPVIIIPQSSVSPNAVIADLGLIRVENKFSLVPMEHYSLPPVIDKMNIELTQLKLSRTILQASLPQNDIEILKPVNMLLSIQRNLAAAWYVQIPGMEIKGKLKPMQVALSEDDLTVLMKILLENLGEASSQPSPTQSVQETVRVRKVDVSSVPDHLKEQEDWTDSKLSMNQIVSLQFDFHFESLSIILYNNDINQESGVAFHNDSFQLGELRLHLMASSGKMFKDGSMNVSVKLKTCTLDDLREGIERATSRMIDRKNDQDNNSSMIDISYKQDKNGSQIDAVLDKLYVCASVEFLMTVADFFIKAVPQSPENVAKETQILPRQTATGKVKIEKDDSVRPNMTLKAMITDPEVVFVASLTKADAPALTASFQCNLSLSTSKLEQMMEASVRDLKVLACPFLREKRGKNITTVLQPCSLFMEKCTWASGKQNINIMVKEFIIKISPIILNTVLTIMAALSPKTKEDGSKDTSKEMENLWGIKSINDYNTWFLGVDTATEITESFKGIEHSLIEENCGVVVESIQVTLECGLGHRTVPLLLAESKFSGNIKNWTSLMAAVADVTLQVHYYNEIHAVWEPLIERVEGKRQWNLRLDVKKNPVQDKSLLPGDDFIPEPQMAIHISSGNTMNITISKSCLNVFNNLAKGFSEGTASTFDYSLKDRAPFTVKNAVGVPIKVKPNCNLRVMGFPEKSDIFDVDAGQNLELEYASMVPSSQGNLSILSRQESSFFTLTIVPHGYTEVANIPVARPGRRLYNVRNPNASHSDSVLVQIDATEGNKVITLRSPLQIKNHFSIAFIIYKFVKNVKLLERIGIARPEEEFHVPLDSYRCQLFIQPAGILEHQYKESTTYISWKEELHRSREVRCMLQCPSVEVSFLPLIVNTVALPDELSYICTHGEDWDVAYIIHLYPSLTLRNLLPYSLRYLLEGTAETHELAEGSTADVLHSRISGEIMELVLVKYQGKNWNGHFRIRDTLPEFFPVCFSSDSTEVTTVDLSVHVRRIGSRMVLSVFSPYWLINKTTRVLQYRSEDIHVKHPADFRDIILFSFKKKNIFTKNKVQLKISTSAWSSSFSLDTVGSYGCVKCPANNMEYLVGVSIKMSSFNLSRIVTLTPFCTIANKSSLELEVGEIASDGSMPTNKWNYIASSECLPFWPESLSGKLCVRVVGCEGSSKPFFYNRQDNGTLLSLEDLNGGILVDVNTAEHSTVITFSDYHEGSAPALIMNHTPWDILTYKQSGSPEEMVLLPRQARLFAWADPTGTRKLTWTYAANVGEHDLLKDGCGQFPYDANIQIHWVSFLDGRQRVLLFTDDVALVSKALQAEEMEQADYEITLSLHSLGLSLVNNESKQEVSYIGITSSGVVWEVKPKQKWKPFSQKQIILLEQSYQKHQISRDHGWIKLDNNFEVNFDKDPMEMRLPIRSPIKRDFLSGIQIEFKQSSHQRSLRARLYWLQVDNQLPGAMFPVVFHPVAPPKSIALDSEPKPFIDVSVITRFNEYSKVLQFKYFMVLIQEMALKIDQGFLGAIIALFTPTTDPEAERRRTKLIQQDIDALNAELMETSMTDMSILSFFEHFHISPVKLHLSLSLGSGGEESDKEKQEMFAVHSVNLLLKSIGATLTDVDDLIFKLAYYEIRYQFYKRDQLIWSVVRHYSEQFLKQMYVLVLGLDVLGNPFGLIRGLSEGVEALFYEPFQGAVQGPEEFAEGLVIGVRSLFGHTVGGAAGVVSRITGSVGKGLAAITMDKEYQQKRREELSRQPRDFGDSLARGGKGFLRGVVGGVTGIITKPVEGAKKEGAAGFFKGIGKGLVGAVARPTGGIVDMASSTFQGIQRAAESTEEVSSLRPPRLIHEDGIIRPYDRQESEGSDLLENHIKKLEGETYRYHCAIPGSKKTILMVTNRRVLCIKEVEILGLMCVDWQCPFEDFVFPPSVSENVLKISVKEQGLFHKKDSANQGCVRKVYLKDTATAERACNAIEDAQSTRQQQKLMKQSSVRLLRPQLPS

SEQ ID NO: 44143 - protein, 435 aa, Homo sapiens
MDCSSYSTYCYRCDDFVVNDTKLGLVQKVREHLQNLENSAFTADRHKKRKLLENSTLNSKLLKVNGSTTAICATGLRNLGNTCFMNAILQSLSNIEQFCCYFKELPAVELRNGKTAGRRTYHTRSQGDNNVSLVEEFRKTLCALWQGSQTAFSPESLFYVVWKIMPNFRGYQQQDAHEFMRYLLDHLHLELQGGFNGVSRSAILQENSTLSASNKCCINGASTVVTAIFGGILQNEVNCLICGTESRKFDPFLDLSLDIPSQFRSKRSKNQENGPVCSLRDCLRSFTDLEELDETELYMCHKCKKKQKSTKKFWIQKLPKVLCLHLKRFHWTAYLRNKVDTYVEFPLRGLDMKCYLLEPENSGPESCLYDLAAVVVHHGSGVGSGHYTAYATHEGRWFHFNDSTVTLTDEETVVKAKAYILFYVEHQAKAGSDKL

SEQ ID NO: 44144 - protein, 4858 aa, Homo sapiens
MIPPVKLKWLEHLNSSWITEDSESIATREGVAVLYSKLVSNKEVVPLPQQVLCLKGPQLPDFERESLSSDEQDHYLDALLSSQLALAKMVCSDSPFAGALRKRLLVLQRVFYALSNKYHDKGKVKQQQHSPESSSGSADVHSVSERPRSSTDALIEMGVRTGLSLLFALLRQSWMMPVSGPGLSLCNDVIHTAIEVVSSLPPLSLANESKIPPMGLDCLSQVTTFLKGVTIPNSGADTLGRRLASELLLGLAAQRGSLRYLLEWIEMALGASAVVHTMEKGKLLSSQEGMISFDCFMTILMQMRRSLGSSADRSQWREPTRTSDGLCSLYEAALCLFEEVCRMASDYSRTCASPDSIQTGDAPIVSETCEVYVWGSNSSHQLVEGTQEKILQPKLAPSFSDAQTIEAGQYCTFVISTDGSVRACGKGSYGRLGLGDSNNQSTLKKLTFEPHRSIKKVSSSKGSDGHTLAFTTEGEVFSWGDGDYGKLGHGNSSTQKYPKLIQGPLQGKVVVCVSAGYRHSAAVTEDGELYTWGEGDFGRLGHGDSNSRNIPTLVKDISNVGEVSCGSSHTIALSKDGRTVWSFGGGDNGKLGHGDTNRVYKPKVIEALQGMFIRKVCAGSQSSLALTSTGQVYAWGCGACLGCGSSEATALRPKLIEELAATRIVDVSIGDSHCLALSHDNEVYAWGNNSMGQCGQGNSTGPITKPKKVSGLDGIAIQQISAGTSHSLAWTALPRDRQVVAWHRPYCVDLEESTFSHLRSFLERYCDKINSEIPPLPFPSSREHHSFLKLCLKLLSNHLALALAGGVATSILGRQAGPLRNLLFRLMDSTVPDEIQEVVIETLSVGATMLLPPLRERMELLHSLLPQGPDRWESLSKGQRMQLDIILTSLQDHTHVASLLGYSSPSDAADLSSVCTGYGNLSDQPYGTQSCHPDTHLAEILMKTLLRNLGFYTDQAFGELEKNSDKFLLGTSSSENSQPAHLHELLCSLQKQLLAFCHINNISENSSSVALLHKHLQLLLPHATDIYSRSANLLKESPWNGSVGEKLRDVIYVSAAGSMLCQIVNSLLLLPVSVARPLLSYLLDLLPPLDCLNRLLPAADLLEDQELQWPLHGGPELIDPAGLPLPQPAQSWVWLVDLERTIALLIGRCLGGMLQGSPVSPEEQDTAYWMKTPLFSDGVEMDTPQLDKCMSCLLEVALSGNEEQKPFDYKLRPEIAVYVDLALGCSKEPARSLWISMQDYAVSKDWDSATLSNESLLDTVSRFVLAALLKHTNLLSQACGESRYQPGKHLSEVYRCVYKVRSRLLACKNLELIQTRSSSRDRWISENQDSADVDPQEHSFTRTIDEEAEMEEQAERDREEGHPEPEDEEEEREHEVMTAGKIFQCFLSAREVARSRDRDRMNSGAGSGARADDPPPQSQQERRVSTDLPEGQDVYTAACNSVIHRCALLILGVSPVIDELQKRREEGQLQQPSTSASEGGGLMTRSESLTAESRLVHTSPNYRLIKSRSESDLSQPESDEEGYALSGRRNVDLDLAASHRKRGPMHSQLESLSDSWARLKHSRDWLCNSSYSFESDFDLTKSLGVHTLIENVVSFVSGDVGNAPGFKEPEESMSTSPQASIIAMEQQQLRAELRLEALHQILVLLSGMEEKGSISLAGSRLSSGFQSSTLLTSVRLQFLAGCFGLGTVGHTGGKGESGRLHHYQDGIRAAKRNIQIEIQVAVHKIYQQLSATLERALQANKHHIEAQQRLLLVTVFALSVHYQPVDVSLAISTGLLNVLSQLCGTDTMLGQPLQLLPKTGVSQLSTALKVASTRLLQILAITTGTYADKLSPKVVQSLLDLLCSQLKNLLSQTGVLHMASFGEGEQEDGEEEEKKVDSSGETEKKDFRAALRKQHAAELHLGDFLVFLRRVVSSKAIQSKMASPKWTEVLLNIASQKCSSGIPLVGNLRTRLLALHVLEAVLPACESGVEDDQMAQIVERLFSLLSDCMWETPIAQAKHAIQIKEKEQEIKLQKQGELEEEDENLPIQEVSFDPEKAQCCLVENGQILTHGSGGKGYGLASTGVTSGCYQWKFYIVKENRGNEGTCVGVSRWPVHDFNHRTTSDMWLYRAYSGNLYHNGEQTLTLSSFTQGDFITCVLDMEARTISFGKNGEEPKLAFEDVDAAELYPCVMFYSSNPGEKVKICDMQMRGTPRDLLPGDPICSPVAAVLAEATIQLIRILHRTDRWTYCINKKMMERLHKIKICIKESGQKLKKSRSVQSREENEMREEKESKEEEKGKHTRHGLADLSELQLRTLCIEVWPVLAVIGGVDAGLRVGGRCVHKQTGRHATLLGVVKEGSTSAKVQWDEAEITISFPTFWSPSDTPLYNLEPCEPLPFDVARFRGLTASVLLDLTYLTGVHEDMGKQSTKRHEKKHRHESEEKGDVEQKPESESALDMRTGLTSDDVKSQSTTSSKSENEIASFSLDPTLPSVESQHQITEGKRKNHEHMSKNHDVAQSEIRAVQLSYLYLGAMKSLSALLGCSKYAELLLIPKVLAENGHNSDCASSPVVHEDVEMRAALQFLMRHMVKRAVMRSPIKRALGLADLERAQAMIYKLVVHGLLEDQFGGKIKQEIDQQAEESDPAQQAQTPVTTSPSASSTTSFMSSSLEDTTTATTPVTDTETVPASESPGVMPLSLLRQMFSSYPTTTVLPTRRAQTPPISSLPTSPSDEVGRRQSLTSPDSQSARPANRTALSDPSSRLSTSPPPPAIAVPLLEMGFSLRQIAKAMEATGARGEADAQNITVLAMWMIEHPGHEDEEEPQSGSTADSRPGAAVLGSGGKSNDPCYLQSPGDIPSADAAEMEEGFSESPDNLDHTENAASGSGPSARGRSAVTRRHKFDLAARTLLARAAGLYRSVQAHRNQSRREGISLQQDPGALYDFNLDEELEIDLDDEAMEAMFGQDLTSDNDILGMWIPEVLDWPTWHVCESEDREEVVVCELCECSVVSFNQHMKRNHPGCGRSANRQGYRSNGSYVDGWFGGECGSGNPYYLLCGTCREKYLAMKTKSKSTSSERYKGQAPDLIGKQDSVYEEDWDMLDVDEDEKLTGEEEFELLAGPLGLNDRRIVPEPVQFPDSDPLGASVAMVTATNSMEETLMQIGCHGSVEKSSSGRITLGEQAAALANPHDRVVALRRVTAAAQVLLARTMVMRALSLLSVSGSSCSLAAGLESLGLTDIRTLVRLMCLAAAGRAGLSTSPSAMASTSERSRGGHSKANKPISCLAYLSTAVGCLASNAPSAAKLLVQLCTQNLISAATGVNLTTVDDSIQRKFLPSFLRGIAEENKLVTSPNFVVTQALVALLADKGAKLRPNYDKSEVEKKGPLELANALAACCLSSRLSSQHRQWAAQQLVRTLAAHDRDNQTTLQTLADMGGDLRKCSFIKLEAHQNRVMTCVWCNKKGLLATSGNDGTIRVWNVTKKQYSLQQTCVFNRLEGDAEESLGSPSDPSFSPVSWSISGKYLAGALEKMVNIWQVNGGKGLVDIQPHWVSALAWPEEGPATAWSGESPELLLVGRMDGSLGLIEVVDVSTMHRRELEHCYRKDVSVTCIAWFSEDRPFAVGYFDGKLLLGTKEPLEKGGIVLIDAHKDTLISMKWDPTGHILMTCAKEDSVKLWGSISGCWCCLHSLCHPSIVNGIAWCRLPGKGSKLQLLMATGCQSGLVCVWRIPQDTTQTNVTSAEGWWEQESNCQDGYRKSSGAKCVYQLRGHITPVRTVAFSSDGLALVSGGLGGLMNIWSLRDGSVLQTVVIGSGAIQTTVWIPEVGVAACSNRSKDVLVVNCTAEWAAANHVLATCRTALKQQGVLGLNMAPCMRAFLERLPMMLQEQYAYEKPHVVCGDQLVHSPYMQCLASLAVGLHLDQLLCNPPVPPHHQNCLPDPASWNPNEWAWLECFSTTIKAAEALTNGAQFPESFTVPDLEPVPEDELVFLMDNSKWINGMDEQIMSWATSRPEDWHLGGKCDVYLWGAGRHGQLAEAGRNVMVPAAAPSFSQAQQVICGQNCTFVIQANGTVLACGEGSYGRLGQGNSDDLHVLTVISALQGFVVTQLVTSCGSDGHSMALTESGEVFSWGDGDYGKLGHGNSDRQRRPRQIEALQGEEVVQMSCGFKHSAVVTSDGKLFTFGNGDYGRLGLGNTSNKKLPERVTALEGYQIGQVACGLNHTLAVSADGSMVWAFGDGDYGKLGLGNSTAKSSPQKIDVLCGIGIKKVACGTQFSVALTKDGHVYTFGQDRLIGLPEGRARNHNRPQQIPVLAGVIIEDVAVGAEHTLALASNGDVYAWGSNSEGQLGLGHTNHVREPTLVTGLQGKNVRQISAGRCHSAAWTAPPVPPRAPGVSVPLQLGLPDTVPPQYGALREVSIHTVRARLRLLYHFSDLMYSSWRLLNLSPNNQNSTSHYNAGTWGIVQGQLRPLLAPRVYTLPMVRSIGKTMVQGKNYGPQITVKRISTRGRKCKPIFVQIARQVVKLNASDLRLPSRAWKVKLVGEGADDAGGVFDDTITEMCQELETGIVDLLIPSPNATAEVGYNRDRFLFNPSACLDEHLMQFKFLGILMGVAIRTKKPLDLHLAPLVWKQLCCVPLTLEDLEEVDLLYVQTLNSILHIEDSGITEESFHEMIPLDSFVGQSADGKMVPIIPGGNSIPLTFSNRKEYVERAIEYRLHEMDRQVAAVREGMSWIVPVPLLSLLTAKQLEQMVCGMPEISVEVLKKVVRYREVDEQHQLVQWFWHTLEEFSNEERVLFMRFVSGRSRLPANTADISQRFQIMKVDRPYDSLPTSQTCFFQLRLPPYSSQLVMAERLRYAINNCRSIDMDNYMLSRNVDNAEGSDTDY

SEQ ID NO: 44145 - protein, 364 aa, Homo sapiens
MNAYVAYKVTTQTSLPLFRSKQFAVKRRFSDFLGLYEKLSEKHSQNGFIVPPPPEKSLIGMTKVKVGKEDSSSAEFLEKRRAALERYLQRIVNHPTMLQDPDVREFLEKEELPRAVGTQTLSGAGLLKMFNKATDAVSKMTIKMNESDIWFEEKLQEVECEEQRLRKLHAVVETLVNHRKELALNTAQFAKSLAMLGSSEDNTALSRALSQLAEVEEKIEQLHQEQANNDFFLLAELLSDYIRLLAIVRAAFDQRMKTWQRWQDAQATLQKKREAEARLLWANKPDKLQQAKDEILEWESRVTQYERDFERISTVVRKEVIRFEKEKSKDFKNHVIKYLETLLYSQQQLAKYWEAFLPEAKAIS

SEQ ID NO: 44146 - protein, 351 aa, Homo sapiens
MSGVENSGKVDISTKDLLPHQELRIKSGLEKAIKHKDKLLEFDRTSIRRTQVIDDESDYFASDSNQWLSKLERETLQKREEELRELRHASRLSKKVTIDFAGRKILEEENSLAEYHSRLDETIQAIANGTLNQPLTKLDRSSEEPLGVLVNPNMYQSPPQWVDHTGAASQKKAFRSSGFGLEFNSFQHQLRIQDQEFQEGFDGGWCLSVHQPWASLLVRGIKRVEGRSWYTPHRGRLWIAATAKKPSPQEVSELQATYRLLRGKDVEFPNDYPSGCLLGCVDLIDCLSQKQFKEQFPDISQESDSPFVFICKNPQEMVVKFPIKGNPKIWKLDSKIHQGAKKGLMKQNKAV

SEQ ID NO: 44147 - protein, 138 aa, Homo sapiens
MSGVENSGKVDISTKDLLPHQELRIKSGLEKAIKHKDKLLEFDRTSIRRTQVIDDESDYFASDSNQWLSKLERETLQKREEELRELRHASRLSKKVTIDFAGRKILEEENSLAEYHSSGLTTQVQPHRRRLSVLQDLD

SEQ ID NO: 44148 - protein, 473 aa, Homo sapiens [sequence omitted]

SEQ ID NO: 44149 - protein, 492 aa, Homo sapiens
MQELIGRRVNTRARNHVGRVALHWAAGAGHEQAVRLLLEHEAAVDEEDAVGALTEARLCFGMNALLLSAWFGHLRILQILVNSGAKIHCESKDGLTLLHCAAQKGHVPVLAFIMEDLEDVALDHVDKLGRTAFHRAAEHGQLDALDFLVGSGCDHNVKDKEGNTALHLAAGRGHMAVLQRLVDIGLDLEEQNAEGLTALHSAAGGSHPDCVQLLLRAGSTVNALTQKNLSCLHYAALSGSEDVSRVLIHAGGCANVVDHQGASPLHLAVRHNFPALVRLLINSDSDVNAVDNRQQTPLHLAAEHAWQDIADMLLIAGVDLNLRDKQGKTALAVAVRSNHVSLVDMIIKADRFYRWEKDHPSDPSGKSLSFKQDHRQETQQLRSVLWRLASRYLQPREWKKLAYSWEFTEAHVDAIEQQWTGTRSYQEHGHRMLLIWLHGVATAGENPSKALFEGLVAIGRRDLAGWSTMARSQLTATSASRVQMILVPQPPE

SEQ ID NO: 44150 - protein, 175 aa, Homo sapiens
MLISVLKNLPESLSNGRQQPMEGATYAPKISAGTSCIKWEEQTSEQIFRLYRAIGNIIPLQTLWMANTIKLLDLVEVNSSVLADPKLTGQALIPGSVIYHKQSQILLVYCKDGWIGVRSVMLKKSLTATDFYNGYLHPWYQKNSQAQPSQCRFQTLRLPTKKKQKKTVAMQQCIE

SEQ ID NO: 44151 - protein, 194 aa, Homo sapiens
MDTADLDTPRNCERYLNWAHAFLVVYSVDSRQSFDSSSSYLELLALHAKETQRSIPALLLGNKLDMAQYRQVTKAEGVALAGRFGCLFFEVSACLDFEHVQHVFHEAVREARRELEKSPLTRPLFISEERALPHQAPLTARHGLASCTFNTLSTINLKEMPTVAQAKLVTVKSSRAQSKRKAPTLTLLKGFKIF

SEQ ID NO: 44152 - protein, 306 aa, Homo sapiens
MLAADLRCSLFASALQSYKRDSVLRPFPASYARGDCKDFEALLADASKLPNLKELLQSSGDNHKRAWDLVSWILSSKVLTIHSAGKAEFEKIQKLTGAPHTPVPAPDFLFEIEYFDPANAKFYETKGERDLIYAFHGSRLENFHSIIHNGLHCHLNKTSLFGEGTYLTSDLSLALIYSPHGHGWQHSLLGPILSCVAVCEVIDHPDVKCQTKKKDSKEIDRRRARIKHSEGGDIPPKYFVVTNNQLLRVKYLLVYSQKPPKRASSQLSWFSSHWFTVMISLYLLLLLIVSVINSSAFQHFWNRAKR

SEQ ID NO: 44153 - protein, 1069 aa, Homo sapiens
MLIIGSTYQHLRRPRGLSSLWAAVSSHQPIKLASRDLSSEEMMMMSSSPSKPSSEMGGKMLVPQASVGSDEATLSMTVENIPSMPKRTAKMIPTTTKNNYSPTAAGTERRKEDTPTSSRTLTYYTSTSSRQIVKKYTPTPRGEMKSYSPTQVREKVKYTPSPRGRRVGTYVPSTFMTMETSHAITPRTTVKDSDITATYKILETNSLKRIMEETTPTTLKGMFDSTPTFLTHEVEANVLTSPRSVMEKNNLFPPRRVESNSSAHPWGLVGKSNPKTPQGTVLLHTPATSEGQVTISTMTGSSPAETKAFTAAWSLRNPSPRTSVSAIKTAPAIVWRLAKKPSTAPSTSTTPTVRAKLTMQVHHCVVVKPTPAMLTTPSPSLTTALLPEELSPSPSVLPPSLPDLHPKGEYPPDLFSVEERRQGWVVLHVFGMMYVFVALAIVCDEYFVPALGVITDKLQISEDVAGATFMAAGGSAPELFTSLIGVFISHSNVGIGTIVGSAVFNILFVIGTCSLFSREILNLTWWPLFRDVSFYILDLIMLILFFLDSLIAWWESLLLLLAYAFYVFTMKWNKHIEVWVKEQLSRRPVAKVMALEDLSKPGDGAIAVDELQDNKKLKLPSLLTRGSSSTSLHNSTIRSTIYQLMLHSLDPLREVRLAKEKEEESLNQGARAQPQAKAESKPEEEEPAKLPAVTVTPAPVPDIKGDQKENPGGQEDVAEAESTGEMPGEEGETAGEGETEEKSGGETQPEGEGETETQGKGEECEDENEAEGKGDNEGEDEGEIHAEDGEMKGNEGETESQELSAENHGEAKNDEKGVEDGGGSDGGDSEEEEEEEEEQEEEEEEEEQEEEEEEEEEEEEKGNEEPLSLDWPETRQKQAIYLFLLPIVFPLWLTVPDVRRQESRKFFVFTFLGSIMWIAMFSYLMVWWAHQVGETIGISEEIMGLTILAAGTSIPDLITSVIVARKGLGDMAVSSSVGSNIFDITVGLPVPWLLFSLINGLQPVPVSSNGLFCAIVLLFLMLLFVISSIASCKWRMNKILGFTMFLLYFVFLIISVMLEDRIISCPVSV

SEQ ID NO: 44154 - protein, 79 aa, Homo sapiens
MLVGNKSDLRHLRAVPTDEARAFAEAAFQTILTEIYRIVSQKQMSDRRENDMSPSNNVVPIHVPPTTENKPKVQCCQNI

SEQ ID NO: 44155 - protein, 36 aa, Homo sapiens
MLVGNKSDLRHLRAVPTDEARAFAEKNEANVRQTRK

SEQ ID NO: 44156 - protein, 195 aa, Homo sapiens [sequence omitted]

SEQ ID NO: 44157 - protein, 65 aa, Homo sapiens
MACARPLISVYSEKGESSGKNVTLPAVFKAPIRPDIVNFVHTNLRKNNRQPYAVSELAATVACCQ

SEQ ID NO: 44158 - protein, 15 aa, Homo sapiens
MILSPWPPKVLGLQT

SEQ ID NO: 44159 - protein, 437 aa, Homo sapiens
MENQVLVIRIKIPNSGAVDWTVHSGPQLLFRDVLDVIGQVLPEATTTAFEYEDEDGDRITVRSDEEMKAMLSYYYSTVMEQQVNGQLIEPLQIFPRACKPPGERNIHGLKVNTRAGPSQHSSPAVSDSLPSNSLKKSSAELKKILANGQMNEQDIRYRDTLGHGNGGTVYKAYHVPSGKILAVKVILLDITLELQKQIMSELEILYKCDSSYIIGFYGAFFVENRISICTEFMDGGSLDVYRKMPEHVLGRIAVAVVKGLTYLWSLKILHRDVKPSNMLVNTRGQVKLCDFGVSTQLVNSIAKTYVGTNAYMAPERISGEQYGIHSDVWSLGISFMELALGRFPYPQIQKNQGSLMPLQLLQCIVDEDSPVLPVGEFSEPFVHFITQCMRKQPKERPAPEELMGHPFIVQFNDGNAAVVSMWVCRALEERRSQQGPP

SEQ ID NO: 44160 - protein, 1164 aa, Homo sapiens
MDTRKPRVIPGSRTAFFGYTVQQHDISGNKWLVVGAPLETNGYQKTGDVYKCPVIHGNCTKLNLGRVTLSNVSERKDNMRLGLSLATNPKDNSFLACSPLWSHECGSSYYTTGMCSRVNSNFRFSKTVAPALQRCQTYMDIVIVLDGSNSIYPWVEVQHFLINILKKFYIGPGQIQVGVVQYGEDVVHEFHLNDYRSVKDVVEAASHIEQRGGTETRTAFGIEFARSEAFQKGGRKGAKKVMIVITDGESHDSPDLEKVIQQSERDNVTRYAVAVLGYYNRRGINPETFLNEIKYIASDPDDKHFFNVTDEAALKDIVDALGDRIFSLEGTNKNETSFGLEMSQTGFSSHVVEDGVLLGAVGAYDWNGAVLKETSAGKVIPLRESYLKEFPEELKNHGAYLGYTVTSVVSSRQGRVYVAGAPRFNHTGKVILFTMHNNRSLTIHQAMRGQQIGSYFGSEITSVDIDGDGVTDVLLVGAPMYFNEGRERGKVYVYELRQNLFVYNGTLKDSHSYQNARFGSSIASVRDLNQDSYNDVVVGAPLEDNHAGAIYIFHGFRGSILKTPKQRITASELATGLQYFGCSIHGQLDLNEDGLIDLAVGALGNAVILWSRPVVQINASLHFEPSKINIFHRDCKRSGRDATCLAAFLCFTPIFLAPHFQTTTVGIRYNATMDERRYTPRAHLDEGGDRFTNRAVLLSSGQELCERINFHVLDTADYVKPVTFSVEYSLEDPDHGPMLDDGWPTTLRVSVPFWNGCNEDEHCVPDLVLDARSDLPTAMEYCQRVLRKPAQDCSAYTLSFDTTVFIIESTRQRVAVEATLENRGENAYSTVLNISQSANLQFASLIQKEDSDGSIECVNEERRLQKQVCNVSYPFFRAKAKVAFRLDFEFSKSIFLHHLEIELAAGSDSNERDSTKEDNVAPLRFHLKYEADVLFTRSSSLSHYEVKPNSSLERYDGIGPPFSCIFRIQNLGLFPIHGMMMKITIPIATRSGNRLLKLRDFLTDEANTSCNIWGNSTEYRPTPVEEDLRRAPQLNHSNSDVVSINCNIRLVPNQEINFHLLGNLWLRSLKALKYKSMKIMVNAALQRQFHSPFIFREEDPSRQIVFEISKQEDWQVPIWIIVGSTLGGLLLLALLVLALWKLGFFRSARRRREPGLDPTPKVLE

SEQ ID NO: 44161 - protein, 1165 aa, Homo sapiens
MDTRKPRVIPGSRTAFFGYTVQQHDISGNKWLVVGAPLETNGYQKTGDVYKCPVIHGNCTKLNLGRVTLSNVSERKDNMRLGLSLATNPKDNSFLACSPLWSHECGSSYYTTGMCSRVNSNFRFSKTVAPALQRCQTYMDIVIVLDGSNSIYPWVEVQHFLINILKKFYIGPGQIQVGVVQYGEDVVHEFHLNDYRSVKDVVEAASHIEQRGGTETRTAFGIEFARSEAFQKGGRKGAKKVMIVITDGESHDSPDLEKVIQQSERDNVTRYAVAVLGYYNRRGINPETFLNEIKYIASDPDDKHFFNVTDEAALKDIVDALGDRIFSLEGTNKNETSFGLEMSQTGFSSHVVEDGVLLGAVGAYDWNGAVLKETSAGKVIPLRESYLKEFPEELKNHGAYLGYTVTSVVSSRQGRVYVAGAPRFNHTGKVILFTMHNNRSLTIHQAMRGQQIGSYFGSEITSVDIDGDGVTDVLLVGAPMYFNEGRERGKVYVYELRQNLFVYNGTLKDSHSYQNARFGSSIASVRDLNQDSYNDVVVGAPLEDNHAGAIYIFHGFRGSILKTPKQRITASELATGLQYFGCSIHGQLDLNEDGLIDLAVGALGNAVILWSRPVVQINASLHFEPSKINIFHRDCKRSGRDATCLAAFLCFTPIFLAPHFQTTTVGIRYNATMDERRYTPRAHLDEGGDRFTNRAVLLSSGQELCERINFHVLDTADYVKPVTFSVEYSLEDPDHGPMLDDGWPTTLRVSVPFWNGCNEDEHCVPDLVLDARSDLPTAMEYCQRVLRKPAQDCSAYTLSFDTTVFIIESTRQRVAVEATLENRGENAYSTVLNISQSANLQFASLIQKEDSDGSIECVNEERRLQKQVCNVSYPFFRAKAKVAFRLDFEFSKSIFLHHLEIELAAGSDSNERDSTKEDNVAPLRFHLKYEADVLFTRSSSLSHYEVKPNSSLERYDGIGPPFSCIFRIQNLGLFPIHGMMMKITIPIATRSGNRLLKLRDFLTDEVANTSCNIWGNSTEYRPTPVEEDLRRAPQLNHSNSDVVSINCNIRLVPNQEINFHLLGNLWLRSLKALKYKSMKIMVNAALQRQFHSPFIFREEDPSRQIVFEISKQEDWQVPIWIIVGSTLGGLLLLALLVLALWKLGFFRSARRRREPGLDPTPKVLE

SEQ ID NO: 44162 - protein, 247 aa, Homo sapiens [sequence omitted]

SEQ ID NO: 44163 - protein, 190 aa, Homo sapiens
MLPVVTESSTSPYVTSYKSPVTTLDKSTGIGISTESEDVPQLSGETAIEKPEEFGKHPESWNNDDILKKILDINSQVQQALLSDTSNPAYREDIEASKDHLKRSLALAAAAEHKLKTMYKSQLLPVGRTSNKIDDIETVINMLCNSRSKLYEYLDIKCVPPEMREKAATVFNTLKNMCRSRRVTALLKVY

SEQ ID NO: 44164 - protein, 360 aa, Homo sapiens
MANVADKSRFTNVKQFIAPETSEGVSLQLGNTKDFIISFDLKFLTNGSVSVVLETTEKNQLFTIHYVSNAQLIAFKERDIYYGIGPRTSWSTVTRDLVTDLRKGVGLSNTKAVKPTKIMPKKVVRLIAKGKGFLDNITISTTAHMAAFFAASDWLVRNQDEKGGWPIMVTRKLGEGFKSLEPGWYSAMAQGQAISTLVRAYLLTKDHIFLNSALRATAPYKFLSEQHGVKAVFMNKHDWYEEYPTTPSSFVLNGFMYSLIGLYDLKETAGEKLGKEARSLYERGMESLKAMLPLYDTGSGTIYDLRHFMLGIAPNLARWDYHTTHINQLQLLSTIDESPVFKEFVKRWKSYLKGSRAKHN

SEQ ID NO: 44165 - protein, 1274 aa, Homo sapiens
MADCPSSIQLLCDHGASVNAKDVDGRTPLVLATQMSRPTICQLLIDRGADVNSRDKQNRTALMLGCEYGCRDAVEVLIKNGADISLLDALGHDSSYYARIGDNLDILTLLKTASENTNKGRELWKKGPSLQQRNLTHMQDEVNVKSHQREHQNIQDLEIENEDLKERLRKIQQEQRILLDKVNGLQLQLNEEVMVADDLESEREKLKSLLAAKEKQHEESLRTIEALKNRFKYFESDHLGSGSHFSNRKEDMLLKQGQMYMADSQCTSPGIPAHMQSRSMLRPLELSLPSQTSYSENEILKKELEAMRTFCESAKQDRLKLQNELAHKVAECKALALECERVKEDSDEQIKQLEDALKDVQKRMYESEGKVKQMQTHFLALKEHLTSEAASGNHRLTEELKDQLKDLKVKYEGASAEVGKLRNQIKQNEMIVEEFKRDEGKLIEENKRLQKELSMCEMEREKKGRKVTEMEGQAKELSAKLALSIPAEKFENMKSSLSNEVNEKAKKLVEMEREHEKSLSEIRQLKRELENVKAKLAQHVKPEEHEQVKSRLEQKSGELGKKITELTLKNQTLQKEIEKVYLDNKLLKEQAHNLTIEMKNHYVPLKVSEDMKKSHDAIIDDLNRKLLDVTQKYTEKKLEMEKLLLENDSLSKDVSRLETVFVPPEKHEKEIIALKSNIVELKKQLSELKKKCGEDQEKIHALTSENTNLKKMMSNQYVPVKTHEEVKMTLNDTLAKTNRELLDVKKKFEDINQEFVKIKDKNEILKRNLENTQNQIKAEYISLAEHEAKMSSLSQSMRKVQDSNAEILANYRKGQEEIVTLHAEIKAQKKELDTIQECIKVKYAPIVSFEECERKFKATEKELKDQLSEQTQKYSVSEEEVKKNKQENDKLKKEIFTLQKDLRDKTVLIEKSHEMERALSRKTDELNKQLKDLSQKYTEVKNVKEKLVEENAKQTSEILAVQNLLQKQHVPLEQVEALKKSLNGTIENLKEELKSMQRCYEKEQQTVTKLHQLLENQKNSSVPLAEHLQIKEAFEKEVGIIKASLREKEEESQNKMEEVSKLQSEVQNTKQALKKLETREVVDLSKYKATKSDLETQISSLNEKLANLNRKYEEVCEEVLHAKKKEISAKDEKELLHFSIEQEIKDQKERCDKSLTTITELQRRIQESAKQIEAKDNKITELLNDVERLKQALNGLSQLTYTSGNPTKRQSQLIDTLQHQVKSLEQQLADADRQHQEVIAIYRTHLLSAAQGHMDEDVQEALLQIIQMRQGLVC

SEQ ID NO: 44166 - protein, 1013 aa, Homo sapiens
MGSLSVLCFLLLLGFQFVCPQPSTQHRKVPQRMAAEGAPEDDGGGGAPGVWGAWGPWSACSRSCSGGVMEQTRPCLPRSYRLRGGQRPGAPARAFADHVVSAVRTSVPLHRSRDETPALAGTDASRQGPTVLRGSRHPQPQGLEVTGDRRSRTRGTIGPGKYGYGKAPYILPLQTDTAHTPQRLRRQKLSSRHSRSQGASSARHGYSSPAHQVPQHGPLYQSDSGPRSGLQAAEAPIYQLPLTHDQGYPAASSLFHSPETSNNHGVGTHGATQSFSQPARSTAISCIGAYRQYKLCNTNVCPESSRSIREVQCASYNNKPFMGRFYEWEPFAEVKGNRKCELNCQAMGYRFYVRQAEKVIDGTPCDQNGTAICVSGQCKSIGCDDYLGSDKVVDKCGVCGGDNTGCQVVSGVFKHALTSLGYHRVVEIPEGATKINITEMYKSNNYLALRSRSGRSIINGNWAIDRPGKYEGGGTMFTYKRPNEISSTAGESFLAEGPTNEILDVYMIHQQPNPGVHYEYVIMGTNAISPQVPPHRRPGEPFNGQMVTEGRSQEEGEQKGRNEEKEDLRGEAPEMFTSESAQTFPVRHPDRFSPHRPDNLVPPAPQPPRRSRDHNWKQLGTTECSTTCGKGSQYPIFRCVHRSTHEEAPESYCDSSMKPTPEEEPCNIFPCPAFWDIGEWSECSKTCGLGMQHRQVLCRQVYANRSLTVQPYRCQHLEKPETTSTCQLKICSEWQIRTDWTSCSVPCGVGQRTRDVKCVSNIGDVVDDEECNMKLRPNDIENCDMGPCAKSWFLTEWSERCSAECGAGVRTRSVVCMTNHVSSLPLEGCGNNRPAEATPCDNGPCTGKVEWFAGSWSQCSIECGSGTQQREVICVRKNADTFEVLDPSECSFLEKPPSQQSCHLKPCGAKWFSTEWSMCSKSCQGGFRVREVRCLSDDMTLSNLCDPQLKPEERESCNPQDCVPEVDENCKDKYYNCNVVVQARLCVYNYYKTACCASCTRVANRQTGFLGSR

SEQ ID NO: 44167 - protein, 256 aa, Homo sapiens
MLEVFVSSLEEFQPDLVVLSGLHMMEGQSKELQRKRLLEVVTSISDIPTGIPVHLELASMTNRELMSSIVHQQVFPAVTSLGLNEQELLFLTQSASGPHSSLSSWNGVPDVGMVSDILFWILKEHGRSKSRASDLTRIHFHTLVYHILATVDGHWANQLAAVAAGARVAGTQACATETIDTSRVSLRAPQEFMTSHSEAGSRIVLNPNKPVVEWHREGISFHFTPVLVCKDPIRTVGLGDAISAEGLFYSEVHPHY

SEQ ID NO: 44168 - protein, 1075 aa, Homo sapiens
MVIPSDYFKIVKEHNLQVLGLVKSDEGFYQCIAENDVGNAQAGAQLIILEHDVAIPTLPPTSLTSATTDHLAPATTGPLPSAPRDVVASLVSTRFIKLTWRTPASDPHGDNLTYSVFYTKEGIARERVENTSHPGEMQVTIQNLMPATVYIFRVMAQNKHGSGESSAPLRVETQPEVQLPGPAPNLRAYAASPTSITVTWETPVSGNGEIQNYKLYYMEKGTDKEQDVDVSSHSYTINGLKKYTEYSFRVVAYNKHGPGVSTPDVAVRTLSDVPSAAPQNLSLEVRNSKSIMIHWQPPAPATQNGQITGYKIRYRKASRKSDVTETLVSGTQLSQLIEGLDRGTEYNFRVAALTINGTGPATDWLSAETFESDLDETRVPEVPSSLHVRPLVTSIVVSWTPPENQNIVVRGYAIGYGIGSPHAQTIKVDYKQRYYTIENLDPSSHYVITLKAFNNVGEGIPLYESAVTRPHTVPDPTPMMPPVGVQASILSHDTIRITWADNSLPKHQKITDSRYYTVRWKTNIPANTKYKNANATTLSYLVTGLKPNTLYEFSVMVTKGRRSSTWSMTAHGTTFELVPTSPPKDVTVVSKEGKPKTIIVNWQPPSEANGKITGYIIYYSTDVNAEIHDWVIEPVVGNRLTHQIQELTLDTPYYFKIQARNSKGMGPMSEAVQFRTPKASGSGGKGSRLPDLGSDYKPPMSGSNSPHGSPTSPLDSNMLLVIIVSVGVITIVVVVIIAVFCTRRTTSHQKKKRAACKSVNGSHKYKGNSKDVKPPDLWIHHERLELKPIDKSPDPNPIMTDTPIPRNSQDITPVDNSMDSNIHQRRNSYRGHESEDSMSTLAGRRGMRPKMMMPFDSQPPQPVISAHPIHSLDNPHHHFHSSSLASPARSHLYHPGSPWPIGTSMSLSDRANSTESVRNTPSTDTMPASSSQTCCTDHQDPEGATSSSYLASSQEEDSGQSLPTAHVRPSHPLKSFAVPAIPPPGPPTYDPALPSTPLLSQQALNHHIHSVKTASIGTLGRSRPPMPVVVPSAPEVQETTRMLEDSESSYEPDELTKEMAHLEGLMKDLNAITTA

SEQ ID NO: 44169 - protein, 134 aa, Homo sapiens
MAVVQSVPGAHPVPVYAFSIKGPSYGEDVSNTTTAQKRKCSQTQCPRKVIKMESEEGKEARLARSSPEQPRPSTSKAVSPPHLDGPPSPRSPVIGSEVFLPNSNHVASGAGEAEERVVVISSSEDSDAENSPSV

SEQ ID NO: 44170 - protein, 89 aa, Homo sapiens [sequence omitted]

SEQ ID NO: 44171 - protein, 194 aa, Homo sapiens
MALTLLGGPNRLNPKNVHQRPTVALLCGPHVKGAQGISCGRHLANHDVQVILFLPNFVKMLESITNELSLFSKTQGQQVSSLKDLPTSPVDLVINCLDCPENVFLRDQPWYKAAVAWANQNRAPVLSIDPPVHEVEQGIDAKWSLALGLPLPLGEHAGRIYLCDIGIPQQVFQEVGINYHSPFGCKFVIPLHSA

SEQ ID NO: 44172 - protein, 143 aa, Homo sapiens [sequence omitted]

SEQ ID NO: 44173 - protein, 191 aa, Homo sapiens [sequence omitted]

SEQ ID NO: 44174 - protein, 1034 aa, Homo sapiens
MYGKLPRLETDSGLEHSLPHSVGNQDPCTYKGSYFSCPMAGTPKAESEQLASWTPYPPLYSTGMAGPPLQADNLLTNCLFYRSPAEGPEKMQDSSPVELLPFSPQAHSYPGPPLAAPKPVYRNPLCYGLSTCLGEGAVKRPLDVDWTLATGPLLPSADPPCSLAPAPSKGQTLDGTFLRGVPAEGSSKDSSGSFSPCQPFLEKYQTIHSTGFLASRYTGPYPRNSKQAMSEGPSSPWTQLAQPLGPPCQDTGPTHYPPPHHPPPHPPQALPCPPACRHPEKQGSYSPALPLQPLGGHKGTGYQAGGLGSPYLRQQAAQAPYIPPLGLDAYPYPSAPLPAPSPGLKLEPPLTPRCPLDFAPQTLSFPYARDDLSLYGASPGLGGTPPSQNNVRAVPQPGAFQRACQPLPASQPCSEPVRPAQEAEEKTWLPSCRKEKLQPRLSEHSGPPIVIRDSPVPCTPPALPPCARECQSLPQKEGARPPSSPPMPVIDNVFSLAPYRDYLDVPAPEATTEPDSATAEPDSAPATSEGQDKGCRGTLPAQEGPSGSKPLRGSLKEEVALDLSVRKPTAEASPVKASRSVEHAKPTAAMDVPDVGNMVSDLPGLKKIDTEAPGLPGVPVTTDAMPRTNFHSSVAFMFRKFKILRPAPLPAAVVPSTPTSAPAPTQPAPTPTSGPIGLRILAQQPLSVTCFSLALPSPPAVAVASPAPAPAPSPAPARAQAPASARDPAPAPAPVAGPAPASTSAPGDSLEQHFTGLHASLCDAISGSVAHSPPEKLREWLETAGPWGQAAWQDCQGVQGLLAKLLSQLQRFDRTHRCPFPHVVRAGAIFVPIHLVKERLFPRLPPASVDHVLQEHRVELRPTTLSEERALRELALPGCTSRMLKLLALRQLPDIYPDLLGLQWRDCVRRQLGDFDTEAGAVSSSEPTVARGEPESLALAQKSPAPKVRKPGRKPPTPGPEKAEAAAGEESCGASPTPATSASPPGPTLKARFRSLLETAWLNGLALPTWGHKSSRPDQPSPCPQLLDSQSHHL

SEQ ID NO: 44175 - protein, 925 aa, Homo sapiens
MYGKLPRLETDSGLEHSLPHSVGNQDPCTYKGSYFSCPMAGTPKAESEQLASWTPYPPLYSTGMAGPPLQADNLLTNCLFYRSPAEGPEKMQDSSPVELLPFSPQAHSYPGPPLAAPKPVYRNPLCYGLSTCLGEGAVKRPLDVDWTLATGPLLPSADPPCSLAPAPSKGQTLDGTFLRGVPAEGSSKDSSGSFSPCQPFLEKYQTIHSTGFLASRYTGPYPRNSKQAMSEGPSSPWTQLAQPLGPPCQDTGPTHYPPPHHPPPHPPQALPCPPACRHPEKQGSYSPALPLQPLGGHKGTGYQAGGLGSPYLRQQAAQAPYIPPLGLDAYPYPSAPLPAPSPGLKLEPPLTPRCPLDFAPQTLSFPYARDDLSLYGASPGLGGTPPSQNNVRAVPQPGAFQRACQPLPASQPCSEPVRPAQEAEEKTWLPSCRKEKLQPRLSEHSGPPIVIRDSPVPCTPPALPPCARECQSLPQKEGARPPSSPPMPVIDNVFSLAPYRDYLDVPAPEATTEPDSATAEPDSAPATSEGQDKGCRGTLPAQEGPSGSKPLRGSLKEEVALDLSVRKPTAEASPVKASRSVEHAKPTAAMDVPDVGNMVSDLPGLKKIDTEAPGLPGVPVTTDAMPRTNFHSSVAFMFRKFKILRPAPLPAAVVPSTPTSAPAPTQPAPTPTSGPIGLRILAQQPLSVTCFSLALPSPPAVAVASPAPAPAPSPAPARAQAPASARDPAPAPAPVAGPAPASTSAPGDSLEQHFTGLHASLCDAISGSVAHSPPEKLREWLETAGPWGQAAWQDCQGVQGLLAKLLSQLQRFDRTHRCPFPHVVRAGAIFVPIHLVKERLFPRLPPASVDHVLQEHRVELRPTTLSEERALRELALPGCTSRMLKLLALRQLPDIYPDLLGLQWRDCVRRQLGEHGAAPVATGAV

SEQ ID NO: 44176 - protein, 275 aa, Homo sapiens
MDIDTVKKLPKHYANQLMLSEWLIDVPSDLGQEWIVVVCPVGKRALIVASRGSTSAYTKSGYCVNRFSSLLPGGNRRNSTAKDYTILDCIYNEVNQTYYVLDVMCWRGHPFYDCQTDFRFYWMHSKLPEEEGLGEKTKLNPFKFVGLKNFPCTPESLCDVLSMDFPFEVDGLLFYHKQTHYSPGSTPLVGWLRPYMVSDVLGVAVPAGPLTTKPDYAGHQLQQIMEHKKSQKEGMKEKLTHKASENGHYELEHLSTPKLKGSSHSPDHPGCLMEN

SEQ ID NO: 44177 - protein, 2301 aa, Homo sapiens
MLARLASAASFFGENHLEVPVATALTDIDLQLQFSTSQPEALLLLAAGPADHLLLQLYSGRLQVRLVLGQEELRLQTPAETLLSDSIPHTVVLTVVEGWATLSVDGFLNASSAVPGAPLEVPYGLFVGGTGTLGLPYLRGTSRPLRGCLHAATLNGRSLLRPLTPDVHEGCAEEFSASDDVALGFSGPHSLAAFPAWGTQDEGTLEFTLTTQSRQAPLAFQAGGRRGDFIYVDIFEGHLRAVVEKGQGTVLLHNSVPVADGQPHEVSVHINAHRLEISVDQYPTHTSNRGVLSYLEPRGSLLLGGLDAEASRHLQEHRLGLTPEATNASLLGCMEDLSVNGQRRGLREALLTRNMAAGCRLEEEEYEDDAYGHYEAFSTLAPEAWPAMELPEPCVPEPGLPPVFANFTQLLTISPLVVAEGGTAWLEWRHVQPTLDLMEAELRKSQVLFSVTRGARHGELELDIPGAQARKMFTLLDVVNRKARFIHDGSEDTSDQLVLEVSVTARVPMPSCLRRGQTYLLPIQVNPVNDPPHIIFPHGSLMVILEHTQKPLGPEVFQAYDPDSACEGLTFQVLGTSSGLPVERRDQPGEPATEFSCRELEAGSLVYVHRGGPAQDLTFRVSDGLQASPPATLKVVAIRPAIQIHRSTGLRLAQGSAMPILPANLSVETNAVGQDVSVLFRVTGALQFGELQKQGAGGVEGAEWWATQAFHQRDVEQGRVRYLSTDPQHHAYDTVENLALEVQVGQEILSNLSFPVTIQRATVWMLRLEPLHTQNTQQETLTTAHLEATLEEAGPSPPTFHYEVVQAPRKGNLQLQGTRLSDGQGFTQDDIQAGRVTYGATARASEAVEDTFRFRVTAPPYFSPLYTFPIHIGGDPDAPVLTNVLLVVPEGGEGVLSADHLFVKSLNSASYLYEVMERPRHGRLAWRGTQDKTTMVTSFTNEDLLRGRLVYQHDDSETTEDDIPFVATRQGESSGDMAWEEVRGVFRVAIQPVNDHAPVQTISRIFHVARGGRRLLTTDDVAFSDADSGFADAQLVLTRKDLLFGSIVAVDEPTRPIYRFTQEDLRKRRVLFVHSGADRGWIQLQVSDGQHQATALLEVQASEPYLRVANGSSLVVPQGGQGTIDTAVLHLDTNLDIRSGDEVHYHVTAGPRWGQLVRAGQPATAFSQQDLLDGAVLYSHNGSLSPRDTMAFSVEAGPVHTDATLQVTIALEGPLAPLKLVRHKKIYVFQGEAAEIRRDQLEAAQEAVPPADIVFSVKSPPSAGYLVMVSRGALADEPPSLDPVQSFSQEAVDTGRVLYLHSRPEAWSDAFSLDVASGLGAPLEGVLVELEVLPAAIPLEAQNFSVPEGGSLTLAPPLLRVSGPYFPTLLGLSLQVLEPPQHGALQKEDGPQARTLSAFSWRMVEEQLIRYVHDGSETLTDSFVLMANASEMDRQSHPVAFTVTVLPVNDQPPILTTNTGLQMWEGATAPIPAEALRSTDGDSGSEDLVYTIEQPSNGRVVLRGAPGTEVRSFTQAQLDGGLVLFSHRGTLDGGFRFRLSDGEHTSPGHFFRVTAQKQVLLSLKGSQTLTVCPGSVQPLSSQTLRASSSAGTDPQLLLYRVVRGPQLGRLFHAQQDSTGEALVNFTQAEVYAGNILYEHEMPPEPFWEAHDTLELQLSSPPARDVAATLAVAVSFEAACPQRPSHLWKNKGLWVPEGQRARITVAALDASNLLASVPSPQRSEHDVLFQVTQFPSRGQLLVSEEPLHAGQPHFLQSQLAAGQLVYAHGGGGTQQDGFHFRAHLQGPAGASVAGPQTSEAFAITVRDVNERPPQPQASVPLRLTRGSRAPISRAQLSVVDPDSAPGEIEYEVQRAPHNGFLSLVGGGLGPVTRFTQADVDSGRLAFVANGSSVAGIFQLSMSDGASPPLPMSLAVDILPSAIEVQLRAPLEVPQALGRSSLSQQQLRVVSDREEPEAAYRLIQGPQYGHLLVGGRPTSAFSQFQIDQGEVVFAFTNFSSSHDHFRVLALARGVNASAVVNVTVRALLHVWAGGPWPQGATLRLDPTVLDAGELANRTGSVPRFRLLEGPRHGRVVRVPRARTEPGGSQLVEQFTQQDLEDGRLGLEVGRPEGRAPGPAGDSLTLELWAQGVPPAVASLDFATEPYNAARPYSVALLSVPEAARTEAGKPESSTPTGEPGPMASSPEPAVAKGGFLSFLEANMFSVIIPMCLVLLLLALILPLLFYLRKRNKTGKHDVQVLTAKPRNGLAGDTETFRKVEPGQAIPLTAVPGQGPPPGGQPDPELLQFCRTPNPALKNGQYWV

SEQ ID NO: 44178 - protein, 19 aa, Homo sapiens
MPSPWDCDPRNCSDSNGIR

SEQ ID NO: 44179 - protein, 900 aa, Homo sapiens
MNILDWKTKQSNVEVPFFPARVLLQDFTGIPAMVDFAAMREAVKTLGGDPEKVHPACPTDLTVDHSLQIDFSKCAIQNAPNPGGGDLQKAGKLSPLKVQPKKLPCRGQTTCRGSCDSGELGRNSGTFSSQIENTPILCPFHLQPVPEPETVLKNQEVEFGRNRERLQFFKWSSRVFKNVAVIPPGTGMAHQINLEYLSRVVFEEKDLLFPDSVVGTDSHITMVNGLGILGWGVGGIETEAVMLGLPVSLTLPEVVGCELTGSSNPFVTSIDVVLGITKHLRQVGVAGKFVEFFGSGVSQLSIVDRTTIANMCPEYGAILSFFPVDNVTLKHLEHTGFSKAKLESMETYLKAVKLFRNDQNSSGEPEYSQVIQINLNSIVPSVSGPKRPQDRVAVTDMKSDFQACLNEKVGFKGFQIAAEKQKDIVSIHYEGSEYKLSHGSVVIAAVISCTNNCNPSVMLAAGLLAKKAVEAGLRVKPYIRTSLSPGSGMVTHYLSSSGVLPYLSKLGFEIVGYGCSICVGNTAPLSDAVLNAVKQGDLVTCGILSGNKNFEGRLCDCVRANYLASPPLVVAYAIAGTVNIDFQTEPLGTDPTGKNIYLHDIWPSREEVHRVEEEHVILSMFKALKDKIEMGNKRWNSLEAPDSVLFPWDLKSTYIRCPSFFDKLTKEPIALQAIENAHVLLYLGDSVTTDHISPAGSIARNSAAAKYLTNRGLTPREFNSYGARRGNDAVMTRGTFANIKLFNKFIGKPAPKTIHFPSGQTLDVFEAAELYQKEGIPLIILAGKKYGSGNSRDWAAKGPYLLGVKAVLAESYEKIHKDHLIGIGIAPLQFLPGENADSLGLSGRETFSLTFPEELSPGITLNIQTSTGKVFSVIASFEDDVEITLYKHGGLLNFVARKFS

SEQ ID NO: 44180 - protein, 835 aa, Homo sapiens
MVAADIVTIFNLIQMNGGAAKEKLPTGRQKVRKKEASFESCRSDTEICNAAECEPLNCELSERSFSRGYPIRQSSKCRKMDCKDCPQFVPASEPNFLLGVSKEVKNRAASLDRLQALAPYSVTSPQPCEMQRTYFPMNIENESISDQDSLPINQSIKETFISNEEPFVVQSCVQKRNIFKEDFHNLMAVSPSLVGPISKAENEHREPQSRKEPHKPPFFNHSFEMPYNSQYLNPVYSPVPDKRRAKHESLDDLQASTYFGPTPVMGTQEARRCLGKPNKQTPWPAKSWSLNTEEVPDFERSFFNRNPSEEKLHYPNASSQTPNFPAPERRPTYLVPKDQQPILPIAYAAKQNGLKSKEISSPVDLEKHEPVKKFKDKSINCTSGQLSSDTSSVGTQTEHVLEPKKCRDLCTSGQGKYSDRHTMKHSDDDSEIVSDDISDIFRFLDDMSISGSTGVIQSSCYNSTGSLSQLHKSDCDSSPEHNLTKIANGVPNSKGDKGNRPENTHHSEEELKTSVCKLVLRIGEIERKLESLSGVRDEISQVLGKLNKLDQKMQQPEKVSVQIDLNSLTSEGPSDDSASPRMFHAHSGSHGPKLENNPDWCCSDASGSNSESLRVKALKKSLFTRPSSRSLTEENSATESKIASISNSPRDWRTITYTNRVGLNEEEIKDTGPGDNKDWHRKSKEADRQYDIPPQHRLPKQPKDGFLVEQVFSPHPYPASLKAHMKSNPLYTDMRLTELAEVKRGQPSWTIEEYARNAGDKGKLTALDLQTQESLNPNNLEYWMEDIYTPGYDSLLKRKEAEFRRAKVCKIAALIAAAACTVILVIVVPICTMKS

SEQ ID NO: 44181 - protein, 773 aa, Homo sapiens
MVAADIVTIFNLIQMNGGAAKEKLPTGRQKVRKKEASFESCRSDTEICNAAECEPLNCELSERSFSRGYPIRQSSKCRKMDCKDCPQFVPASEPNFLLGVSKEVKNRAASLDRLQALAPYSVTSPQPCEMQRTYFPMNIENESISDQDSLPINQSIKETFISNEEPFVVQSCVQKRNIFKEDFHNLMAVSPSLVGPISKAENEHREPQSRKEPHKPPFFNHSFEMPYNSQYLNPVYSPVPDKRRAKHESLDDLQASTYFGPTPVMGTQEARRCLGKPNKQTPWPAKSWSLNTEEVPDFERSFFNRNPSEEKLHYPNASSQTPNFPAPERRPTYLVPKDQQPILPIAYAAKQNGLKSKEISSPVDLEKHEPVKKFKDKSINCTSGQLSSDTSSVGTQTEHVLEPKKCRDLCTSGQGKYSDRHTMKHSDDDSEIVSDDISDIFRFLDDMSISGSTGVIQSSCYNSTGSLSQLHKSDCDSSPEHNLTKIANGVPNSKGDKGNRPENTHHSEEELKTSVCKLVLRIGEIERKLESLSGVRDEISQVLGKLNKLDQKMQQPEKVSVQIDLNSLTSEGPSDDSASPRMFHAHSGSHGPKLENNPDWCCSDASGSNSESLRVKALKKSLFTRPSSRSLTEENSATESKIASISNSPRDWRTITYTNRVGLNEEEIKDTGPGDNKDWHRKSKEADRQYDIPPQHRLPKQPKDGFLVEQVFSPHPYPASLKAHMKSNPLYTDMRLTELAEVKRGQPSWTIEEYARNAGDKGKLTALDLQHVG

SEQ ID NO: 44182 - protein, 180 aa, Homo sapiens [sequence omitted]

SEQ ID NO: 44183 - protein, 124 aa, Homo sapiens
MQPSPVSNQSLLSESVASSQLDSTSVDKAVPETEDVQASVSDTAQQPSEEQSKSLEKPKQKKNRCFMCRKKVGLTGFECRCGNVYCGVHRYSDVHNCSYNYKADAAEKIRKENPVVVGEKIQKI

SEQ ID NO: 44184 - protein, 349 aa, Homo sapiens
MGLGQAAWKEARVFLQNLLSVSQARLRDDTELRKCAFISQASATMHLPATIGDYTDFYSSRQHATNVGIMFRDKENALMPNWLHLPVGYHGRASSVVVSGTPIRRPMGQMKPDDSKPPVYGACKLLDMELEMAFFVGPGNRLGEPIPISKAHEHIFGMVLMNDWSARDIQKWEYVPLGPFLGKSFGTTVSPWVVPMDALMPFAVPNPKQDPRPLPYLCHDEPYTFDINLSVNLKGEGMSQAATICKSNFKYMYWTMLQQLTHHSVNGCNLRPGDLLASGTISGPEPENFGSMLELSWKGTKPIDLGNGQTRKFLLDGDEVIITGYCQGDGYRIGFGQCAGKVLPALLPS

SEQ ID NO: 44185 - protein, 459 aa, Homo sapiens [sequence omitted]

SEQ ID NO: 44186 - protein, 458 aa, Homo sapiens
MRKRFRNGLGPVKEGEAQYAVVHCTGYIKAWPPAGMTIPEEDADVGQGSKYCLVAIGRLQVTSSPVCMDMNGMSVPTEFLSRHNSDGIITFVDPRCISVIGYQPQDLLGKDILEFCHPEDQSHLRESFQQVVKLKGQVLSVMYRFRTKNREWMLIRTSSFTFQNPYSDEIEYIICTNTNVKQLQQQQAELEVHQRDGLSSYDLSQVPVPNLPAGVHEAGKSVEKADAIFSQERDPRFAEMFAGISASEKKMMSSASAAGTQQIYSQGSPFPSGHSGKAFSSSVVHVPGVNDIQSSSSTGQNMSQISRQLNQSQVAWTGSRPPFPGQQIPSQSSKTQSSPFGIGTSHTYPADPSSYSPLSSPATSSPSGNAYSSLANRTPGFAESGQSSGQFQGRPSEVWSQWQSQHHGQQSGEQHSHQQPGQTEVFQDMLPMPGDPRNEWWSPHSRQHFRQPISYARM

SEQ ID NO: 44187 - protein, 106 aa, Homo sapiens
MKLISPRDFVDLVLVKRYEDGTISSNATHVEHPLCPPKPGFVRGFNHPCGCFCEPLPGEPTKTNLVTFFHTDLSGYLPQNVVDSFFPRSMTRFYANLQKAVKQFHE

SEQ ID NO: 44188 - protein, 78 aa, Homo sapiens
MWASICIMGPAGPAQAASGASPPPASRPPPAASLSLATATTAPARLAVLPQTLISAAGPAAAQRLPSAWRTTAPLAPP

SEQ ID NO: 44189 - protein, 530 aa, Homo sapiens
MLHNPLGNVLGKPPLSFLPLDPLGSDLVDKFPAPSVRGSRLDTRPILDSRSSSPSDSDTSGFSSGSDHLSDLISSLRISPPLPFLSLSGGGPRDPLKMGVGSRMDQEQAALAAVTPSPTSASKRWPGASVWPSWDLLEAPKDPFSIEREARLHRQAAAVNEATCTWSGQLPPRNYKNPIYSCKVFLGGVPWDITEAGLVNTFRVFGSLSVEWPGKDGKHPRCPPKGYVYLVFELEKSVRSLLQACSHDPLSPDGLSEYYFKMSSRRMRCKEVQVIPWVLADSNFVRSPSQRLDPSRTVFVGALHGMLNAEALAAILNDLFGGVVYAGIDTDKHKYPIGSGRVTFNNQRSYLKAVSAAFVEIKTTKFTKKVQIDPYLEDSLCHICSSQPGPFFCRDQGRVRTKTVKKAARVIIEKYYTRLGNDFHTNKRVCEEIAIIPSKKLRNKIAGYVTHLMKRIQRGPVRGISIKLQEEERERRDNYVPEVSALDQEIIEVDPDTKEMLKLLDFGSLSNLQVTQPTVGMNFKTPRGPV

SEQ ID NO: 44190 - protein, 964 aa, Homo sapiens
MAEAISCTLNCSCQSFKPGKINHRQCDQCKHGWVAHALSKLRIPPMYPTSQVEIVQSNVVFDISSLMLYGTQAIPVRLKILLDRLFSVLKQDEVLQILHALDWTLQDYIRGYVLQDASGKVLDHWSIMTSEEEVATLQQFLRFGETKSIVELMAIQEKEEQSIIIPPSTANVDIRAFIESCSHRSSSLPTPVDKGNPSSIHPFENLISNMTFMLPFQFFNPLPPALIGSLPEQYMLEQGHDQSQDPKQEVHGPFPDSSFLTSSSTPFQVEKDQCLNCPDAITKKEDSTHLSDSSSYNIVTKFERTQLSPEAKVKPERNSLGTKKGRVFCTACEKTFYDKGTLKIHYNAVHLKIKHKCTIEGCNMVFSSLRSRNRHSANPNPRLHMPMNRNNRDKDLRNSLNLASSENYKCPGFTVTSPDCRPPPSYPGSGEDSKGQPAFPNIGQNGVLFPNLKTVQPVLPFYRSPATPAEVANTPGILPSLPLLSSSIPEQLISNEMPFDALPKKKSRKSSMPIKIEKEAVEIANEKRHNLSSDEDMPLQVVSEDEQEACSPQSHRVSEEQHVQSGGLGKPFPEGERPCHRESVIESSGAISQTPEQATHNSERETEQTPALIMVPREVEDGGHEHYFTPGMEPQVPFSDYMELQQRLLAGGLFSALSNRGMAFPCLEDSKELEHVGQHALARQIEENRFQCDICKKTFKNACSVKIHHKNMHVKEMHTCTVEGCNATFPSRRSRDRHSSNLNLHQKALSQEALESSEDHFRAAYLLKDVAKEAYQDVAFTQQASQTSVIFKGTSRMGSLVYPITQVHSASLESYNSGPLSEGTILDLSTTSSMKSESSSHSSWDSDGVSEEGTVLMEDSDGNCEGSSLVPGEDEYPICVLMEKADQSLASLPSGLPITCHLCQKTYSNKGTFRAHYKTVHLRQLHKCKVPGCNTMFSSVRSRNRHSQNPNLHKSLASSPSHLQ

SEQ ID NO: 44191 - protein, 982 aa, Homo sapiens
MFFSFKASLCGCGAATAPSLTAISCTLNCSCQSFKPGKINHRQCDQCKHGWVAHALSKLRIPPMYPTSQVEIVQSNVVFDISSLMLYGTQAIPVRLKILLDRLFSVLKQDEVLQILHALDWTLQDYIRGYVLQDASGKVLDHWSIMTSEEEVATLQQFLRFGETKSIVELMAIQEKEEQSIIIPPSTANVDIRAFIESCSHRSSSLPTPVDKGNPSSIHPFENLISNMTFMLPFQFFNPLPPALIGSLPEQYMLEQGHDQSQDPKQEVHGPFPDSSFLTSSSTPFQVEKDQCLNCPDAITKKEDSTHLSDSSSYNIVTKFERTQLSPEAKVKPERNSLGTKKGRVFCTACEKTFYDKGTLKIHYNAVHLKIKHKCTIEGCNMVFSSLRSRNRHSANPNPRLHMPMNRNNRDKDLRNSLNLASSENYKCPGFTVTSPDCRPPPSYPGSGEDSKGQPAFPNIGQNGVLFPNLKTVQPVLPFYRSPATPAEVANTPGILPSLPLLSSSIPEQLISNEMPFDALPKKKSRKSSMPIKIEKEAVEIANEKRHNLSSDEDMPLQVVSEDEQEACSPQSHRVSEEQHVQSGGLGKPFPEGERPCHRESVIESSGAISQTPEQATHNSERETEQTPALIMVPREVEDGGHEHYFTPGMEPQVPFSDYMELQQRLLAGGLFSALSNRGMAFPCLEDSKELEHVGQHALARQIEENRFQCDICKKTFKNACSVKIHHKNMHVKEMHTCTVEGCNATFPSRRSRDRHSSNLNLHQKALSQEALESSEDHFRAAYLLKDVAKEAYQDVAFTQQASQTSVIFKGTSRMGSLVYPITQVHSASLESYNSGPLSEGTILDLSTTSSMKSESSSHSSWDSDGVSEEGTVLMEDSDGNCEGSSLVPGEDEYPICVLMEKADQSLASLPSGLPITCHLCQKTYSNKGTFRAHYKTVHLRQLHKCKVPGCNTMFSSVRSRNRHSQNPNLHKSLASSPSHLQ

SEQ ID NO: 44192 - protein, 1675 aa, Homo sapiens
MHSPLPQTTAEKSPGAYFLPEFALSPQGSFLEDTTGEQFLTYRYDDQTSRNTRSDEDKDGNWDAWGDWSDCSRTCGGGASYSLRRCLTGRNCEGQNIRYKTCSNHDCPPDAEDFRAQQCSAYNDVQYQGHYYEWLPRYNDPAAPCALKCHAQGQNLVVELAPKVLDGTRCNTDSLDMCISGICQAVGCDRQLGSNAKEDNCGVCAGDGSTCRLVRGQSKSHVSPEKREENVIAVPLGSRSVRITVKGPAHLFIESKTLQGSKGEHSFNSPGVFLVENTTVEFQRGSERQTFKIPGPLMADFIFKTRYTAAKDSVVQFFFYQPISHQWRQTDFFPCTVTCGGGYQLNSAECVDIRLKRVVPDHYCHYYPENVKPKPKLKECSMDPCPSSDGFKEIMPYDHFQPLPRWEHNPWTACSVSCGGGIQRRSFVCVEESMHGEILQVEEWKCMYAPKPKVMQTCNLFDCPKWIAMEWSQCTVTCGRGLRYRVVLCINHRGEHVGGCNPQLKLHIKEECVIPIPCYKPKEKSPVEAKLPWLKQAQELEETRIATEEPTFIPEPWSACSTTCGPGVQVREVKCRVLLTFTQTETELPEEECEGPKLPTERPCLLEACDESPASRELDIPLPEDSETTYDWEYAGFTPCTATCVGGHQEAIAVCLHIQTQQTVNDSLCDMVHRPPAMSQACNTEPCPPRWHVGSWGPCSATCGVGIQTRDVYCLHPGETPAPPEECRDEKPHALQACNQFDCPPGWHIEEWQQCSRTCGGGTQNRRVTCRQLLTDGSFLNLSDELCQGPKASSHKSCARTDCPPHLAVGDWSKCSVSCGVGIQRRKQVCQRLAAKGRRIPLSEMMCRDLPGLPLVRSCQMPECSKIKSEMKTKLGEQGPQILSVQRVYIQTREEKRINLTIGSRAYLLPNTSVIIKCPVRRFQKSLIQWEKDGRCLQNSKRLGITKSGSLKIHGLAAPDIGVYRCIAGSAQETVVLKLIGTDNRLIARPALREPMREYPGMDHSEANSLGVTWHKMRQMWNNKNDLYLDDDHISNQPFLRALLGHCSNSAGSTNSWELKNKQFEAAVKQGAYSMDTAQFDELIRNMSQLMETGEVSDDLASQLIYQLVAELAKAQPTHMQWRGIQEETPPAAQLRGETGSVSQSSHAKNSGKLTFKPKGPVLMRQSQPPSISFNKTINSRIGNTVYITKRTEVINILCDLITPSEATYTWTKDGTLLQPSVKIILDGTGKIQIQNPTRKEQGIYECSVANHLGSDVESSSVLYAEAPVILSVERNITKPEHNHLSVVVGGIVEAALGANVTIRCPVKGVPQPNITWLKRGGSLSGNVSLLFNGSLLLQNVSLENEGTYVCIATNALGKAVATSVLHLLERRWPESRIVFLQGHKKYILQATNTRTNSNDPTGEPPPQEPFWEPGNWSHCSATCGHLGARIQRPQCVMANGQEVSEALCDHLQKPLAGFEPCNIRDCPARWFTSVWSQCSVSCGEGYHSRQVTCKRTKANGTVQVVSPRACAPKDRPLGRKPCFGHPCVQWEPGNRCPGRCMGRAVRMQQRHTACQHNSSDSNCDDRKRPTLRRNCTSGACDVCWHTGPWKPCTAACGRGFQSRKVDCIHTRSCKPVAKRHCVQKKKPISWRHCLGPSCDRDCTDTTHYCMFVKHLNLCSLDRYKQRCCQSCQEG

SEQ ID NO: 44193 - protein, 167 aa, Homo sapiens
MNKRQLYYQVLNFGMIVSSALMIWKGLMVITGSESPIVVVLSGSMEPAFHRGDLLFLTNRVEDPIRVGEIVVFRIEGREIPIVHRVLKIHEKQNGHIKFLTKGDNNAVDDRGLYKQGQHWLEKKDVVGRARGFVPYIGIVTILMNDYPKFKYAVLFLLGLFVLVHRE

SEQ ID NO: 44194 - protein, 1264 aa, Homo sapiens [sequence omitted]

SEQ ID NO: 44195 - protein, 2650 aa, Homo sapiens
MHFAVRLGLLRLTWFLLQKPGGRGALSIHNQEGATPVSLALERGYHKLHQLLTEENAGEPDSWSSLSYEIPYGDCSVRHHRELDIYTLTSESDSHHEHPFPGDGCTGPIFKLMNIQQQLMKTNLKQMDSLMPLMMTAQDPSSAPETDGQFLPCAPEPTDPQRLSSSEETESTQCCPGSPVAQTESPCDLSSIVEEENTDRSCRKKNKGVERKGEEVEPAPIVDSGTVSDQDSCLQSLPDCGVKGTEGLSSCGNRNEETGTKSSGMPTDQESLSSGDAVLQRDLVMEPGTAQYSSGGELGGISTTNVSTPDTAGEMEHGLMNPDATVWKNVLQGGESTKERFENSNIGTAGASDVHVTSKPVDKISVPNCAPAASSLDGNKPAESSLAFSNEETSTEKTAETETSRSREESADAPVDQNSVVIPAAAKDKISDGLEPYTLLAAGIGEAMSPSDLALLGLEEDVMPHQNSETNSSHAQSQKGKSSPICSTTGDDKLCADSACQQNTVTSSGDLVAKLCDNIVSESESTTARQPSSQDPPDASHCEDPQAHTVTSDPVRDTQERADFCPFKVVDNKGQRKDVKLDKPLTNMLEVVSHPHPVVPKMEKELVPDQAVISDSTFSLANSPGSESVTKDDALSFVPSQKEKGTATPELHTATDYRDGPDGNSNEPDTRPLEDRAVGLSTSSTAAELQHGMGNTSLTGLGGEHEGPAPPAIPEALNIKGNTDSSLQSVGKATLALDSVLTEEGKLLVVSESSAAQEQDKDKAVTCSSIKENALSSGTLQEEQRTPPPGQDTQQFHEKSISADCAKDKALQLSNSPGASSAFLKAETEHNKEVAPQVSLLTQGGAAQSLVPPGASLATESRQEALGAEHNSSALLPCLLPDGSDGSDALNCSQPSPLDVGVKNTQSQGKTSACEVSGDVTVDVTGVNALQGMAEPRRENISHNTQDILIPNVLLSQEKNAVLGLPVALQDKAVTDPQGVGTPEMIPLDWEKGKLEGADHSCTMGDAEEAQIDDEAHPVLLQPVAKELPTDMELSAHDDGAPAGVREVMRAPPSGRERSTPSLPCMVSAQDAPLPKGADLIEEAASRIVDAVIEQVKAAGALLTEGEACHMSLSSPELGPLTKGLESAFTEKVSTFPPGESLPMGSTPEEATGSLAGCFAGREEPEKIILPVQGPEPAAEMPDVKAEDEVDFRASSISEEVAVGSIAATLKMKQGPMTQAINRENWCTIEPCPDAASLLASKQSPECENFLDVGLGRECTSKQGVLKRESGSDSDLFHSPSDDMDSIIFPKPEEEHLACDITGSSSSTDDTASLDRHSSHGSDVSLSQILKPNRSRDRQSLDGFYSHGMGAEGRESESEPADPGDVEEEEMDSITEVPANCSVLRSSMRSLSPFRRHSWGPGKNAASDAEMNHRSMSWCPSGVQYSAGLSADFNYRSFSLEGLTGGAGVGNKPSSSLEVSSANAEELRHPFSGEERVDSLVSLSEEDLESDQREHRMFDQQICHRSKQQGFNYCTSAISSPLTKSISLMTISHPGLDNSRPFHSTFHNTSANLTESITEENYNFLPHSPSKKDSEWKSGTKVSRTFSYIKNKMSSSKKSKEKEKEKDKIKEKEKDSKDKEKDKKTVNGHTFSSIPVVGPISCSQCMKPFTNKDAYTCANCSAFVHKGCRESLASCAKVKMKQPKGSLQAHDTSSLPTVIMRNKPSQPKERPRSAVLLVDETATTPIFANRRSQQSVSLSKSVSIQNITGVGNDENMSNTWKFLSHSTDSLNKISKVNESTESLTDEGVGTDMNEGQLLGDFEIESKQLEAESWSRIIDSKFLKQQKKDVVKRQEVIYELMQTEFHHVRTLKIMSGVYSQGMMADLLFEQQMVEKLFPCLDELISIHSQFFQRILERKKESLVDKSEKNFLIKRIGDVLVNQFSGENAERLKKTYGKFCGQHNQSVNYFKDLYAKDKRFQAFVKKKMSSSVVRRLGIPECILLVTQRITKYPVLFQRILQCTKDNEVEQEDLAQSLSLVKDVIGAVDSKVASYEKKVRLNEIYTKTDSKSIMRMKSGQMFAKEDLKRKKLVRDGSVFLKNAAGRLKEVQAVLLTDILVFLQEKDQKYIFASLDQKSTVISLKKLIVREVAHEEKGLFLISMGMTDPEMVEVHASSKEERNSWIQIIQDTINTLNRDEDEGIPSENEEEKKMLDTRARELKEQLHQKDQKILLLLEEKEMIFRDMAECSTPLPEDCSPTHSPRVLFRSNTEEALKGGPLMKSAINEVEILQGLVSGNLGGTLGPTVSSPIEQDVVGPVSLPRRAETFGGFDSHQMNASKGGEKEEGDDGQDLRRTESDSGLKKGGNANLVFMLKRNSEQVVQSVVHLYELLSALQGVVLQQDSYIEDQKLVLSERALTRSLSRPSSLIEQEKQRSLEKQRQDLANLQKQQAQYLEEKRRREREWEARERELREREALLAQREEEVQQGQQDLEKEREELQQKKGTYQYDLERLRAAQKQLEREQEQLRREAERLSQRQTERDLCQVSHPHTKLMRIPSFFPSPEEPPSPSAPSIAKSGSLDSELSVSPKRNSISRTHKDKGPFHILSSTSQTNKGPEGQSQAPASTSASTRLFGLTKPKEKKEKKKKNKTSRSQPGDGPASEVSAEGEEIFC

SEQ ID NO: 44196 - protein, 2646 aa, Homo sapiens
MHFAVRLGLLRLTWFLLQKPGGRGALSIHNQEGATPVSLALERGYHKLHQLLTEENAGEPDSWSSLSYEIPYGDCSVRHHRELDIYTLTSESDSHHEHPFPGDGCTGPIFKLMNIQQQLMKTNLKQMDSLMPLMMTAQDPSSAPETDGQFLPCAPEPTDPQRLSSSEETESTQCCPGSPVAQTESPCDLSSIVEEENTDRSCRKKNKGVERKGEEVEPAPIVDSGTVSDQDSCLQSLPDCGVKGTEGLSSCGNRNEETGTKSSGMPTDQESLSSGDAVLQRDLVMEPGTAQYSSGGELGGISTTNVSTPDTAGEMEHGLMNPDATVWKNVLQGGESTKERFENSNIGTAGASDVHVTSKPVDKISVPNCAPAASSLDGNKPAESSLAFSNEETSTEKTAETETSRSREESADAPVDQNSVVIPAAAKDKISDGLEPYTLLAAGIGEAMSPSDLALLGLEEDVMPHQNSETNSSHAQSQKGKSSPICSTTGDDKLCADSACQQNTVTSSGDLVAKLCDNIVSESESTTARQPSSQDPPDASHCEDPQAHTVTSDPVRDTQERADFCPFKVVDNKGQRKDVKLDKPLTNMLEVVSHPHPVVPKMEKELVPDQAVISDSTFSLANSPGSESVTKDDALSFVPSQKEKGTATPELHTATDYRDGPDGNSNEPDTRPLEDRAVGLSTSSTAAELQHGMGNTSLTGLGGEHEGPAPPAIPEALNIKGNTDSSLQSVGKATLALDSVLTEEGKLLVVSESSAAQEQDKDKAVTCSSIKENALSSGTLQEEQRTPPPGQDTQQFHEKSISADCAKDKALQLSNSPGASSAFLKAETEHNKEVAPQVSLLTQGGAAQSLVPPGASLATESRQEALGAEHNSSALLPCLLPDGSDGSDALNCSQPSPLDVGVKNTQSQGKTSACEVSGDVTVDVTGVNALQGMAEPRRENISHNTQDILIPNVLLSQEKNAVLGLPVALQDKAVTDPQGVGTPEMIPLDWEKGKLEGADHSCTMGDAEEAQIDDEAHPVLLQPVAKELPTDMELSAHDDGAPAGVREVMRAPPSGRERSTPSLPCMVSAQDAPLPKGADLIEEAASRIVDAVIEQVKAAGALLTEGEACHMSLSSPELGPLTKGLESAFTEKVSTFPPGESLPMGSTPEEATGSLAGCFAGREEPEKIILPVQGPEPAAEMPDVKAEDEVDFRASSISEEVAVGSIAATLKMKQGPMTQAINRENWCTIEPCPDAASLLASKQSPECENFLDVGLGRECTSKQGVLKRESGSDSDLFHSPSDDMDSIIFPKPEEEHLACDITGSSSSTDDTASLDRHSSHGSDVSLSQILKPNRSRDRQSLDGFYSHGMGAEGRESESEPADPGDVEEEEMDSITEVPANCSVLRSSMRSLSPFRRHSWGPGKNAASDAEMNHRSSMRVLGDVVRRPPIHRRSFSLEGLTGGAGVGNKPSSSLEVSSANAEELRHPFSGEERVDSLVSLSEEDLESDQREHRMFDQQICHRSKQQGFNYCTSAISSPLTKSISLMTISHPGLDNSRPFHSTFHNTSANLTESITEENYNFLPHSPSKKDSEWKSGTKVSRTFSYIKNKMSSSKKSKEKEKEKDKIKEKEKDSKDKEKDKKTVNGHTFSSIPVVGPISCSQCMKPFTNKDAYTCANCSAFVHKGCRESLASCAKVKMKQPKGSLQAHDTSSLPTVIMRNKPSQPKERPRSAVLLVDETATTPIFANRRSQQSVSLSKSVSIQNITGVGNDENMSNTWKFLSHSTDSLNKISKVNESTESLTDEGVGTDMNEGQLLGDFEIESKQLEAESWSRIIDSKFLKQQKKDVVKRQEVIYELMQTEFHHVRTLKIMSGVYSQGMMADLLFEQQMVEKLFPCLDELISIHSQFFQRILERKKESLVDKSEKNFLIKRIGDVLVNQFSGENAERLKKTYGKFCGQHNQSVNYFKDLYAKDKRFQAFVKKKMSSSVVRRLGIPECILLVTQRITKYPVLFQRILQCTKDNEVEQEDLAQSLSLVKDVIGAVDSKVASYEKKVRLNEIYTKTDSKSIMRMKSGQMFAKEDLKRKKLVRDGSVFLKNAAGRLKEVQAVLLTDILVFLQEKDQKYIFASLDQKSTVISLKKLIVREVAHEEKGLFLISMGMTDPEMVEVHASSKEERNSWIQIIQDTINTLNRDEDEGIPSENEEEKKMLDTRARELKEQLHQKDQKILLLLEEKEMIFRDMAECSTPLPEDCSPTHSPRVLFRSNTEEALKGGPLMKSAINEVEILQGLVSGNLGGTLGPTVSSPIEQDVVGPVSLPRRAETFGGFDSHQMNASKGGEKEEGDDGQDLRRTESDSGLKKGGNANLVFMLKRNSEQVVQSVVHLYELLSALQGVVLQQDSYIEDQKLVLSERALTRSLSRPSSLIEQEKQRSLEKQRQDLANLQKQQAQYLEEKRRREREWEARERELREREALLAQREEEVQQGQQDLEKEREELQQKKGTYQYDLERLRAAQKQLEREQEQLRREAERLSQRQTERDLCQVSHPHTKLMRIPSFFPSPEEPPSPSAPSIAKSGSLDSELSVSPKRNSISRTHKDKGPFHILSSTSQTNKGPEGQSQAPASTSASTRLFGLTKPKEKKEKKKKNKTSRSQPGDGPASEVSAEGEEIFC

SEQ ID NO: 44197 - protein, 203 aa, Homo sapiens
MIEIERSLYSDHELRALDENQRLAKKKADLHDEEDEQDILLAQDLEDMWEQKFLQFKLGARITADEKNDRTSLNRKLDRNLVLLVREKFGDQDVWILPQAEWQPGETLRGTAERTLATLSENNMEAKFLGNAPCGHYTFKFPQAMRTESNLGAKVFFFKALLLTGDFSQAGNKGHHVWVTKDELGDYLKPKYLAQVRRFVSDL

SEQ ID NO: 44198 - protein, 60 aa, Homo sapiens
MQAVRNAGSRFLRSWTWPQTAGVVARTPAGTICTGARQLQDAAAKQKVEQNAAPSHTKFR

SEQ ID NO: 44199 - protein, 1124 aa, Homo sapiens
MNLQEIPPLVYQLLVLSSKGSRKSVLEGIIAFFSALDKQHNEEQSGDELLDVVTVPSGELRHVEGTIILHIVFAIKLDYELGRELVKHLKVGQQGDSNNNLSPFSIALLLSVTRIQRFQDQVLDLLKTSVVKSFKDLQLLQGSKFLQNLVPHRSYVSTMILEVVKNSVHSWDHVTQGLVELGFILMDSYGPKKVLDGKTIETSPSLSRMPNQHACKLGANILLETFKIHEMIRQEILEQVLNRVVTRASSPISHFLDLLSNIVMYAPLVLQSCSSKVTEAFDYLSFLPLQTVQRLLKAVQPLLKVSMSMRDCLILVLRKAMFANQLDARKSAVAGFLLLLKNFKVLGSLSSSQCSQSLSVSQVHVDVHSHYNSVANETFCLEIMDSLRRCLSQQADVRLMLYEGFYDVLRRNSQLANSVMQTLLSQLKQFYEPKPDLLPPLKLEACILTQGDKISLQEPLDYLLCCIQHCLAWYKNTVIPLQQGEEEEEEEEAFYEDLDDILESITNRMIKSELEDFELDKSADFSQSTSIGIKNNICAFLVMGVCEVLIEYNFSISSFSKNRFEDILSLFMCYKKLSDILNEKAGKAKTKMANKTSDSLLSMKFVSSLLTALFRDSIQSHQESLSVLRSSNEFMRYAVNVALQKVQQLKETGHVSGPDGQNPEKIFQNLCDITRVLLWRYTSIPTSVEESGKKEKGKSISLLCLEGLQKIFSAVQQFYQPKIQQFLRALDVTDKEGEEREDADVSVTQRTAFQIRQFQRSLLNLLSSQEEDFNSKEALLLVTVLTSLSKLLEPSSPQFVQMLSWTSKICKENSREDALFCKSLMNLLFSLHVSYKSPVILLRDLSQDIHGHLGDIDQDVEVEKTNHFAIVNLRTAAPTVCLLVLSQAEKVLEEVDWLITKLKGQVSQETLSEEASSQATLPNQPVEKAIIMQLGTLLTFFHELVQTALPSGSCVDTLLKDLCKMYTTLTALVRYYLQVCQSSGGIPKNMEKLVKLSGSHLTPLCYSFISYVQNKSKSLNYTGEKKEKPAAVATAMARVLRETKPIPNLIFAIEQYEKFLIHLSKKSKVNLMQHMKLSTSRDFKIKGNILDMVLREDGEDENEEGTASEHGGQNKEPAKKKRKK

SEQ ID NO: 44200 - protein, 1162 aa, Homo sapiens
MLSRGLHEQIFGQGGEMPGEAAVRRSVEHLQKHGLWGQPAVPLPDVELRLPPLYGDNLDQHFRLLAQKQSLPYLEAANLLLQAQLPPKPPAWAWAEGWTRYGPEGEAVPVAIPEERALVFDVEVCLAEGTCPTLAVAISPSAWYSWCSQRLVEERYSWTSQLSPADLIPLEVPTGASSPTQRDWQEQLVVGHNVSFDRAHIREQYLIQGSRMRFLDTMSMHMAISGLSSFQRSLWIAAKQGKHKVQPPTKQGQKSQRKARRGPAISSWDWLDISSVNSLAEVHRLYVGGPPLEKEPRELFVKGTMKDIRENFQDLMQYCAQDVWATHEVFQQQLPLFLERCPHPVTLAGMLEMGVSYLPVNQNWERYLAEAQGTYEELQREMKKSLMDLANDACQLLSGERYKEDPWLWDLEWDLQEFKQKKAKKVKKEPATASKLPIEGAGAPGDPMDQEDLGPCSEEEEFQQDVMARACLQKLKGTTELLPKRPQHLPGHPGWYRKLCPRLDDPAWTPGPSLLSLQMRVTPKLMALTWDGFPLHYSERHGWGYLVPGRRDNLAKLPTGTTLESAGVVCPYRAIESLYRKHCLEQGKQQLMPQEAGLAEEFLLTDNSAIWQTVEELDYLEVEAEAKMENLRAAVPGQPLALTARGGPKDTQPSYHHGNGPYNDVDIPGCWFFKLPHKDGNSCNVGSPFAKDFLPKMEDGTLQAGPGGASGPRALEINKMISFWRNAHKRISSQMVVWLPRSALPRAVIRHPDYDEEGLYGAILPQVVTAGTITRRAVEPTWLTASNARPDRVGSELKAMVQAPPGYTLVGADVDSQELWIAAVLGDAHFAGMHGCTAFGWMTLQGRKSRGTDLHSKTATTVGISREHAKIFNYGRIYGAGQPFAERLLMQFNHRLTQQEAAEKAQQMYAATKGLRWYRLSDEGEWLVRELNLPVDRTEGGWISLQDLRKVQRETARKSQWKKWEVVAERAWKGGTESEMFNKLESIATSDIPRTPVLGCCISRALEPSAVQEEFMTSRVNWVVQSSAVDYLHLMLVAMKWLFEEFAIDGRFCISIHDEVRYLVREEDRYRAALALQITNLLTRCMFAYKLGLNDLPQSVAFFSAVDIDRCLRKEVTMDCKTPSNPTGMERRYGIPQGEALDIYQIIELTKGSLEKRSQPGP

SEQ ID NO: 44201 - protein, 438 aa, Homo sapiens
MRFLDTMSMHMAISGLSSFQRSLWIAAKQGKHKVQPPTKQGQKSQRKARRGPAISSWDWLDISSVNSLAEVHRLYVGGPPLEKEPRELFVKGTMKDIRENFQDLMQYCAQDVWATHEVFQQQLPLFLERCPHPVTLAGMLEMGVSYLPVNQNWERYLAEAQGTYEELQREMKKSLMDLANDACQLLSGERYKEDPWLWDLEWDLQEFKQKKAKKVKKEPATASKLPIEGAGAPGDPMDQEDLGPCSEEEEFQQDVMARACLQKLKGTTELLPKRPQHLPGHPGWYRKLCPRLDDPAWTPGPSLLSLQMRVTPKLMALTWDGFPLHYSERHGWGYLVPGRRDNLAKLPTGTTLESAGVVCPYRAIESLYRKHCLEQGKQQLMPQEAGLAEEFLLTDNSAIWQTVEELDYLEVEAEAKMENLRAAVPGQPLALVLEQGLI

SEQ ID NO: 44202 - protein, 108 aa, Homo sapiens
MPESEMEVMELELGAGVRLKTRGDGPFLDSLAKLEAGTVTKCNFTGDGKTGASWTDNIMAQKCSKGAAAEIREQGDGAEDEEWVGTWCWCSCISWQEHGTYWLRLWVG

SEQ ID NO: 44203 - protein, 832 aa, Homo sapiens
MGLRSWLAAPWGALPPRPPLLLLLLLLLLLQPPPPTWALSPRISLPLGSEERPFLRFEAEHISNYTALLLSRDGRTLYVGAREALFALSSNLSFLPGGEYQELLWGADAEKKQQCSFKGKDPQRDCQNYIKILLPLSGSHLFTCGTAAFSPMCTYINMENFTLARDEKGNVLLEDGKGRCPFDPNFKSTALVVDGELYTGTVSSFQGNDPAISRSQSLRPTKTESSLNWLQDPAFVASAYIPESLGSLQGDDDKIYFFFSETGQEFEFFENTIVSRIARICKGDEGGERVLQQRWTSFLKAQLLCSRPDDGFPFNVLQDVFTLSPSPQDWRDTLFYGVFTSQWHRGTTEGSAVCVFTMKDVQRVFSGLYKEVNRETQQWYTVTHPVPTPRPGACITNSARERKINSSLQLPDRVLNFLKDHFLMDGQVRSRMLLLQPQARYQRVAVHRVPGLHHTYDVLFLGTGDGRLHKAVSVGPRVHIIEELQIFSSGQPVQNLLLDTHRGLLYAASHSGVVQVPMANCSLYRSCGDCLLARDPYCAWSGSSCKHVSLYQPQLATRPWIQDIEGASAKDLCSASSVVSPSFVPTGEKPCEQVQFQPNTVNTLACPLLSNLATRLWLRNGAPVNASASCHVLPTGDLLLVGTQQLGEFQCWSLEEGFQQLVASYCPEVVEDGVADQTDEGGSVPVIISTSRVSAPAGGKASWGADRSYWKEFLVMCTLFVLAVLLPVLFLLYRHRNSMKVFLKQGECASVHPKTCPVVLPPETRPLNGLGPPSTPLDHRGYQSLSDSPPGSRVFTESEKRPLSIQDSFVEVSPVCPRPRVRLGSEIRDSVV

SEQ ID NO: 44204 - protein, 336 aa, Homo sapiens
MKKAGRCYFSSARIRLTSQGQASRRLEAINRVLAGSVPPTLTPKQGYFLQPERVASDSWTECTLPSMVNSEHRAAKVPLCPASAPMLQRSRALLNINQFSTLKRQKQAIRFQKIRRQMEAPGAPPRTLTWEAMEQIRYLHEEFPESWSVPRLAEGFDVSTDVIRRVLKSKFLPTLEQKLKQDQKVLKKAGLAHSLQHLRGSGNTSKLLPAGHSVSGSLLMPGHEASSKDPNHSTALKVIESDTHRTNTPRRRKGRNKEIQDLEESFVPVAAPLGHPRELQKYSSDSESPRGTGSGALPSGQKLEELKAEEPDNFSSKVVQRGREFFDSNGNFLYRI

SEQ ID NO: 44205 - protein, 1627 aa, Homo sapiens [sequence omitted]

SEQ ID NO: 44206 - protein, 569 aa, Homo sapiens [sequence omitted]

SEQ ID NO: 44207 - protein, 772 aa, Homo sapiens
MSLQDSGGQSRAISPDSPISQSWAEITSQTEGLSRLLRQHAEDLNSGPLSKLSLLIRERQQLRKTYSEQWQQLQQELTKTHSQDIEKLKSQYRALARDSAQAKRKYQEASKDKDRDKAKDKYVRSLWKLFAHHNRYVLGVRAAQLHHQHHHQLLLPGLLRSLQDLHEEMACILKEILQEYLEISSLVQDEVVAIHREMAAAAARIQPEAEYQGFLRQYGSAPDVPPCVTFDESLLEEGEPLEPGELQLNELTVESVQHTLTSVTDELAVATEMVFRRQEMVTQLQQELRNEEENTHPRERVQLLGKRQVLQEALQGLQVALCSQAKLQAQQELLQTKLEHLGPGEPPPVLLLQDDRHSTSSSEQEREGGRTPTLEILKSHISGIFRPKFSLPPPLQLIPEVQKPLHEQLWYHGAIPRAEVAELLVHSGDFLVRESQGKQEYVLSVLWDGLPRHFIIQSLDNLYRLEGEGFPSIPLLIDHLLSTQQPLTKKSGVVLHRAVPKDKWVLNHEDLVLGEQIGRGNFGEVFSGRLRADNTLVAVKSCRETLPPDLKAKFLQEARILKQYSHPNIVRLIGVCTQKQPIYIVMELVQGGDFLTFLRTEGARLRVKTLLQMVGDAAAGMEYLESKCCIHRDLAARNCLVTEKNVLKISDFGMSREEADGVYAASGGLRQVPVKWTAPEALNYGRYSSESDVWSFGILLWETFSLGASPYPNLSNQQTREFVEKGGRLPCPELCPDAVFRLMEQCWAYEPGQRPSFSTIYQELQSIRKRHR

SEQ ID NO: 44208 - protein, 497 aa, Homo sapiens
MRKQKKERKQELKLLQEQDQELCEILCMPHYDIDSASVPSLEELNQFRQHVTTLRETKASRREEFVSIKRQIILCMEALDHTPDTSFERDVVCEDEDAFCLSLENIATLQKLLRQLEMQKSQNEAVCEGLRTQIRELWDRLQIPEEEREAVATIMSGSKAKVRKALQLEVDRLEELKMQNMKKVIEAIRVELVQYWDQCFYSQEQRQAFAPFCAEDYTESLLQLHDAEIVRLKNYYEVHKELFEGVQKWEETWRLFLEFERKASDPNRFTNRGGNLLKEEKQRAKLQKMLPKLEEELKARIELWEQEHSKAFMVNGQKFMEYVAEQWEMHRLEKERAKQERQLKNKKQTETEMLYGSAPRTPSKRRGLAPNTPGKARKLNTTTMSNATANSSIRPIFGGTVYHSPVSRLPPSGSKPVAASTCSGKKTPRTGRHGANKENLELNGSILSGGYPGSAPLQRNFSINSVASTYSEFARELSKASKSDATSGILNSTNIQS

SEQ ID NO: 44209 - protein, 1730 aa, Homo sapiens
MWEEYPDVYGVRRSNRSRQEPSRFNIKEEASSGSESGSPKRRGQRQLKKQEKWKQEPSEDEQEQGTSAESEPEQKKVKARRPVPRRTVPKPRVKKQPKTQRGKRKKQDSSDEDDDDDEAPKRQTRRRAAKNVSYKEDDDFETDSDDLIEMTGEGVDEQQDNSETIEKVLDSRLGKKGATGASTTVYAIEANGDPSGDFDTEKDEGEIQYLIKWKGWSYIHSTWESEESLQQQKVKGLKKLENFKKKEDEIKQWLGKVSPEDVEYFNCQQELASELNKQYQIVERVIAVKTSKSTLGQTDFPAHSRKPAPSNEPEYLCKWMGLPYSECSWEDEALIGKKFQNCIDSFHSRNNSKTIPTRECKALKQRPRFVALKKQPAYLGGENLELRDYQLEGLNWLAHSWCKNNSVILADEMGLGKTIQTISFLSYLFHQHQLYGPFLIVVPLSTLTSWQREFEIWAPEINVVVYIGDLMSRNTIREYEWIHSQTKRLKFNALITTYEILLKDKTVLGSINWAFLGVDEAHRLKNDDSLLYKTLIDFKSNHRLLITGTPLQNSLKELWSLLHFIMPEKFEFWEDFEEDHGKGRENGYQSLHKVLEPFLLRRVKKDVEKSLPAKVEQILRVEMSALQKQYYKWILTRNYKALAKGTRGSTSGFLNIVMELKKCCNHCYLIKPPEENERENGQEILLSLIRSSGKLILLDKLLTRLRERGNRVLIFSQMVRMLDILAEYLTIKHYPFQRLDGSIKGEIRKQALDHFNADGSEDFCFLLSTRAGGLGINLASADTVVIFDSDWNPQNDLQAQARAHRIGQKKQVNIYRLVTKGTVEEEIIERAKKKMVLDHLVIQRMDTTGRTILENNSGRSNSNPFNKEELTAILKFGAEDLFKELEGEESEPQEMDIDEILRLAETRENEVSTSATDELLSQFKVANFATMEDEEELEERPHKDWDEIIPEEQRKKVEEEERQKELEEIYMLPRIRSSTKKAQTNDSDSDTESKRQAQRSSASESETEDSDDDKKPKRRGRPRSVRKDLVEGFTDAEIRRFIKAYKKFGLPLERLECIARDAELVDKSVADLKRLGELIHNSCVSAMQEYEEQLKENASEGKGPGKRRGPTIKISGVQVNVKSIIQHEEEFEMLHKSIPVDPEEKKKYCLTCRVKAAHFDVEWGVEDDSRLLLGIYEHGYGNWELIKTDPELKLTDKILPVETDKKPQGKQLQTRADYLLKLLRKGLEKKGAVTGGEEAKLKKRKPRVKKENKVPRLKEEHGIELSSPRHSDNPSEEGEVKDDGLEKSPMKKKQKKKENKENKEKQMSSRKDKEGDKERKKSKDKKEKPKSGDAKSSSKSKRSQGPVHITAGSEPVPIGEDEDDDLDQETFSICKERMRPVKKALKQLDKPDKGLNVQEQLEHTRNCLLKIGDRIAECLKAYSDQEHIKLWRRNLWIFVSKFTEFDARKLHKLYKMAHKKRSQEEEEQKKKDDVTGGKKPFRPEASGSSRDSLISQSHTSHNLHPQKPHLPASHGPQMHGHPRDNYNHPNKRHFSNADRGDWQRERKFNYGGGNNNPPWGSDRHHQYEQHWYKDHHYGDRRHMDAHRSGSYRPNNMSRKRPYDQYSSDRDHRGHRDYYDRHHHDSKRRRSDEFRPQNYHQQDFRRMSDHRPAMGYHGQGPSDHYRSFHTDKLGEYKQPLPPLHPAVSDPRSPPSQKSPHDSKSPLDHRSPLERSLEQKNNPDYNWNVRKT

SEQ ID NO: 44210 - protein, 47 aa, Homo sapiens
MKTINFREFKYITQAGLFVPMRETRRIVSIHLLSELPLNFREAAILF

SEQ ID NO: 44211 - protein, 169 aa, Homo sapiens [sequence omitted]

SEQ ID NO: 44212 - protein, 1245 aa, Homo sapiens
MTNLKDIGLYNLRNITRGAIRIEKNADLCYLSTVDWSLILDAVSNNYIVGNKPPKECGDLCPGTMEEKPMCEKTTINNEYNYRCWTTNRCQKMCPSTCGKRACTENNECCHPECLGSCSAPDNDTACVACRHYYYAGVCVPACPPNTYRFEGWRCVDRDFCANILSAESSDSEGFVIHDGECMQECPSGFIRNGSQSMYCIPCEGPCPKVCEEEKKTKTIDSVTSAQMLQGCTIFKGNLLINIRRGNNIASELENFMGLIEVVTGYVKIRHSHALVSLSFLKNLRLILGEEQLEGNYSFYVLDNQNLQQLWDWDHRNLTIKAGKMYFAFNPKLCVSEIYRMEEVTGTKGRQSKGDINTRNNGERASCESDVLHFTSTTTSKNRIIITWHRYRPPDYRDLISFTVYYKEAPFKNVTEYDGQDACGSNSWNMVDVDLPPNKDVEPGILLHGLKPWTQYAVYVKAVTLTMVENDHIRGAKSEILYIRTNASVPSIPLDVLSASNSSSQLIVKWNPPSLPNGNLSYYIVRWQRQPQDGYLYRHNYCSKDKIPIRKYADGTIDIEEVTENPKTEVCGGEKGPCCACPKTEAEKQAEKEEAEYRKVFENFLHNSIFVPRPERKRRDVMQVANTTMSSRSRNTTAADTYNITDPEELETEYPFFESRVDNKERTVISNLRPFTLYRIDIHSCNHEAEKLGCSASNFVFARTMPAEGADDIPGPVTWEPRPENSIFLKWPEPENPNGLILMYEIKYGSQVEDQRECVSRQEYRKYGGAKLNRLNPGNYTARIQATSLSGNGSWTDPVFFYVQAKRYENFIHLIIALPVAVLLIVGGLVIMLYVFHRKRNNSRLGNGVLYASVNPEYFSAADVYVPDEWEVAREKITMSRELGQGSFGMVYEGVAKGVVKDEPETRVAIKTVNEAASMRERIEFLNEASVMKEFNCHHVVRLLGVVSQGQPTLVIMELMTRGDLKSYLRSLRPEMENNPVLAPPSLSKMIQMAGEIADGMAYLNANKFVHRDLAARNCMVAEDFTVKIGDFGMTRDIYETDYYRKGGKGLLPVRWMSPESLKDGVFTTYSDVWSFGVVLWEIATLAEQPYQGLSNEQVLRFVMEGGLLDKPDNCPDMLFELMRMCWQYNPKMRPSFLEIISSIKEEMEPGFREVSFYYSEENKLPEPEELDLEPENMESVPLDPSASSSSLPLPDRHSGHKAENGPGPGVLVLRASFDERQPYAHMNGGRKNERALPLPQSSTC

SEQ ID NO: 44213 - protein, 305 aa, Homo sapiens
MGRALLSLQKFKEAAENLTKAERLSKELLQCGRIIKEEWIEIEARIRLSFAQVYQGQKKSKEALSHYQAALEYVEISKGETSRECVPILRELAGVEQALGLHDVSINHFLQAHLIILSRSPSQVEAADSAHIVAHAAVASGRHEHHDVAEQYFQESMAHLKDSEGMGRTKFLSIQDEFCHFLQMTGQKERATSILRESLEAKVEAFGDFSPEVAETYRLLGGADLAQGNHSGARKKLKKCLQIQTLLYGPQDKRTLATQQAMGMLSTAPKVASKPRQASKAKVAFCTSIPQDTLLGKARPGTTAD

SEQ ID NO: 44214 - protein, 251 aa, Homo sapiens
MGRALLSLQKFKEAAENLTKAERLSKELLQCGRIIKEEWIEIEARIRLSFAQVYQGQKKSKEALSHYQAALEYVEISKGETSRECVPILRELAGVEQALGLHDVSINHFLQAHLIILSRSPSQVEAADSAHIVAHAAVASGRHEHHDVAEQYFQESMAHLKDSEGMGRTKFLSIQDEFCHFLQMTGQKERATSILRESLEAKVEAFGDFSPEVAETYRLLGGADLAQGNHSGARKKLKKGDLSFLLSATLP

SEQ ID NO: 44215 - protein, 17 aa, Homo sapiens
MYIKICKNHRKPTYPTT

SEQ ID NO: 44216 - protein, 486 aa, Homo sapiens
MDERNRQVTFTKRKFGLMKKAYELSVLCDCEIALIIFNSSNKLFQYASTDMDKVLLKYTEYNEPHESRTNSDIVETLRKKGLNGCESPDADDYFEHSPLSEDRFSKLNEDSDFIFKRGPPGLPPQNFSMSVTVPVTSPNALSYTNPGSSLVSPSLAASSTLTDSSMLSPPQTTLHRNVSPGAPQRPPSTGNAGGMLSTTDLTVPNGAGSSPVGNGFVNSRASPNLIGATGANSLGKVMPTKSPPPPGGGNLGMNSRKPDLRVVIPPSSKGMMPPLNTQRISSSQATQPLATPVVSVTTPSLPPQGLVYSAMPTAYNTDYSLTSADLSALQGFNSPGMLSLGQVSAWQQHHLGQAALSSLVAGGQLSQGSNLSINTNQNISIKSEPISPPRDRMTPSGFQQQQQQQQQQQPPPPPQPQPQPPQPQPRQEMGRSPVDSLSSSSSSYDGSDREDPRGDFHSPIVLGRPPNTEDRESPSVKRMRMDAWVT

SEQ ID NO: 44217 - protein, 488 aa, Homo sapiens
MDERNRQVTFTKRKFGLMKKAYELSVLCDCEIALIIFNSSNKLFQYASTDMDKVLLKYTEYNEPHESRTNSDIVEALNKKEHRGCDSPDPDTSYVLTPHTEEKYKKINEEFDNMMRNHKIAPGLPPQNFSMSVTVPVTSPNALSYTNPGSSLVSPSLAASSTLTDSSMLSPPQTTLHRNVSPGAPQRPPSTGNAGGMLSTTDLTVPNGAGSSPVGNGFVNSRASPNLIGATGANSLGKVMPTKSPPPPGGGNLGMNSRKPDLRVVIPPSSKGMMPPLNTQRISSSQATQPLATPVVSVTTPSLPPQGLVYSAMPTAYNTDYSLTSADLSALQGFNSPGMLSLGQVSAWQQHHLGQAALSSLVAGGQLSQGSNLSINTNQNISIKSEPISPPRDRMTPSGFQQQQQQQQQQQPPPPPQPQPQPPQPQPRQEMGRSPVDSLSSSSSSYDGSDREDPRGDFHSPIVLGRPPNTEDRESPSVKRMRMDAWVT

SEQ ID NO: 44218 - protein, 393 aa, Homo sapiens [sequence omitted]

SEQ ID NO: 44219 - protein, 2012 aa, Homo sapiens
MSQRPPSMYWCVGPEESAVCPERAMETLNGAGDTGGKPSTRGGDPAARSRRTEGIRAAYRRGDRGGARDLLEEACDQCASQLEKGQLLSIPAAYGDLEMVRYLLSKRLVELPTEPTDDNPAVVAAYFGHTAVVQELLESLPGPCSPQRLLNWMLALACQRGHLGVVKLLVLTHGADPESYAVRKNEFPVIVRLPLYAAIKSGNEDIAIFLLRHGAYFCSYILLDSPDPSKHLLRKYFIEASPLPSSYPGKTALRVKWSHLRLPWVDLDWLIDISCQITELDLSANCLATLPSVIPWGLINLRKLNLSDNHLGELPGVQSSDEIICSRLLEIDISSNKLSHLPPGFLHLSKLQKLTASKNCLEKLFEEENATNWIGLRKLQELDISDNKLTELPALFLHSFKSLNSLNVSRNNLKVFPDPWACPLKCCKASRNALECLPDKMAVFWKNHLKDVDFSENALKEVPLGLFQLDALMFLRLQGNQLAALPPQEKWTCRQLKTLDLSRNQLGKNEDGLKTKRIAFFTTRGRQRSGTEAASVLEFPAFLSESLEVLCLNDNHLDTVPPSVCLLKSLSELYLGNNPGLRELPPELGQLGNLWQLDTEDLTISNVPAEIQKEGPKAMLSYLRAQLRKAEKCKLMKMIIVGPPRQGKSTLLEILQTGRAPQVVHGEATIRTTKWELQRPAGSRAKVESVEFNVWDIGGPASMATVNQCFFTDKALYVVVWNLALGEEAVANLQFWLLNIEAKAPNAVVLVVGTHLDLIEAKFRVERIATLRAYVLALCRSPSGSRATGFPDITFKHLHEISCKSLEGQEGLRQLIFHVTCSMKDVGSTIGCQRLAGRLIPRSYLSLQEAVLAEQQRRSRDDDVQYLTDRQLEQLVEQTPDNDIKDYEDLQSAISFLIETGTLLHFPDTSHGLRNLYFLDPIWLSECLQRIFNIKGSRSVAKNGVIRAEDLRMLLVGTGFTQQTEEQYFQFLAKFEIALPVANDSYLLPHLLPSKPGLDTHGMRHPTANTIQRVFKMSFVPVGFWQRFIARMLISLAEMDLQLFENKKNTKSRNRKVTIYSFTGNQRNRCSTFRVKRNQTIYWQEGLLVTFDGGYLSVESSDVNWKKKKSGGMKIVCQSEVRDFSAMAFITDHVNSLIDQWFPALTATESDGTPLMEQYVPCPVCETAWAQHTDPSEKSEDVQYFDMEDCVLTAIERDFISCPRHPDLPVPLQELVPELFMTDFPARLFLENSKLEHSEDEGSVLGQGGSGTVIYRARYQGQPVAVKRFHIKKFKNFANVPADTMLRHLRATDAMKNFSEFRQEASMLHALQHPCIVALIGISIHPLCFALELAPLSSLNTVLSENARDSSFIPLGHMLTQKIAYQIASGLAYLHKKNIIFCDLKSDNILVWSLDVKEHINIKLSDYGISRQSFHEGALGVEGTPGYQAPEIRPRIVYDEKVDMFSYGMVLYELLSGQRPALGHHQLQIAKKLSKGIRPVLGQPEEVQFRRLQALMMECWDTKPEKRPLALSVVSQMKDPTFATFMYELCCGKQTAFFSSQGQEYTVVFWDGKEESRNYTVVNTEKGLMEVQRMCCPGMKVSCQLQVQRSLWTATEDQKIYIYTLKGMCPLNTPQQALDTPAVVTCFLAVPVIKKNSYLVLAGLADGLVAVFPVVRGTPKDSCSYLCSHTANRSKFSIADEDARQNPYPVKAMEVVNSGSEVWYSNGPGLLVIDCASLEICRRLEPYMAPSMVTSVVCSSEGRGEEVVWCLDDKANSLVMYHSTTYQLCARYFCGVPSPLRDMFPVRPLDTEPPAASHTANPKVPEGDSIADVSIMYSEELGTQILIHQESLTDYCSMSSYSSSPPRQAARSPSSLPSSPASSSSVPFSTDCEDSDMLHTPGAASDRSEHDLTPMDGETFSQHLQAVKILAVRDLIWVPRRGGDVIVIGLEKDSGAQRGRVIAVLKARELTPHGVLVDAAVVAKDTVVCTFENENTEWCLAVWRGWGAREFDIFYQSYEELGRLEACTRKRR

SEQ ID NO: 44220 - protein, 148 aa, Homo sapiens [sequence omitted]

SEQ ID NO: 44221 - protein, 491 aa, Homo sapiens
MCGQKFELKIDNVRFVGHPTLLQHALGQISKTDPSPKREAPTMILFNVVFALRANADPSVINCLHNLSRRIATVLQHEERRCQYLTREAKLILALQDEVSAMADGNEGPQSPFHHILPKCKLARDLKEAYDSLCTSGVVRLHINSWLEVSFCLPHKIHYAASSLIPPEAIERSLKAIRPYHALLLLSDEKSLLGELPIDCSPALVRVIKTTSAVKNLQQLAQDADLALLQVFQLAAHLVYWGKAIIIYPLCENNVYMLSPNASVCLYSPLAEQFSHQFPSHDLPSVLAKFSLPVSLSEFRNPLAPAVQETQLIQMVVWMLQRRLLIQLHTYVCLMASPSEEEPRPREDDVPFTARVGGRSLSTPNALSFGSPTSSDDMTLTSPSMDNSSAELLPSGDSPLNQRMTENLLASLSEHERAAILSVPAAQNPEDLRMFARLLHYFRGRHHLEEIMYNENTRRSQLLMLFDKFRSVLVVTTHEDPVIAVFQALLP

SEQ ID NO: 44222 - protein, 233 aa, Homo sapiens
MLSHSSGAVRYLMHVPGNAGADVLLVGSEAFVLLDGQELTPRWTPKAAHVLRKPIFGRYKPDTLAVAVENGTGTDRQILFLDLGTGAVLCSLALPSLPGGPLSASLPTADHRSAFFFWGLHELGSTSETETGEARHSLYMFHPTLPRVLLELANVSTHIVAFDAVLFEPSRHAAYILLTGPADSEAPGLVSVIKHKVRDLVPSSRVVRLGEGGPDSDQAIRDRFSRLRYQSEA

SEQ ID NO: 44223 - protein, 373 aa, Homo sapiens
MLRPDETPYRFQTPYFWTSTLRPAAELDYAIYLAKKNIRKRGTLVDYEKDCYDRLHKKINHAWDLVLMQAREQLRAAKQRSKGDRLVIACQEQTYWLVNRPPPGAPDVLEQGPGRGSCAASRVLMTKSADFHKREIEYFRKALGRTRVKSSVCLEAYLSFCGQRGPHDPLVSGCLPSNPWISDNDAYWVMNAPTVAAPTKLRVERWGFSFRELLEDPVGRAHFMDFLGKEFSGENLSFWEACEELRYGAQAQVPTLVDAVYEQFLAPGAAHWVNIDSRTMEQTLEGLRQPHRYVLDDAQLHIYMLMKKDSYPRFLKSDMYKALLAEAGIPLEMKRRVFPFTWRPRHSSPSPALLPTPVEPTAACGPGGGDGVA

SEQ ID NO: 44224 - protein, 690 aa, Homo sapiens [sequence omitted]

SEQ ID NO: 44225 - protein, 163 aa, Homo sapiens
MKMLQAPESVLAEHYQDLRRKPFYPALIRYMSSGPVVAMVWEGYNVVRASRAMIGHTDSAEAAPGTIRGDFSVHISRNVIHASDSVEGAQREIQLWFQSSELSPTGAPWPSRRPTWRGTTVSPRTATSSARTCCGTKWPSSQEAALGLGSGLLRFSCGTAAIR

SEQ ID NO: 44226 - protein, 560 aa, Homo sapiens
MVLKAFFPTCCVSTDSGLLVGRWVPEQSSAVVLAVLHFPFIPIQVKQLLAQVRQASQVGVAVLGTWCHCRQEPEESLGRFLESLGAVFPHEPWLRLCRERGGTFWSCEATHRQAPTAPGAPGEDQVMLIFYDQRQVLLSQLHLPTVLPDRQAGATTASTGGLAAVFDTVARSEVLFRSDRFDEGPVRLSHWQSEGVEASILAELARRASGPICLLLASLLSLVSAVSACRVFKLWPLSFLGSKLSTCEQLRHRLEHLTLIFSTRKAENPAQLMRKANTVASVLLDVALGLMLLSWLHGRSRIGHLADALVPVADHVAEELQHLLQWLMGAPAGLKMNRALDQVLGRFFLYHIHLWISYIHLMSPFVEHILWHVGLSACLGLTVALSLLSDIIALLTFHIYCFYVYGARLYCLKIHGLSSLWRLFRGKKWNVLRQRVDSCSYDLDQLFIGTLLFTILLFLLPTTALYYLVFTLLRLLVVAVQGLIHLLVDLINSLPLYSLGLRLCRPYRLAGSEPWRPEATGLCSSALGFSGLGSLNCRPGAKRGKVRGTRSQQGGHHPLA

SEQ ID NO: 44227 - protein, 140 aa, Homo sapiens
MESYDEAIANLQRAYSLAKEQRLNFGDDIPSALRIAKKKRWNSIEERRIHQESELHSYLSRLIAAERERELEECQRNHEGDEDDSHVRAQQACIEAKHVRVPPTHMTSTWRTWTSFFLRWMRRGRSETSPTTCVARSALS

SEQ ID NO: 44228 - protein, 770 aa, Homo sapiens
MHCHLDAPANAISVCRDAAQVVVAGRSIFKIYAIEEEQFVEKLNLRVGRKPSLNLSCADVVWHQMDENLLATAATNGVVVTWNLGRPSRNKQDQLFTEHKRTVNKVCFHPTEAHVLLSGSQDGFMKCFDLRRKDSVSTFSGQSESVRDVQFSIRDYFTFASTFENGNVQLWDIRRPDRCERMFTAHNGPVFCCDWHPEDRGWLATGGRDKMVKVWDMTTHRAKEMHCVQTIASVARVKWRPECRHHLATCSMMVDHNIYVWDVRRPFVPAAMFEEHRDVTTGIAWRHPHDPSFLLSGSKDSSLCQHLFRDASQPVERANPEGLCYGLFGDLAFAAKESLVAAESGRKPYTGDRRHPIFFKRKLDPAEPFAGLASSALSVFETEPGGGGMRWFVDTAERYALAGRPLAELCDHNAKVARELGRNQVAQTWTMLRIIYCSPGLVPTANLNHSVGKGGSCGLPLMNSFNLKDMAPGLGSETRLDRSKGDARSDTVLLDSSATLITNEDNEETEGSDVPADYLLGDVEGEEDELYLLDPEHAHPEDPECVLPQEAFPLRHEIVDTPPGPEHLQDKADSPHVSGSEADVASLAPVDSSFSLLSVSHALYDSRLPPDFFGVLVRDMLHFYAEQGDVQMAVSVLIVLGERVRKDIDEQTQEHWYTSYIDLLQRFRLWNVSNEVVKLSTSRAVSCLNQASTTLHVNCSHCKRPMSSRGWVCDRCHRCASMCAVCHHVVKGLFVWCQGCSHGGHLQHIMKWLEGSSHCPAGCGHLCEYS

SEQ ID NO: 44229 - protein, 63 aa, Homo sapiens
MGVQEGGPGQLIARHGPQAHVCVHSCLGGACRPCSDAELLLAACTSDFGECPRHGGSLEPAFP

SEQ ID NO: 44230 - protein, 123 aa, Homo sapiens
MNLMNWECAIPGKKGTPWEGGLFKLRMLFKDDYPSSPPKCKFEPPLFHPNVYPSGTVCLSILEEDKDWRPAITIKQILLGIQELLNEPNIQDPAQAEAYTIYCQNRVEYEKRVRAQAKKFAPS

SEQ ID NO: 44231 - protein, 747 aa, Homo sapiens
MSSVELDDELLDPDMDPPHPFPKEIPHNEKLLSLKYESLDYDNSENQLFLEEERRINHTAFRTVEIKRWVICALIGILTGLVACFIDIVVENLAGLKYRVIKGNIDKFTEKGGLSFSLLLWATLNAAFVLVGSVIVAFIEPVAAGSGIPQIKCFLNGVKIPHVVRLKTLVIKVSGVILSVVGGLAVGKEGPMIHSGSVIAAGISQGRSTSLKRDFKIFEYFRRDTEKRDFVSAGAAAGVSAAFGAPVGGVLFSLEEGASFWNQFLTWRIFFASMISTFTLNFVLSIYHGNMWDLSSPGLINFGRFDSEKMAYTIHEIPVFIAMGVVGGVLGAVFNALNYWLTMFRIRYIHRPCLQVIEAVLVAAVTATVAFVLIYSSRDCQPLQGGSMSYPLQLFCADGEYNSMAAAFFNTPEKSVVSLFHDPPGSYNPLTLGLFTLVYFFLACWTYGLTVSAGVFIPSLLIGAAWGRLFGISLSYLTGAAIWADPGKYALMGAAAQLGGIVRMTLSLTVIMMEATSNVTYGFPIMLVLMTAKIVGDVFIEGLYDMHIQLQSVPFLHWEAPVTSHSLTAREVMSTPVTCLRRREKVGVIVDVLSDTASNHNGFPVVEHADDTQPARLQGLILRSQLIVLLKHKVFVERSNLGLVQRRLRLKDFRDAYPRFPPIQSIHVSQDERECTMDLSEFMNPSPYTVPQEASLPRVFKLFRALGLRHLVVVDNRNQVVGLVTRKDLARYRLGKRGLEELSLAQT

SEQ ID NO: 44232 - protein, 21 aa, Homo sapiens
MGPEASSFSTGLALLQVQEGG

SEQ ID NO: 44233 - protein, 12 aa, Homo sapiens
MGLRPRRPEDEW

SEQ ID NO: 44234 - protein, 1065 aa, Homo sapiens
MVKNKEQVRHFYYRTWHKITKYIDFDHVFSRGLKKSSQELYGLICYGELRKKIGGCMDDKNATKLNELIQVGATTVRYKGRNLRIKAPMCRALKKLCDPDGLSDEEDQKPVRLPLKVPIELQPRNNHAWARVQSLAQNPRLRMIVELHRKVSSLIEFLKQKWALHEVRVRKTLEERQLQDSCSAPMQEKVTLHLFPGENCTLTPLPGVARVVHSKAFCTVHWQEGGRCKQSAKDAHVLPPAQILGIQSGQGTARGQVKCPRSGAEGKGVGRPPPAADALQSSGESSPESAPGEGAALSLSSPDAPDRPPPRHQDTGPCLEKTPAEGRDSPTREPGALPCACGQLPDLEDELSLLDPLPRYLKSCQDLIVPEQCRCADTRPGSEQPPLGGAASPEVLAPVSKEAADLAPTGPSPRPGPGLLLDVCTKDLADAPAEELQEKGSPAGPPPSQGQPAARPPKEVPASRLAQQLREEGWNLQTSESLTLAEVYLMMGKPSKLQLEYDWLGPGRQDPRPGSLPTALHKQRLLSCLLKLISTEVNPKLALEANTISTASVRPAQEEQSMTPPGKVVTVSSRSPRCPRNQASLRSSKTFPPSSAPCSSGLRNPPRPLLVPGPSSTGSNDSDGGLFAVPTTLPPNSRHGKLFSPSKEAELTFRQHLNSISMQSDFFLPKPRKLRNRHLRKPLVVQRTLLPRPSENQSHNVCSFSILSNSSVTGRGSFRPIQSSLTKAALSRPIVPKVLPPQATSHLASAIDLAATSAGILSGNPLPALDTEGLSGISPLSSDEVTGAISGQDSTGTHQDGDTLPTVGGSDPFVSIPSRPEQEPVADSFQGSSVLSLSELPKAPLQNGLSIPLSSSESSSTRLSPPDVSALLDISLPGPPEDALSQGEPATHISDSIIEIAISSGQYGEGVPLSPAKLNGSDSSKSLPSPSSSPQPHWIASPTHDPQWYPSDSTDSSLSSLFASFISPEKSRKMLPTPIGTNSGTSLLGPSLLDGNSRDSFVSRSLADVAEVVDSQLVCMMNENSIDYISRFNDLAQELSIAEPGRREALFDGGGGGPAVSDLSQ

SEQ ID NO: 44235 - protein, 572 aa, Homo sapiens
MGKPSKLQLEYDWLGPGRQDPRPGSLPTALHKQRLLSCLLKLISTEVNPKLALEANTISTASVRPAQEEQSMTPPGKVVTVSSRSPRCPRNQASLRSSKTFPPSSAPCSSGLRNPPRPLLVPGPSSTGSNDSDGGLFAVPTTLPPNSRHGKLFSPSKEAELTFRQHLNSISMQSDFFLPKPRKLRNRHLRKPLVVQRTLLPRPSENQSHNVCSFSILSNSSVTGRGSFRPIQSSLTKAALSRPIVPKVLPPQATSHLASAIDLAATSAGILSGNPLPALDTEGLSGISPLSSDEVTGAISGQDSTGTHQDGDTLPTVGGSDPFVSIPSRPEQEPVADSFQGSSVLSLSELPKAPLQNGLSIPLSSSESSSTRLSPPDVSALLDISLPGPPEDALSQGEPATHISDSIIEIAISSGEGVPLSPAKLNGSDSSKSLPSPSSSPQPHWIASPTHDPQWYPSDSTDSSLSSLFASFISPEKSRKMLPTPIGTNSGTSLLGPSLLDGNSRDSFVSRSLADVAEVVDSQLVCMMNENSIDYISRFNDLAQELSIAEPGRREALFDGGGGGPAVSDLSQ

SEQ ID NO: 44236 - protein, 81 aa, Homo sapiens
MASGPVVAMVWQGLDVVRTSRALIGATNPADAPPGTIRGDFCIEEPDSRQRLGGECPPRDRSLVPRRRAPLLGGQRWALAV

SEQ ID NO: 44237 - protein, 632 aa, Homo sapiens
MAETAAGVGRFKTNYAVERKIEPFYKGGKAQLDQTGQHLFCVCGTRVNILEVASGAVLRSLEQEDQEDITAFDLSPDNEVLVTASRALLLAQWAWQEGSVTRLWKAIHTAPVATMAFDPTSTLLATGGCDGAVRVWDIVRHYGTHHFRGSPGVVHLVAFHPDPTRLLLFSSATDAAIRVWSLQDRSCLAVLTAHYSAVTSLAFSADGHTMLSSGRDKICIIWDLQSCQATRTVPVFESVEAAVLLPEEPVSQLGVKSPGLYFLTAGDQGTLRVWEAASGQCVYTQAQPPGPGQELTHCTLAHTAGVVLTATADHNLLLYEARSLRLQKQFAGYSEEVLDVRFLGPEDSHVVVASNSPCLKVFELQTSACQILHGHTDIVLALDVFRKGWLFASCAKDQSVRIWRMNKAGQVMCVAQGSGHTHSVGTVCCSRLKESFLVTGSQDCTVKLWPLPKALLSKNTAPDNGPILLQAQTTQRCHDKDINSVAIAPNDKLLATGSQDRTAKLWALPQCQLLGVFSGHRVASGASSSLPWTRCWPRPQLMAPSSSGHSRTSAVSRHLRGTMLCLKVAFVSRGTQLLSSGSDGLVKLWTIKNNECVRTLDAHEDKVWGLHAGWTTTPSLGPVTPESSSGRM

SEQ ID NO: 44238 - protein, 297 aa, Homo sapiens
MLTRSRSLGPGAGPRGCREEPGPLRRREAAAEARKSHSPVKRPRKAQRLRVAYEGSDSEKGEGAEPLKVPVWEPQDWQQQLVNIRAMRNKKDAPVDHLGTEHCYDSSAPPKVRRYQVLLSLMLSSQTKDQVTAGAMQRLRARGLTVDSILQTDDATLGKLIYPVGFWRSKVKYIKQTSAILQQHYGGDIPASVAELVALPGVGPKMAHLAMAVAWGTVSGIAVDTHVHRIANRLRWTKKATKSPEETRAALEEWLPRELWHEINGLLVGFGQQTCLPVHPRCHACLNQALCPAAQGL

SEQ ID NO: 44239 - protein, 3857 aa, Homo sapiens
MVDSPAVQRFLVSRVTRSLDVWIGFSTVQGVEVGPAPQGEAFSLESCQNWLPGEPHPATAEHCVRLGPTGWCNTDLCSAPHSYVCELQPGGPVQDAENLLVGAPSGDLQGPLTPLAQQDGLSAPHEPVEVMVFPGLRLSREAFLTTAEFGTQELRRPAQLRLQVYRLLSTAGTPENGSEPESRSPDNRTQLAPACMPGGRWCPGANICLPLDASCHPQACANGCTSGPGLPGAPYALWREFLFSVPAGPPAQYSVTLHGQDVLMLPGDLVGLQHDAGPGALLHCSPAPGHPGPRAPYLSANASSWLPHLPAQLEGTWACPACALRLLAATEQLTVLLGLRPNPGLRLPGRYEVRAEVGNGVSRHNLSCSFDVVSPVAGLRVIYPAPRDGRLYVPTNGSALVLQVDSGANATATARWPGGSVSARFENVCPALVATFVPGCPWETNDTLFSVVALPWLSEGEHVVDVVVENSASRANLSLRVTAEEPICGLRATPSPEARVLQGVLVRYSPVVEAGSDMVFRWTINDKQSLTFQNVVFNVIYQSAAVFKLSLTASNHVSNVTVNYNVTVERMNRMQGLQVSTVPAVLSPNATLALTAGVLVDSAVEVAFLWTFGDGEQALHQFQPPYNESFPVPDPSVAQVLVEHNVMHTYAAPGEYLLTVLASNAFENLTQQVPVSVRASLPSVAVGVSDGVLVAGRPVTFYPHPLPSPGGVLYTWDFGDGSPVLTQSQPAANHTYASRGTYHVRLEVNNTVSGAAAQADVRVFEELRGLSVDMSLAVEQGAPVVVSAAVQTGDNITWTFDMGDGTVLSGPEATVEHVYLRAQNCTVTVGAASPAGHLARSLHVLVFVLEVLRVEPAACIPTQPDARLTAYVTGNPAHYLFDWTFGDGSSNTTVRGCPTVTHNFTRSGTFPLALVLSSRVNRAHYFTSICVEPEVGNVTLQPERQFVQLGDEAWLVACAWPPFPYRYTWDFGTEEAAPTRARGPEVTFIYRDPGSYLVTVTASNNISAANDSALVEVQEPVLVTSIKVNGSLGLELQQPYLFSAVGRGRPASYLWDLGDGGWLEGPEVTHAYNSTGDFTVRVAGWNEVSRSEAWLNVTVKRRVRGLVVNASRTVVPLNGSVSFSTSLEAGSDVRYSWVLCDRCTPIPGGPTISYTFRSVGTFNIIVTAENEVGSAQDSIFVYVLQLIEGLQVVGGGRYFPTNHTVQLQAVVRDGTNVSYSWTAWRDRGPALAGSGKGFSLTVLEAGTYHVQLRATNMLGSAWADCTMDFVEPVGWLMVAASPNPAAVNTSVTLSAELAGGSGVVYTWSLEEGLSWETSEPFTTHSFPTPGLHLVTMTAGNPLGSANATVEVDVQVPVSGLSIRASEPGGSFVAAGSSVPFWGQLATGTNVSWCWAVPGGSSKRGPHVTMVFPDAGTFSIRLNASNAVSWVSATYNLTAEEPIVGLVLWASSKVVAPGQLVHFQILLAAGSAVTFRLQVGGANPEVLPGPRFSHSFPRVGDHVVSVRGKNHVSWAQAQVRIVVLEAVSGLQVPNCCEPGIATGTERNFTARVQRGSRVAYAWYFSLQKVQGDSLVILSGRDVTYTPVAAGLLEIQVRAFNALGSENRTLVLEVQDAVQYVALQSGPCFTNRSAQFEAATSPSPRRVAYHWDFGDGSPGQDTDEPRAEHSYLRPGDYRVQVNASNLVSFFVAQATVTVQVLACREPEVDVVLPLQVLMRRSQRNYLEAHVDLRDCVTYQTEYRWEVYRTASCQRPGRPARVALPGVDVSRPRLVLPRLALPVGHYCFVFVVSFGDTPLTQSIQANVTVAPERLVPIIEGGSYRVWSDTRDLVLDGSESYDPNLEDGDQTPLSFHWACVASTQREAGGCALNFGPRGSSTVTIPRERLAAGVEYTFSLTVWKAGRKEEATNQTVLIRSGRVPIVSLECVSCKAQAVYEVSRSSYVYLEGRCLNCSSGSKRGRWAARTFSNKTLVLDETTTSTGSAGMRLVLRRGVLRDGEGYTFTLTVLGRSGEEEGCASIRLSPNRPPLGGSCRLFPLGAVHALTTKVHFECTGWHDAEDAGAPLVYALLLRRCRQGHCEEFCVYKGSLSSYGAVLPPGFRPHFEVGLAVVVQDQLGAAVVALNRSLAITLPEPNGSATGLTVWLHGLTASVLPGLLRQADPQHVIEYSLALVTVLNEYERALDVAAEPKHERQHRAQIRKNITETLVSLRVHTVDDIQQIAAALAQCMGPSRELVCRSCLKQTLHKLEAMMLILQAETTAGTVTPTAIGDSILNITGDLIHLASSDVRAPQPSELGAESPSRMVASQAYNLTSALMRILMRSRVLNEEPLTLAGEEIVAQGKRSDPRSLLCYGGAPGPGCHFSIPEAFSGALANLSDVVQLIFLVDSNPFPFGYISNYTVSTKVASMAFQTQAGAQIPIERLASERAITVKVPNNSDWAARGHRSSANSANSVVVQPQASVGAVVTLDSSNPAAGLHLQLNYTLLDGHYLSEEPEPYLAVYLHSEPRPNEHNCSASRRIRPESLQGADHRPYTFFISPGSRDPAGSYHLNLSSHFRWSALQVSVGLYTSLCQYFSEEDMVWRTEGLLPLEETSPRQAVCLTRHLTAFGASLFVPPSHVRFVFPEPTADVNYIVMLTCAVCLVTYMVMAAILHKLDQLDASRGRAIPFCGQRGRFKYEILVKTGWGRGSGTTAHVGIMLYGVDSRSGHRHLDGDRAFHRNSLDIFRIATPHSLGSVWKIRVWHDNKGLSPAWFLQHVIVRDLQTARSAFFLVNDWLSVETEANGGLVEKEVLAASDAALLRFRRLLVAELQRGFFDKHIWLSIWDRPPRSRFTRIQRATCCVLLICLFLGANAVWYGAVGDSAYSTGHVSRLSPLSVDTVAVGLVSSVVVYPVYLAILFLFRMSRSKVAGSPSPTPAGQQVLDIDSCLDSSVLDSSFLTFSGLHAEAFVGQMKSDLFLDDSKSLVCWPSGEGTLSWPDLLSDPSIVGSNLRQLARGQAGHGLGPEEDGFSLASPYSPAKSFSASDEDLIQQVLAEGVSSPAPTQDTHMETDLLSSLSSTPGEKTETLALQRLGELGPPSPGLNWEQPQAARLSRTGLVEGLRKRLLPAWCASLAHGLSLLLVAVAVAVSGWVGASFPPGVSVAWLLSSSASFLASFLGWEPLKVLLEALYFSLVAKRLHPDEDDTLVESPAVTPVSARVPRVRPPHGFALFLAKEEARKVKRLHGMLRSLLVYMLFLLVTLLASYGDASCHGHAYRLQSAIKQELHSRAFLAITRSEELWPWMAHVLLPYVHGNQSSPELGPPRLRQVRLQEALYPDPPGPRVHTCSAAGGFSTSDYDVGWESPHNGSGTWAYSAPDLLGAWSWGSCAVYDSGGYVQELGLSLEESRDRLRFLQLHNWLDNRSRAVFLELTRYSPAVGLHAAVTLRLEFPAAGRALAALSVRPFALRRLSAGLSLPLLTSVCLLLFAVHFAVAEARTWHREGRWRVLRLGAWARWLLVALTAATALVRLAQLGAADRQWTRFVRGRPRRFTSFDQVAQLSSAARGLAASLLFLLLVKAAQQLRFVRQWSVFGKTLCRALPELLGVTLGLVVLGVAYAQLAILLVSSCVDSLWSVAQALLVLCPGTGLSTLCPAESWHLSPLLCVGLWALRLWGALRLGAVILRWRYHALRGELYRPAWEPQDYEMVELFLRRLRLWMGLSKVKEFRHKVRFEGMEPLPSRSSRGSKVSPDVPPPSAGSDASHPSTSSSQLDGLSVSLGRLGTRCEPEPSRLQAVFEALLTQFDRLNQATEDVYQLEQQLHSLQGRRSSRAPAGSSRGPSPGLRPALPSRLARASRGVDLATGPSRTPLRAKNKVHPSST

SEQ ID NO: 44240 - protein, 780 aa, Homo sapiens [sequence omitted]

SEQ ID NO: 44241 - protein, 545 aa, Homo sapiens
MDAAIQDLGPKELSCTELQELKQLARQGYWAQSHALRGKVYQRLIRDIPCRTVTPDASVYSDIVGKIVGKHSSSCLPLPEFVDNTQVPSYCLNARGEGAVRKILLCLANQFPDISFCPALPAVVALLLHYSIDEAECFEKACRILACNDPGRRLIDQSFLAFESSCMTFGDLVNKYCQAAHKLMVAVSEDVLQVYADWQRWLFGELPLCYFARVFDVFLVEGYKVLYRVALAILKFFHKVRAGQPLESDSVKQDIRTFVRDIAKTVSPEKLLEKAFAIRLFSRKEIQLLQMANEKALKQKGITVKQKSVSLSKRQFVHLAVHAENFRSEIVSVREMRDIWSWVPERFALCQPLLLFSSLQHGYSLARFYFQCEGHEPTLLLIKTTQKEVCGAYLSTDWSERNKFGGKLGFFGTGECFVFRLQPEVQRYEWVVIKHPELTKPPPLMAAEPTAPLSHSASSDPADRLSPFLAARHFNLPSKTESMFMAGGSDCLIVGGGGGQALYIDGDLNRGRTSHCDTFNNQPLCSENFLIAAVEAWGFQDPDTQ

SEQ ID NO: 44242 - protein, 386 aa, Homo sapiens
MPPKPKQSFILRVPPDSKLGQDLLRDATNGPKTIHQLVLEHFLTFLPKPSLVQPSQKVKETLVIMKDVSSSLQNRVHPRPLVKLLPKGVQKEQETVSLYLKANPEELVVFEDLNVFHCQEECVSLDPTQQLTSEKEDDSSVGEMMLLVNGSNPEGEDPEREPVENEDYREKSSDDDEMDSSLVSQQPPDNQEKERLNTSIPQKRKMRNLLVTIENDTPLEELSKYVDISIIALTRNRRTRRWYTCPLCGKQFNESSYLISHQRTHTGEKPYDCNHCGKSFNHKTNLNKHERIHTGEKPYSCSQCGKNFRQNSHRSRHEGIHIREKIFKCPECGKTFPKNEEFVLHLQSHEAERPYGCKKCGRRFGRLSNCTRHEKTHSACKTRKQK

SEQ ID NO: 44243 - protein, 518 aa, Homo sapiens
MDEFGISKSTFYDIKKNKKLILDFVLKQDMPLVGAEKRKRTTGAKYGDVDDAVYMWYQQKRSAGVPVRGVELQAAAERFARCFGRTDFKASTGWLFRFRNRHAIGNRKGCGEQVLSSVSENVEPFRQKLSMIIKEEKLCLAQLYSGDETDLFWKSMPENSQASRKDICLPGKKINKERLSAFLCANADGTHKLKSIIIGKSKLPKSVKEDTSTLPVIYKPSKDVWFTRELFSEWFFQNFVPEVRHFQLNVLRFHDEDVRALLLLDSCPAHPSSESLTSEDGRIKCMFFPHNTSTLIQPMNQGVILSCKRLYRWKQLEESLVIFEESDDEQEKGDKGVSKIKIYNIKSAIFNWAKSWEEVKQITIANAWENLLYKKEPEYDFQGLEHGDYREILEKCGELETKLDDDRVWLNGDEEKGCLLKTKGGITKEVVQKGGEAEKQTAEFKLSAVRESLDYLLDFVDATPEFQRFHFTLKEMQQEIVKKQFQSKIHSRIGSFLKPRPHNIKDSFSGPSTSGSNH

SEQ ID NO: 44244 - protein, 536 aa, Homo sapiens [sequence omitted]

SEQ ID NO: 44245 - protein, 403 aa, Homo sapiens [sequence omitted]

SEQ ID NO: 44246 - protein, 355 aa, Homo sapiens [sequence omitted]

SEQ ID NO: 44247 - protein, 390 aa, Homo sapiens [sequence omitted]

SEQ ID NO: 44248 - protein, 2325 aa, Homo sapiens
MGKSPLSQGDSSAPSLPKQAASTSGPTPAASQALNPQAQKQVGLATSSPATSQTGPGICMNANFNQTHPGLLNSNSGHSLINQASQGQAQVMNGSLGAAGRGRGAGMPYPTPAMQGASSSVLAETLTQVSPQMTGHAGLNTAQAGGMAKMGITGNTSPFGQPFSQAGGQPMGATGVNPQLASKQSMVNSLPTFPTDIKNTSVTNVPNMSQMQTSVGIVPTQAIATGPTADPEKRKLIQQQLVLLLHAHKCQRREQANGEVRACSLPHCRTMKNVLNHMTHCQAGKACQVAHCASSRQIISHWKNCTRHDCPVCLPLKNASDKRNQQTILGSPASGIQNTIGSVGTGQQNATSLSNPNPIDPSSMQRAYAALGLPYMNQPQTQLQPQVPGQQPAQPQTHQQMRTLNPLGNNPMNIPAGGITTDQQPPNLISESALPTSLGATNPLMNDGSNSGNIGTLSTIPTAAPPSSTGVRKGWHEHVTQDLRSHLVHKLVQAIFPTPDPAALKDRRMENLVAYAKKVEGDMYESANSRDEYYHLLAEKIYKIQKELEEKRRSRLHKQGILGNQPALPAPGAQPPVIPQAQPVRPPNGPLSLPVNRMQVSQGMNSFNPMSLGNVQLPQAPMGPRAASPMNHSVQMNSMGSVPGMAISPSRMPQPPNMMGAHTNNMMAQAPAQSQFLPQNQFPSSSGAMSVGMGQPPAQTGVSQGQVPGAALPNPLNMLGPQASQLPCPPVTQSPLHPTPPPASTAAGMPSLQHTTPPGMTPPQPAAPTQPSTPVSSSGQTPTPTPGSVPSATQTQSTPTVQAAAQAQVTPQPQTPVQPPSVATPQSSQQQPTPVHAQPPGTPLSQAAASIDNRVPTPSSVASAETNSQQPGPDVPVLEMKTETQAEDTEPDPGESKGEPRSEMMEEDLQGASQVKEETDIAEQKSEPMEVDEKKPEVKVEVKEEEESSSNGTASQSTSPSQPRKKIFKPEELRQALMPTLEALYRQDPESLPFRQPVDPQLLGIPDYFDIVKNPMDLSTIKRKLDTGQYQEPWQYVDDVWLMFNNAWLYNRKTSRVYKFCSKLAEVFEQEIDPVMQSLGYCCGRKYEFSPQTLCCYGKQLCTIPRDAAYYSYQNRYHFCEKCFTEIQGENVTLGDDPSQPQTTISKDQFEKKKNDTLDPEPFVDCKECGRKMHQICVLHYDIIWPSGFVCDNCLKKTGRPRKENKFSAKRLQTTRLGNHLEDRVNKFLRRQNHPEAGEVFVRVVASSDKTVEVKPGMKSRFVDSGEMSESFPYRTKALFAFEEIDGVDVCFFGMHVQEYGSDCPPPNTRRVYISYLDSIHFFRPRCLRTAVYHEILIGYLEYVKKLGYVTGHIWACPPSEGDDYIFHCHPPDQKIPKPKRLQEWYKKMLDKAFAERIIHDYKDIFKQATEDRLTSAKELPYFEGDFWPNVLEESIKELEQEEEERKKEESTAASETTEGSQGDSKNAKKKNNKKTNKNKSSISRANKKKPSMPNVSNDLSQKLYATMEKHKEVFFVIHLHAGPVINTLPPIVDPDPLLSCDLMDGRDAFLTLARDKHWEFSSLRRSKWSTLCMLVELHTQGQDRFVYTCNECKHHVETRWHCTVCEDYDLCINCYNTKSHAHKMVKWGLGLDDEGSSQGEPQSKSPQESRRLSIQRCIQSLVHACQCRNANCSLPSCQKMKRVVQHTKGCKRKTNGGCPVCKQLIALCCYHAKHCQENKCPVPFCLNIKHKLRQQQIQHRLQQAQLMRRRMATMNTRNVPQQSLPSPTSAPPGTPTQQPSTPQTPQPPAQPQPSPVSMSPAGFPSVARTQPPTTVSTGKPTSQVPAPPPPAQPPPAAVEAARQIEREAQQQQHLYRVNINNSMPPGRTGMGTPGSQMAPVSLNVPRPNQVSGPVMPSMPPGQWQQAPLPQQQPMPGLPRPVISMQAQAAVAGPRMPSVQPPRSISPSALQDLLRTLKSPSSPQQQQQVLNILKSNPQLMAAFIKQRTAKYVANQPGMQPQPGLQSQPGMQPQPGMHQQPSLQNLNAMQAGVPRPGVPPQQQAMGGLNPQGQALNIMNPGHNPNMASMNPQYREMLRRQLLQQQQQQQQQQQQQQQQQQGSAGMAGGMAGHGQFQQPQGPGGYPPAMQQQQRMQQHLPLQGSSMGQMAAQMGQLGQMGQPGLGADSTPNIQQALQQRILQQQQMKQQIGSPGQPNPMSPQQHMLSGQPQASHLPGQQIATSLSNQVRSPAPVQSPRPQSQPPHSSPSPRIQPQPSPHHVSPQTGSPHPGLAVTMASSIDQGHLGNPEQSAMLPQLNTPSRSALSSELSLVGDTTGDTLEKFVEGL

SEQ ID NO: 44249 - protein, 191 aa, Homo sapiens
MENLVAYAKKVEGDMYESANSRDEYYHLLAEKIYKIQKELEEKRRSRLHKQGILGNQPALPAPGAQPPVIPQAQPVRPPRMNSFNPMSLGNVQLPQAPMGPRAASPMNHSVQMNSMGSVPGMAISPSRMPQPPNMMGAHTNNMMAQAPAQSQFLPQNQFPSSSGAMSVGMGQPPAQTGVSQVLCPTGTVAP

SEQ ID NO: 44250 - protein, 235 aa, Homo sapiens
MELALNGAYATFIVTNYWESCSQEQEVKQGKLLADLARRLGLHYVVYSGLENIKKLTAGRLAAAHFDGKGEVEEYFRDIGVPMTSVRLPCYFENLLSHFLPQKAPDGKSYLLSLPTGDVPMDGMSVSDLGPVVLSLLKMPEKYVGQNIGLSTCRHTAEEYAALLTKHTRKVVHDAKMTPEDYEKLGFPGARDLANMFRFYALRPDRDIELTLRLNPKALTLDQWLEQHKGDFNLL

SEQ ID NO: 44251 - protein, 289 aa, Homo sapiens [sequence omitted]

SEQ ID NO: 44252 - protein, 414 aa, Homo sapiens
MGEGKKRVSSGSSERGSKSPLKRAQEQSPRKRGRPPKDEKDLTIPESSTVKGMMAGPMAAFKWQPTASEPVKDADPHFHHFLLSQTEKPAVCYQAITKKLKICEEETGSTSIQAADSTAVNGSITPTDKKIGFLGLGLMGSGIVSNLLKMGHTVTVWNRTAEKCDLFIQEGARLGRTPAEVVSTCDITFACVSDPKAAKDLVLGPSGVLQGIRPGKCYVDMSTVDADTVTELAQVIVSRGGRFLEAPVSGNQQLSNDGMLVILAAGDRGLYEDCSSCFQAMGKTSFFLGEVGNAAKMMLIVNMVQGSFMATIAEGLTLAQVTGQSQQTLLDILNQGQLASIFLDQKCQNILQGNFKPDFYLKYIQKDLRLAIALGDAVNHPTPMAAAANEVYKRAKALDQSDNDMSAVYRAYIH

SEQ ID NO: 44253 - protein, 1007 aa, Homo sapiens [sequence omitted]

SEQ ID NO: 44254 - protein, 416 aa, Homo sapiens
MQYHALSLAMHGFSVTLLGFCNSKPHDELLQNNRIQIVGLTELQSLAVGPRVFQYGVKVVLQAMYLLWKLMWREPGAYIFLQNPPGLPSIAVCWFVGCLCGSKLVIDWHNYGYSIMGLVHGPNHPLVLLAKWYEKFFGRLSHLNLCVTNAMREDLADNWHIRAVTVYDKPASFFKETPLDLQHRLFMKLGSMHSPFRARSEPEDPVTERSAFTERDAGSGLVTRLRERPALLVSSTSWTEDEDFSILLAALEKFEQLTLDGHNLPSLVCVITGKGPLREYYSRLIHQKHFQHIQVCTPWLEAEDYPLLLGSADLGVCLHTSSSGLDLPMKVVDMFGCCLPVCAVNFKCLHELVKHEENGLVFEDSEELAAQLQMLFSNFPDPAGKLNQFRKNLRESQQLRWDESWVQTVLPLVMDT

SEQ ID NO: 44255 - protein, 153 aa, Homo sapiens
MCRPRAYIFSDCHSRVLEQLRGNVLLNGLSLEADITAKLDSPRVTVAQLDWDVATVHQLSAFQPDVVIAADVLYCPEAIMSLVGVLRRLAACREHQRAPEVYVAFTVRNPETCQLFTTELGRAGIRWEVEPRHEQKLFPYEEHLEMAMLNLTL

SEQ ID NO: 44256 - protein, 92 aa, Homo sapiens
MDDFLQKLRQKIKIGVVGGSDFEKVQEQLGNDVVEKYDYVFPENGLVAYKDGKLLCRQNIQSHLGEALIQDLINYCLSYIAKIKLPKKRKKI

SEQ ID NO: 44257 - protein, 50 aa, Homo sapiens
MPWTSRPDHAAAAGWGHHLDGDGSPGGDPPLPPRPTCSPQKLRANREVPV

SEQ ID NO: 44258 - protein, 122 aa, Homo sapiens [sequence omitted]

SEQ ID NO: 44259 - protein, 113 aa, Homo sapiens
MPGPTTGLVTGPDGKGMNPPSYYTQPAPIPNNNPITVQTVYVQHPITFLDRPIQMCCPSCNKMIVSQLSYNAGALTWLSCGSLCLLGQECSGTIVALRSFDLLGSCNPPSSAS

SEQ ID NO: 44260 - protein, 732 aa, Homo sapiens
MPLTSILPLQVEESALPSAVLANGGKMPFTMPEAFLDDGDMVLGDELDDLLDSAPETNETVMPSALVRGPLQTASVSPSMPFSASLLGTLPIGARYAPPPSFSEFYPPLTSSLEDFCSSLNSFSMSESKRDLSTSTSREGTPLNNSNSSLLLMNGPGSLFASENFLGISSQPRNDFGNFFGSAVTKPSSSVTPRHPLEGTHELRQACQICFVKSGPKLMDFTYHANIDHKCKKDILIGRIKNVEDKSWKKIRPRPTKTNYEGPYYICKDVAAEEECRYSGHCTFAYCQEEIDVWTLERKGAFSREAFFGGNGKINLTVFKLLQEHLGEFIFLCEKCFDHKPRMISKRNKDNSTACSHPVTKHEFEDNKCLVHILRETTVKYSKIRSFHGQCQLDLCRHEVRYGCLREDECFYAHSLVELKVWIMQNETGISHDAIAQESKRYWQNLEANVPGAQVLGNQIMPGFLNMKIKFVCAQCLRNGQVIEPDKNRKYCSAKARHSWTKDRRAMRVMSIERKKWMNIRPLPTKKQMPLQFDLCNHIASGKKCQYVGNCSFAHSPEEREVWTYMKENGIQDMEQFYELWLKSQKNEKSEDIASQSNKENGKQIHMPTDYAEVTVDFHCWMCGKNCNSEKQWQGHISSEKHKEKVFHTEDDQYCWQHRFPTGYFSICDRYMNGTCPEGNSCKFAHGNAELHEWEERRDALKMKLNKARKDHLIGPNDNDFGKYSFLFKDLN

SEQ ID NO: 44261 - protein, 661 aa, Homo sapiens
MDEERSSMLPTMAAGLNSILFAINIDNKDLNGQSKFAPTVSDLLKESTQNVTSLLKESTQGVSSLFREITASSAVSILIKPEQETDPLPVVSRNVSADAKCKKERKKKKKVTNIISFDDEEDEQNSGDVFKKTPGAGESSEDNSDRSSVNIMSAFESPFGPNSNGSQSSNSWKIDSLSLNGEFGYQKLDVKSIDDEDVDENEDDVYGNSSGRKHRGHSESPEKPLEGNTCLSQMHSWAPLKVLHNDSDILFPVSGVGSYSPADAPLGSLENGTGPEDHVLPDPGLRYSVEASSPGHGSPLSSLLPSASVPESMTISELRQATVAMMNRKDELEEENRSLRNLLDGEMEHSAALRQEVDTLKRKVAEQEERQGMKVQALARENEVLKVQLKKYVGAVQMLKREGQTAEVPNLWSVDGEVTVAEQKPGEIAEELASSYERKLIEVAEMHGELIEFNERLHRALVAKEALVSQMRQELIDLRGPVPGDLSQTSEDQSLSDFEISNRALINVWIPSVFLRGKAANAFHVYQVYIRIKDDEWNIYRRYTEFRSLHHKLQNKYPQVRAYNFPPKKAIGNKDAKFVEERRKQLQNYLRSVMNKVIQMVPEFAASPKKETLIQLMPFFVDITPPGEPVNSRPKAASRFPKLSRGQPRETRNVEPQSGDL

SEQ ID NO: 44262 - protein, 905 aa, Homo sapiens [sequence omitted]

SEQ ID NO: 44263 - protein, 78 aa, Homo sapiens
MDLERDEPLKSTGPQISVSEFSCHCCYDILVNPTTLNCGHSFCRHCLALWWASSKKTECPECREKWEGFPKVSILLRL

SEQ ID NO: 44264 - protein, 130 aa, Homo sapiens
MDLERDEPLKSTGPQISVSEFSCHCCYDILVNPTTLNCGHSFCRHCLALWWASSKKTECPECREKWEGFPKVSILLRWSCSSITGAAGNLNTTSWSTRLWPNGRRKKLSSGWSSWALGHLFTGKGFYLNE

SEQ ID NO: 44265 - protein, 310 aa, Homo sapiens
MQRKMGRFPQSQYSPQVVLLVYHWSSRESEHDLLVHKAVAKWTAEEVVLWLEQLGPWASLYRERFLSERVNGRLLLTLTEEEFSKTPYTIENSSHRRAILMELERVKALGVKPPQNLWEYKAVNPGRSLFLLYALKSSPRLSLLYLYLFDYTDTFLPFIHTICPLQEDSSGEDIVTKLLDLKEPTWKQWREFLVKYSFLPYQLIAEFAWDWLEVHYWTSRFLIINAMLLSVLELFSFWRIWSRSELKTVPQRMWSHFWKVSTQGLFVAMFWPLIPQFVCNCLFYWALYFNPIINIDLVVKELRRLETQVL

SEQ ID NO: 44266 - protein, 148 aa, Homo sapiens
MAKIQRLREVLVRRESELRFMMDDIQLCKDIMDLKQELQNLVAIPEKEKTKLQKQREDELIQKIHKLVQKRDFLVDDAEVERLREQEEDKEMADFLRIKLKPLDKVTKSPASSRAEKKAEPPPSKPTVAKTGLALIKDCCGATQCNIM

SEQ ID NO: 44267 - protein, 1691 aa, Homo sapiens
MENKKVAVELKDVPSPLHAGSKLFPAVPLPDIRSLQQPKIQLSSVPKVSCCAHCPNEPSTSPMRFGGGGGGSGGTSSLIHPGALLDSQSTRTITCQVGSGFAFQSASSLQNASARNNLAGIASDFPSMCLESNLSSCKHLPCCGKLHFQSCHGNVHKLHQFPSLQGCTSAGYFPCSDFTSGAPGHLEEHISQSELTPHLCTNSLHLNVVPPVCLKGSLYCEDCLNKPARNSIIDAAKVWPNIPPPNTQPAPLAVPLCNGCGTKGTGKETTLLLATSLGKAASKFGSPEVAVAGQVLENLPPIGVFWDIENCSVPSGRSATAVVQRIREKFFKGHREAEFICVCDISKENKEVIQELNNCQVTVAHINATAKNAADDKLRQSLRRFANTHTAPATVVLVSTDVNFALELSDLRHRHGFHIILVHKNQASEALLHHANELIRFEEFISDLPPRLPLKMPQCHTLLYVYNLPANKDGKSVSNRLRRLSDNCGGKVLSITGCSAILRFINQDSAERAQKRMENEDVFGNRIIVSFTPKNRELCETKSSNAIADKVKSPKKLKNPKLCLIKDASEQSSSAKATPGKGSQANSGSATKNTNVKSLQELCRMESKTGHRNSEHQQGHLRLVVPTHGNSSAAVSTPKNSGVAEPVYKTSQKKENLSARSVTSSPVEKKDKEETVFQVSYPSAFSKLVASRQVSPLLASQSWSSRSMSPNLLNRASPLAFNIANSSSEADCPDPFANGADVQVSNIDYRLSRKELQQLLQEAFARHGKVKSVELSPHTDYQLKAVVQMENLQDAIGAVNSLHRYKIGSKKILVSLATGAASKSLSLLSAETMSVLQDAPACCLPLFKFTDIYEKKFGHKLNVSDLYKLTDTVAIREQGNGRLVCLLPSSQARQSPLGSSQSHDGSSTNCSPIIFEELEYHEPVCRQHCSNKDFSEHEFDPDSYKIPFVILSLKTFAPQVHSLLQTHEGTVPLLSFPDCYIAEFGDLEVVQENQGGVPLEHFITCVPGVNIATAQNGIKVVKWIHNKPPPPNTDPWLLRSKSPVGNPQLIQFSREVIDLLKSQPSCVIPISHFIPSYHHHFAKQCRVSDYGYSKLIELLEAVPHVLQILGMGSKRLLTLTHRAQVKRFTQDLLKLLKSQASKQVIVREFSQAYHWCFSKDWDVTEYGVCELIDIVSEIPDTTICLSQQDNEMVICIPKRERTQDEIERTKQFSKDVVDLLRHQPHFRMPFNKFIPSYHHHFGRQCKLAYYGFTKLLELFEAIPDTLQVLECGEEKILTLTEVERFKALAAQFVKLLRSQKDNCLMMTDLLTEYAKTFGYTFRLQDYDVSSISALTQKLCHVVKVADIESGRQIQLINRKSLRSLTAQLLVLLMSWEGTTHLSVEELKRHYESTHNTPLNPCEYGFMTLTELLKSLPYLVEVFTNDKMEECVKLTSLYLFAKNVRSLLHTYHYQQIFLHEFSMAYTKYVGETLQPKTYGHSSVEELLGAIPQVVWIKGHGHKRIVVLKNDMKSRLSSLSLSPANHENQPSEGERILEVPESHTASELKLGADGSGPSHTEQELLRLTDDSPVDLLCAPVPSCLPSPQLRPDPVILQSADLIQFEERPQEPSEIMILNQEEKMEIPIPGKSKTLTSDSSSSCISAAVPVPPCPSSETSESLLSKDPVESPAKKQPKNRVKLAANFSLAPITKL

SEQ ID NO: 44268 - protein, 1526 aa, Homo sapiens
MENKKVAVELKDVPSPLHAGSKLFPAVPLPDIRSLQQPKIQLSSVPKVSCCAHCPNEPSTSPMRFGGGGGGSGGTSSLIHPGALLDSQSTRTITCQVGSGFAFQSASSLQNASARNNLAGIASDFPSMCLESNLSSCKHLPCCGKLHFQSCHGNVHKLHQFPSLQGCTSAGYFPCSDFTSGAPGHLEEHISQSELTPHLCTNSLHLNVVPPVCLKGSLYCEDCLNKPARNSIIDAAKVWPNIPPPNTQPAPLAVPLCNGCGTKGTGKETTLLLATSLGKAASKFGSPEVAVAGQVLENLPPIGVFWDIENCSVPSGRSATAVVQRIREKFFKGHREAEFICVCDISKENKEVIQELNNCQVTVAHINATAKNAADDKLRQSLRRFANTHTAPATVVLVSTDVNFALELSDLRHRHGFHIILVHKNQASEALLHHANELIRFEEFISDLPPRLPLKMPELCRMESKTGHRNSEHQQGHLRLVVPTHGNSSAAVSTPKNSGVAEPVYKTSQKKENLSARSVTSSPVEKKDKEETVFQVSYPSAFSKLVASRQVSPLLASQSWSSSEADCPDPFANGADVQVSNIDYRLSRKELQQLLQEAFARHGKVKSVELSPHTDYQLKAVVQMENLQDAIGAVNSLHRYKIGSKKILVSLATGAASKSLSLLSAETMSVLQDAPACCLPLFKFTDIYEKKFGHKLNVSDLYKLTDTVAIREQGNGRLVCLLPSSQARQSPLGSSQSHDGSSTNCSPIIFEELEYHEPVCRQHCSNKDFSEHEFDPDSYKIPFVILSLKTFAPQVHSLLQTHEGTVPLLSFPDCYIAEFGDLEVVQENQGGVPLEHFITCVPGVNIATAQNGIKVVKWIHNKPPPPNTDPWLLRSKSPVGNPQLIQFSREVIDLLKSQPSCVIPISHFIPSYHHHFAKQCRVSDYGYSKLIELLEAVPHVLQILGMGSKRLLTLTHRAQVKRFTQDLLKLLKSQASKQVIVREFSQAYHWCFSKDWDVTEYGVCELIDIVSEIPDTTICLSQQDNEMVICIPKRERTQDEIERTKQFSKDVVDLLRHQPHFRMPFNKFIPSYHHHFGRQCKLAYYGFTKLLELFEAIPDTLQVLECGEEKILTLTEVERFKALAAQFVKLLRSQKDNCLMMTDLLTEYAKTFGYTFRLQDYDVSSISALTQKLCHVVKVADIESGRQIQLINRKSLRSLTAQLLVLLMSWEGTTHLSVEELKRHYESTHNTPLNPCEYGFMTLTELLKSLPYLVEVFTNDKMEECVKLTSLYLFAKNVRSLLHTYHYQQIFLHEFSMAYTKYVGETLQPKTYGHSSVEELLGAIPQVVWIKGHGHKRIVVLKNDMKSRLSSLSLSPANHENQPSEGERILEVPESHTASELKLGADGSGPSHTEQELLRLTDDSPVDLLCAPVPSCLPSPQLRPDPVILQSADLIQFEERPQEPSEIMILNQEEKMEIPIPGKSKTLTSDSSSSCISAAVPVPPCPSSETSESLLSKDPVESPAKKQPKNRVKLAANFSLAPITKL

SEQ ID NO: 44269 - protein, 26 aa, Homo sapiens
MDDHLRKEEQKSTNIEDLHVSQAVNR

SEQ ID NO: 44270 - protein, 667 aa, Homo sapiens
MPEKVTRFCPLEGKANKNVQWDEDSVEYMPANPVRIAFVLVVHGRASRQLQRMFKAIYHKDHFYYIHVDKRSNYLHRQVLQVSRQYSNVRVTPWRMATIWGGASLLSTYLQSMRDLLEMTDWPWDFFINLSAADYPIRTNDQLVAFLSRYRDMNFLKSHGRDNARFIRKQGLDRLFLECDAHMWRLGDRRIPEGIAVDGGSDWFLLNRRFVEYVTFSTDDLVTKMKQFYSYTLLPAESFFHTVLENSPHCDTMVDNNLRITNWNRKLGCKCQYKHIVDWCGCSPNDFKPQDFHRFQQTARPTFFARKFEAVVNQEIIGQLDYYLYGNYPAGTPGLRSYWENVYDEPDGIHSLSDVTLTLYHSFARLGLRRAETSLHTDGENSCRYYPMGHPASVHLYFLADRFQGFLIKHHATNLAVSKLETLETWVMPKKVFKIASPPSDFGRLQFSEVGTDWDAKERLFRNFGGLLGPMDEPVGMQKWGKGPNVTVTVIWVDPVNVIAATYDILIESTAEFTHYKPPLNLPLRPGVWTVKILHHWVPVAETKFLVAPLTFSNRQPIKPEEALKLHNGPLRNAYMEQSFQSLNPVLSLPINPAQVEQARRNAASTGTALEGWLDSLVGGMWTAMDICATGPTACPVMQTCSQTAWSSFSPDPKSELGAVKPDGRLR

SEQ ID NO: 44271 - protein, 127 aa, Homo sapiens
MNVLADALKSINNAEKRGKRQVLIRPCSKVIVRFLTVMMKHGYIGEFEIIDDHRAGKIVVNLTGRLNKCGVISPRFDVQLKDLEKWQNNLLPSRQFGFIVLTTSAGIMDHEEARRKHTGGKILGFFF

SEQ ID NO: 44272 - protein, 108 aa, Homo sapiens
MNVLADALKSINNAEKRGKRQVLIRPCSKVIVRFLTVMMKHGYIGEFEIIDDHRAGKIVVNLTGRLNKVGVQWHDLGYCNLCLPGSSDSPASASLVAEITVWGDQPQI

SEQ ID NO: 44273 - protein, 46 aa, Homo sapiens
MNVLADALKSINNAEKRGKRQVLIRPCSKVIVRFLTVMMKHVSYLL

SEQ ID NO: 44274 - protein, 3385 aa, Homo sapiens
MTSLQSILENVDTPELLCKCVKCILLVARCYPHIFSTNFRDTVDILVGWHIDHTQKPSLTQQVSGWLQSLEPFWVADLAFSTTLLGQFLEDMEAYAEDLSHVASGESVDEDVPPPSVSLPKLAALLRVFSTVVRSIGERFSPIRGPPITEAYVTDVLYRVMRCVTAANQVFFSEAVLTAANECVGVLLGSLDPSMTIHCDMVITYGLDQLENCQTCGTDYIISVLNLLTLIVEQINTKLPSSFVEKLFIPSSKLLFLRYHKEKEVVAVAHAVYQAVLSLKNIPVLETAYKLILGEMTCALNNLLHSLQLPEACSEIKHEAFKNHVFNVDNAKFVVIFDLSALTTIGNAKNSLIGMWALSPTVFALLSKNLMIVHSDLAVHFPAIQYAVLYTLYSHCTRHDHFISSSLSSSSPSLFDGAVISTVTTATKKHFSIILNLLGILLKKDNLNQDTRKLLMTWALEAAVLMKKSETYAPLFSLPSFHKFCKGLLANTLVEDVNICLQACSSLHALSSSLPDDLLQRCVDVCRVQLVHSGTRIRQAFGKLLKSIPLDVVLSNNNHTEIQEISLALRSHMSKAPSNTFHPQDFSDVISFILYGNSHRTGKDNWLERLFYSCQRLDKRDQSTIPRNLLKTDAVLWQWAIWEAAQFTVLSKLRTPLGRAQDTFQTIEGIIRSLAAHTLNPDQDVSQWTTADNDEGHGNNQLRLVLLLQYLENLEKLMYNAYEGCANALTSPPKVIRTFFYTNRQTCQDWLTRIRLSIMRVGLLAGQPAVTVRHGFDLLTEMKTTSLSQGNELEVTIMMVVEALCELHCPEAIQGIAVWSSSIVGKNLLWINSVAQQAEGRFEKASVEYQEHLCAMTGVDCCISSFDKSVLTLANAGRNSASPKHSLNGESRKTVLSKPTDSSPEVINYLGNKACECYISIADWAAVQEWQNAIHDLKKSTSSTSLNLKADFNYIKSLSSFESGKFVECTEQLELLPGENINLLAGGSKEKIDMKKLLPNMLSPDPRELQKSIEVQLLRSSVCLATALNPIEQDQKWQSITENVVKYLKQTSRIAIGPLRLSTLTVSQSLPVLSTLQLYCSSALENTVSNRLSTEDCLIPLFSEALRSCKQHDVRPWMQALRYTMYQNQLLEKIKEQTVPIRSHLMELGLTAAKFARKRGNVSLATRLLAQCSEVQLGKTTTAQDLVQHFKKLSTQGQVDEKWGPELDIEKTKLLYTAGQSTHAMEMLSSCAISFCKSVKAEYAVAKSILTLAKWIQAEWKEISGQLKQVYRAQHQQNFTGLSTLSKNILTLIELPSVNTMEEEYPRIESESTVHIGVGEPDFILGQLYHLSSVQAPEVAKSWAALASWAYRWGRKVVDNASQGEGVRLLPREKSEVQNLLPDTITEEEKERIYGILGQAVCRPAGIQDEDITLQITESEDNEEDDMVDVIWRQLISSCPWLSELDESATEGVIKVWRKVVDRIFSLYKLSCSAYFTFLKLNAGQIPLDEDDPRLHLSHRVEQSTDDMIVMATLRLLRLLVKHAGELRQYLEHGLETTPTAPWRGIIPQLFSRLNHPEVYVRQSICNLLCRVAQDSPHLILYPAIVGTISLSSESQASGNKFSTAIPTLLGNIQGEELLVSECEGGSPPASQDSNKDEPKSGLNEDQAMMQDCYSKIVDKLSSANPTMVLQVQMLVAELRRVTVLWDELWLGVLLQQHMYVLRRIQQLEDEVKRVQNNNTLRKEEKIAIMREKHTALMKPIVFALEHVRSITAAPAETPHEKWFQDNYGDAIENALEKLKTPLNPAKPGSSWIPFKEIMLSLQQRAQKRASYILRLEEISPWLAAMTNTEIALPGEVSARDTVTIHSVGGTITILPTKTKPKKLLFLGSDGKSYPYLFKGLEDLHLDERIMQFLSIVNTMFATINRQETPRFHARHYSVTPLGTRSGLIQWVDGATPLFGLYKRWQQREAALQAQKAQDSYQTPQNPGIVPRPSELYYSKIGPALKTVGLSLDVSRRDWPLHVMKAVLEELMEATPPNLLAKELWSSCTTPDEWWRVTQSYARSTAVMSMVGYIIGLGDRHLDNVLIDMTTGEVVHIDYNVCFEKGKSLRVPEKVPFRMTQNIETALGVTGVEGVFRLSCEQVLHIMRRGRETLLTLLEAFVYDPLVDWTAGGEAGFAGAVYGGGGQQAESKQSKREMEREITRSLFSSRVAEIKVNWFKNRDEMLVVLPKLDGSLDEYLSLQEQLTDVEKLQGKLLEEIEFLEGAEGVDHPSHTLQHRYSEHTQLQTQQRAVQEAIQVKLNEFEQWITHYQAAFNNLEATQLASLLQEISTQMDLGPPSYVPATAFLQNAGQAHLISQCEQLEGEVGALLQQRRSVLRGCLEQLHHYATVALQYPKAIFQKHRIEQWKTWMEELICNTTVERCQELYRKYEMQYAPQPPPTVCQFITATEMTLQRYAADINSRLIRQVERLKQEAVTVPVCEDQLKEIERCIKVFLHENGEEGSLSLASVIISALCTLTRRNLMMEGAASSAGEQLVDLTSRDGAWFLEELCSMSGNVTCLVQLLKQCHLVPQDLDIPNPMEASETVHLANGVYTSLQELNSNFRQIIFPEALRCLMKGEYTLESMLHELDGLIEQTTDGVPLQTLVESLQAYLRNAAMGLEEETHAHYIDVARLLHAQYGELIQPRNGSVDETPKMSAGQMLLVAFDGMFAQVETAFSLLVEKLNKMEIPIAWRKIDIIREARSTQVNFFDDDNHRQVLEEIFFLKRLQTIKEFFRLCGTFSKTLSGSSSLEDQNTVNGPVQIVNVKTLFRNSCFSEDQMAKPIKAFTADFVRQLLIGLPNQALGLTLCSFISALGVDIIAQVEAKDFGAESKVSVDDLCKKAVEHNIQIGKFSQLVMNRATVLASSYDTAWKKHDLVRRLETSISSCKTSLQRVQLHIAMFQWQHEDLLINRPQAMSVTPPPRSAILTSMKKKLHTLSQIETSIATVQEKLAALESSIEQRLKWAGGANPALAPVLQDFEATIAERRNLVLKESQRASQVTFLCSNIIHFESLRTRTAEALNLDAALFELIKRCQQMCSFASQFNSSVSELELRLLQRVDTGLEHPIGSSEWLLSAHKQLTQDMSTQRAIQTEKEQQIETVCETIQNLVDNIKTVLTGHNRQLGDVKHLLKAMAKDEEAALADGEDVPYENSVRQFLGEYKSWQDNIQTVLFTLVQAMGQVRSQEHVEMLQEITPTLKELKTQSQSIYNNLVSFASPLVTDATNECSSPTSSATYQPSFAAAVRSNTGQKTQPDVMSQNARKLIQKNLATSADTPPSTVPGTGKSVACSPKKAVRDPKTGKAVQERNSYAVSVWKRVKAKLEGRDVDPNRRMSVAEQVDYVIKEATNLDNLAQLYEGWTAWV

SEQ ID NO: 44275 - protein, 78 aa, Homo sapiens
MAASRCLRWPSCSSSAMSSCAVATLSGSASCPGLPVWRVTPPSPRDTSESRASASCWRVTTSMRCACLRTCWATARRT

SEQ ID NO: 44276 - protein, 231 aa, Homo sapiens [sequence omitted]

SEQ ID NO: 44277 - protein, 883 aa, Homo sapiens
MFAATADPAALAAAMDSSRRKRDRDDNSVVGSDFEPWTNKRGEILARYTTTEKLSINLFMGSEKGKAGTATLAMSEKVRTRLEELDDFEEGSQKELLNLTQQDYVNRIEELNQSLKDAWASDQKVKALKIVIQCSKLLSDTSVIQFYPSKFVLITDILDTFGKLVYERIFSMCVDSRSVLPDHFSPENANDTAKETCLNWFFKIASIRELIPRFYVEASILKCNKFLSKTGISECLPRLTCMIRGIGDPLVSVYARAYLCRVGMEVAPHLKETLNKNFFDFLLTFKQIHGDTVQNQLVVQGVELPSYLPLYPPAMDWIFQCISYHAPEALLTEMMERCKKLGNNALLLNSVMSAFRAEFIATRSMDFIGMIKECDESGFPKHLLFRSLGLNLALADPPESDRLQILNEAWKVITKLKNPQDYINCAEVWVEYTCKHFTKREVNTVLADVIKHMTPDRAFEDSYPQLQLIIKKVIAHFHDFSVLFSVEKFLPFLDMFQKESVRVEVCKCIMDAFIKHQQEPTKDPVILNALLHVCKTMHDSVNALTLEDEKRMLSYLINGFIKMVSFGRDFEQQLSFYVESRSMFCNLEPVLVQLIHSVNRLAMETRKVMKGNHSRKTAAFVRACVAYCFITIPSLAGIFTRLNLYLHSGQVALANQCLSQADAFFKAAISLVPEVPKMINIDGKMRPSESFLLEFLCNFFSTLLIVPDHPEHGVLFLVRELLNVIQDYTWEDNSDEKIRIYTCVLHLLSAMSQETYLYHIDKVDSNDSLYGGDSKFLAENNKLCETVMAQILEHLKTLAKDEALKRQSSLGLSFFNSILAHGDLRNNKLNQLSVNLWHLAQRHGCADTRTMVKTLEYIKKQSKQPDMTHLTELALRLPLQTRT

SEQ ID NO: 44278 - protein, 790 aa, Homo sapiens
MFAATADPAALAAAMDSSRRKRDRDDNSVVGSDFEPWTNKRGEILARYTTTEKLSINLFMGSEKGKAGTATLAMSEKVRTRLEELDDFEEGSQKELLNLTQQDYVNRIEELNQSLKDAWASDQKVKALKIVIQCSKLLSDTSVIQFYPSKFVLITDILDTFGKLVYERIFSMCVDSRSVLPDHFSPENANDTAKETCLNWFFKIASIRELIPRFYVEASILKCNKFLSKTGISECLPRLTCMIRGIGDPLVSVYARAYLCRALLTEMMERCKKLGNNALLLNSVMSAFRAEFIATRSMDFIGMIKECDESGFPKHLLFRSLGLNLALADPPESDRLQILNEAWKVITKLKNPQDYINCAEVWVEYTCKHFTKREVNTVLADVIKHMTPDRAFEDSYPQLQLIIKKVIAHFHDFSVLFSVEKFLPFLDMFQKESVRVEVCKCIMDAFIKHQQEPTKDPVILNALLHVCKTMHDSVNALTLEDEKRMLSYLINGFIKMVSFGRDFEQQLSFYVESRSMFCNLEPVLVQLIHACVAYCFITIPSLAGIFTRLNLYLHSGQVALANQCLSQADAFFKAAISLVPEVPKMINIDGKMRPSESFLLEFLCNFFSTLLIVPDHPEHGVLFLVRELLNVIQDYTWEDNSDEKIRIYTCVLHLLSAMSQETYLYHIDKVDSNDSLYGGDSKFLAENNKLCETVMAQILEHLKTLAKDEALKRQSSLGLSFFNSILAHGDLRNNKLNQLSVNLWHLAQRHGCADTRTMVKTLEYIKKQSKQPDMTHLTELALRLPLQTRT

SEQ ID NO: 44279 - protein, 395 aa, Homo sapiens
MRAHQVLTFLLLFVITSVASENASTSRGCGLDLLPQYVSLCDLDAIWGIVVEAVAGAGALITLLLMLILLVRLPFIKEKEKKSPVGLHFLFLLGTLGLFGLTFAFIIQEDETICSVRRFLWGVLFALCFSCLLSQAWRVRRLVRHGTGPAGWQLVGLALCLMLVQVIIAVEWLVLTVLRDTRPACAYEPMDFVMALIYDMVLLVVTLGLALFTLCGKFKRWKLNGAFLLITAFLSVLIWVAWMTMYLFGNVKLQQGDAWNDPTLAITLAASGWVFVIFHAIPEIHCTLLPALQENTPNYFDTSQPRMRETAFEEDVQLPRAYMENKAFSMDEHNAALRTAGFPNGSLGKRPSGSLGKRPSAPFRSNVYQPTEMAVVLNGGTIPTAPPSHTGRHLW

SEQ ID NO: 44280 - protein, 743 aa, Homo sapiens [sequence omitted]

SEQ ID NO: 44281 - protein, 649 aa, Homo sapiens
MAIDTLNPNYCRSKGEQIALNVDGACADETSTYSSKLMDKQTFCSSQTTSNTSRYAAALYRQGELHLTPLHGILQLRPSFSYLDKADAKHREREAANEAGDSSQDEAEDDVKQITVRFSRPESEQARQRRVQSYEFLQKKHAEEPWVHLHYYGLRDSRSEHERQYLLCPGSSGVENTELVKSPSEYLMMLMPPSQEEEKDKPVAPSNVLSMAQLRTLPLADQIKILMKNVKVMPFANLMSLLGPSIDSVAVLRGIQKVAMLVQGNWVVKSDILYPKDSSSPHSGVPAEVLCRGRDFVMWKFTQSRWVVRKEVATVTKLCAEDVKDFLEHMAVVRINKGWEFILPYDGEFIKKHPDVVQRQHMLWTGIQAKLEKVYNLVKETMPKKPDAQSGPAGLVCGDQRIQVAKTKAQQNHALLERELQRRKEQLRVPAVPPGVRIKEEPVSEEGEEDEEQEAEEEPMDTSPSGLHSKLANGLPLGRAAGTDSFNGHPPQGCASTPVARELKAFVEATFQRQFVLTLSELKRLFNLHLASLPPGHTLFSGISDRMLQDTVLAAGCKQILVPFPPQTAASPDEQKVFALWESGDMSDQHRQVLLEIFSKNYRVRRNMIQSRLTQECGEDLSKQEVDKVLKDCCVSYGGMWYLKGTVQS

SEQ ID NO: 44282 - protein, 684 aa, Homo sapiens
MILVKEDIKKFEQDTSQSMQVLVEIDQVKSRMQLAAESLQEADKWSTLSADIEETFKTQDIAVISAKLTGMQNSLMMLVDTPDYSEKCVHLEALKNRLEALASPQIVAAFTSQAVDQSKVFVKVFTEIDRMPQLLAYYYKCHKVQLLAAWQELCQSDLSLDRQLTGLYDALLGAWHTQIQWATQVFQKPHEVVMVLLIQTLGALMPSLPSCLSNGVERAGPEQELTRLLEFYDATAHFAKGLEMALLPHLHEHNLVKVTELVDAVYDPYKPYQLKYGDMEESNLLIQMSAVPLEHGEVIDCVQELSHSVNKLFGLASAAVDRCVRFTNGLGTCGLLSALKSLFAKYVSDFTSTLQSIRKKCKLDHIPPNSLFQEDWTAFQNSIRIIATCGELLRHCGDFEQQLANRILSTAGKYLSDSCSPRSLAGFQESILTDKKNSAKNPWQEYNYLQKDNPAEYASLMEILYTLKEKGSSNHNLLAAPRAALTRLNQQAHQLAFDSVFLRIKQQLLLISKMDSWNTAGIGETLTDELPAFSLTPLEYISNIGQYIMSLPLNLEPFVTQEDSALELALHAGKLPFPPEQGDELPELDNMADNWLGSIARATMQTYCDAILQIPELSPHSAKQLATDIDYLINVMDALGLQPSRTLQHIVTLLKTRPEDYRQVSKGLPRRLATTVATMRSVNY

SEQ ID NO: 44283 - protein, 1759 aa, Homo sapiens [sequence omitted]

SEQ ID NO: 44284 - protein, 1725 aa, Homo sapiens [sequence omitted]

SEQ ID NO: 44285 - protein, 85 aa, Homo sapiens [sequence omitted]

SEQ ID NO: 44286 - protein, 1709 aa, Homo sapiens
MDADSASSSESERNITIMASGNTGGEKDGLRNSTGLGSQNKFVVGSSSNNVGHGSSTGPWGFSHGAIISTCQVSVDAPESKSESSNNRMNAWGTVSSSSNGGLNPSTLNSASNHGAWPVLENNGLALKGPVGSGSSGINIQCSTIGQMPNNQSINSKVSGGSTHGTWGSLQETCESEVSGTQKVSFSGQPQNITTEMTGPNNTTNFMTSSLPNSGSVQNNELPSSNTGAWRVSTMNHPQMQAPSGMNGTSLSHLSNGESKSGGSYGTTWGAYGSNYSGDKCSGPNGQANGDTVNATLMQPGVNGPMGTNFQVNTNKGGGVWESGAANSQSTSWGSGNGANSGGSRRGWGTPAQNTGTNLPSVEWNKLPSNQHSNDSANGNGKTFTNGWKSTEEEDQGSATSQTNEQSSVWAKTGGTVESDGSTESTGRLEEKGTGESQSRDRRKIDQHTLLQSIVNRTDLDPRVLSNSGWGQTPIKQNTAWDTETSPRGERKTDNGTEAWGSSATQTFNSGACIDKTSPNGNDTSSVSGWGDPKPALRWGDSKGSNCQGGWEDDSAATGMVKSNQWGNCKEEKAAWNDSQKNKQGWGDGQKSSQGWSVSASDNWGETSRNNHWGEANKKSSSGGSDSDRSVSGWNELGKTSSFTWGNNINPNNSSGWDESSKPTPSQGWGDPPKSNQSLGWGDSSKPVSSPDWNKQQDIVGSWGIPPATGKPPGTGWLGGPIPAPAKEEEPTGWEEPSPESIRRKMEIDDGTSAWGDPSKYNYKNVNMWNKNVPNGNSRSDQQAQVHQLLTPASAISNKEASSGSGWGEPWGEPSTPATTVDNGTSAWGKPIDSGPSWGEPIAAASSTSTWGSSSVGPQALSKSGPKSMQDGWCGDDMPLPGNRPTGWEEEEDVEIGMWNSNSSQELNSSLNWPPYTKKMSSKGLSGKKRRRERGMMKGGNKQEEAWINPFVKQFSNISFSRDSPEENVQSNKMDLSGGMLQDKRMEIDKHSLNIGDYNRTVGKGPGSRPQISKESSMERNPYFDKDGIVADESQNMQFMSSQSMKLPPSNSALPNQALGSIAGLGMQNLNSVRQNGNPSMFGVGNTAAQPRGMQQPPAQPLSSSQPNLRAQVPPPLLSPQVPVSLLKYAPNNGGLNPLFGPQQVAMLNQLSQLNQLSQISQLQRLLAQQQRAQSQRSVPSGNRPQQDQQGRPLSVQQQMMQQSRQLDPNLLVKQQTPPSQQQPLHQPAMKSFLDNVMPHTTPELQKGPSPINAFSNFPIGLNSNLNVNMDMNSIKEPQSRLRKWTTVDSISVNTSLDQNSSKHGAISSGFRLEESPFVPYDFMNSSTSPASPPGSIGDGWPRAKSPNGSSSVNWPPEFRPGEPWKGYPNIDPETDPYVTPGSVINNLSINTVREVDHLRDRNSGSSSSLNTTLPSTSAWSSIRASNYNVPLSSTAQSTSARNSDSKLTWSPGSVTNTSLAHELWKVPLPPKNITAPSRPPPGLTGQKPPLSTWDNSPLRIGGGWGNSDARYTPGSSWGESSSGRITNWLVLKNLTPQIDGSTLRTLCMQHGPLITFHLNLPHGNALVRYSSKEEVVKAQKSLHMCVLGNTTILAEFASEEEISRFFAQSQSLTPSPGWQSLGSSQSRLGSLDCSHSFSSRTDLNHWNGAGLSGTNCGDLHGTSLWGTPHYSTSLWGPPSSSDPRGISSPSPINAFLSVDHLGGGGESM

SEQ ID NO: 44287 - protein, 804 aa, Homo sapiens
MQEASTQLEDSLLGKMLETCGDAENQLALELSQHEVFVEKEIVDPLYGIAEVEIPNIQKQRKQLARLVLDWDSVRARWNQAHKSSGTNFQGLPSKIDTLKEEMDEAGNKVEQCKDQLAADMYNFMAKEGEYGKFFVTLLEAQADYHRKALAVLEKTLPEMRAHQDKWAEKPAFGTPLEEHLKRSGREIALPIEACVMLLLETGMKEEGLFRIGAGASKLKKLKAALDCSTSHLDEFYSDPHAVAGALKSYLRELPEPLMTFNLYEEWTQVASVQDQDKKLQDLWRTCQKLPPQNFVNFRYLIKFLAKLAQTSDVNKMTPSNIAIVLGPNLLWARNEGTLAEMAAATSVHVVAVIEPIIQHADWFFPEEVEFNVSEAFVPLTTPSSNHSFHTGNDSDSGTLERKRPASMAVMEGDLVKKESFGVKLMDFQAHRRGGTLNRKHISPAFQPPLPPTDGSTVVPAGPEPPPQSSRAESSSGGGTVPSSAGILEQGPSPGDGSPPKPKDPVSAAVPAPGRNNSQIASGQNQPQAAAGSHQLSMGQPHNAAGPSPHTLRRAVKKPAPAPPKPGNPPPGHPGGQSSSGTSQHPPSLSPKPPTRSPSPPTQHTGQPPGQPSAPSQLSAPRRYSSSLSPIQAPNHPPPQPPTQATPLMHTKPNSQGPPNPMALPSEHGLEQPSHTPPQTPTPPSTPPLGKQNPSLPAPQTLAGGNPETAQPHAGTLPRPRPVPKPRNRPSVPPPPQPPGVHSAGDSSLTNTAPTASKIVTDSNSRVSEPHRSIFPEMHSDSASKDVPGRILLDIDNDTESTAL

SEQ ID NO: 44288 - protein, 726 aa, Homo sapiens
MQEASTQLEDSLLGKMLETCGDAENQLALELSQHEVFVEKEIVDPLYGIAEVEIPNIQKQRKQLARLVLDWDSVRARWNQAHKSSGTNFQGLPSKIDTLKEEMDEAGNKVEQCKDQLAADMYNFMAKEGEYGKFFVTLLEAQADYHRKALAVLEKTLPEMRAHQDKWAEKPAFGTPLEEHLKRSGREIALPIEACVMLLLETGMKEEGLFRIGAGASKLKKLKAALDCSTSHLDEFYSDPHAVAGALKSYLRELPEPLMTFNLYEEWTQVASVQDQDKKLQDLWRTCQKLPPQNFVNFRYLIKFLAKLAQTSDVNKMTPSNIAIVLGPNLLWARNEGTLAEMAAATSVHVVAVIEPIIQHADWFFPEEVEFNVSEAFVPLTTPSSNHSFHTGNDSDSGTLERKRPASMAVMEGDLVKKESPPKPKDPVSAAVPAPGRNNSQIASGQNQPQAAAGSHQLSMGQPHNAAGPSPHTLRRAVKKPAPAPPKPGNPPPGHPGGQSSSGTSQHPPSLSPKPPTRSPSPPTQHTGQPPGQPSAPSQLSAPRRYSSSLSPIQAPNHPPPQPPTQATPLMHTKPNSQGPPNPMALPSEHGLEQPSHTPPQTPTPPSTPPLGKQNPSLPAPQTLAGGNPETAQPHAGTLPRPRPVPKPRNRPSVPPPPQPPGVHSAGDSSLTNTAPTASKIVTDSNSRVSEPHRSIFPEMHSDSASKDVPGRILLDIDNDTESTAL

SEQ ID NO: 44289 - protein, 1051 aa, Homo sapiens
MWLGVPSQDKMEIRSCLPKLLLAHHKTLPYFIRNKLCKVIVDIGRQDWPMFYHDFFTNILQLIQSPVTTPLGLIMLKTTSEELACPREDLSVARKEELRKLLLDQVQTVLGLLTGILETVWDKHSVTAATPPPSPTSGESGDLLSNLLQSPSSAKLLNQPIPILDVESEYICSLALECLAHLFSWIPLSASITPSLLTTIFHFARFGCDIRARKMASVNGSSQNCVSGQERGRLGVLAMSCINELMSKNCVPMEFEEYLLRMFQQTFYLLQKITKDNNAHTVKSRLEELDESYIEKFTDFLRLFVSVHLRRIESYSQFPVVEFLTLLFKYTFHQPTHEGYFSCLDIWTLFLDYLTSKIKSRLGDKEAVLNRYEDALVLLLTEVLNRIQFRYNQAQLEELDDETLDDDQQTEWQRYLRQSLEVVAKVMELLPTHAFSTLFPVLQDNLEVYLGLQQFIVTSGSGHRLNITAENDCRRLHCSLRDLSSLLQAVGRLAEYFIGDVFAARFNDALTVVERLVKVTLYGSQIKLYNIETAVPSVLKPDLIDVHAQSLAALQAYSHWLAQYCSEVHRQNTQQFVTLISTTMDAITPLISTKVQDKLLLSACHLLVSLATTVRPVFLISIPAVQKVFNRITDASALRLVDKAQVLVCRALSNILLLPWPNLPENEQQWPVRSINHASLISALSRDYRNLKPSAVAPQRKMPLDDTKLIIHQTLSVLEDIVENISGESTKSRQICYQSLQESVQVSLALFPAFIHQSDVTDEMLSFFLTLFRGLRVQMGVPFTEQIIQTFLNMFTREQLAESILHEGSTGCRVVEKFLKILQVVVQEPGQVFKPFLPSIIALCMEQVYPIIAERPSPDVKAELFELLFRTLHHNWRYFFKSTVLASVQRGIAEEQMENEPQFSAIMQAFGQSFLQPDIHLFKQNLFYLETLNTKQKLYHKKIFRTAMLFQFVNVLLQVLVHKSHDLLQEEIGIAIYNMASVDFDGFFAAFLPEFLTSCDGVDANQKSVLGRNFKMDRDLPSFTQNVHRLVNDLRYYRLCNDSLPPGTVKL

SEQ ID NO: 44290 - protein, 349 aa, Homo sapiens
MKGVEESPKVPGEGPGHSEAETGPPQVLAGVPDQPEAPQPGPNTTAAPVDSGPKAGLAPETTETPAGASETAQATDLSLSPGGESKANCSPEDPCQETVSKPEVSKEATADQGSRLESAAPPEPAPEPAPQPDPRPDSQPTPKPALQPELPTQEDPTPEILSESVGEKQENGAVVPLQAGDGEEGPAPEPHSPPSKKSPPANGAPPRVLQQLVEEDRMRRAHSGHPGSPRGSLSRHPSSQLAGPGVEGGEGTQKPRDYIILAILSCFCPMWPVNIVAFAYAVMPAAGGRGRGPASGPGSQALKHRGAGGGSPHHHRLLRHQLRRVPALVAYVPCSGPWRHCGQYGGASV

SEQ ID NO: 44291 - protein, 126 aa, Homo sapiens
MGLKGSSAGQLVLITARVTTERTAGTCLYFSAVPGILPSSQPPISCSEEGAGNATLSPRMGEECVSVWSHEGLVLTKLLTSEELALCGSRLLVLGSFLLLFCGLLCCVTAMCFHPRRESHWSRTRL

SEQ ID NO: 44292 - protein, 406 aa, Homo sapiens
MTHLSMAMAFSFPPVASGQLHPQLGNTQHQTELGKELATTSTMPYQYPALTPEQKKELSDIAHRIVAPGKGILAADESTGSIAKRLQSIGTENTEENRRFYRQLLLTADDRVNPCIGGVILFHETLYQKADDGRPFPQVIKSKGGVVGIKVDKGVVPLAGTNGETTTQGLDGLSERCAQYKKDGADFAKWRCVLKIGEHTPSALAIMENANVLARYASICQQNGIVPIVEPEILPDGDHDLKRCQYVTEKVLAAVYKALSDHHIYLEGTLLKPNMVTPGHACTQKFSHEEIAMATVTALRRTVPPAVTGITFLSGGQSEEEASINLNAINKCPLLKPWALTFSYGRALQASALKAWGGKKENLKAAQEEYVKRALANSLACQGKYTPSGQAGAAASESLFVSNHAY

SEQ ID NO: 44293 - protein, 41 aa, Homo sapiens [sequence omitted]

SEQ ID NO: 44294 - protein, 955 aa, Homo sapiens [sequence omitted]

SEQ ID NO: 44295 - protein, 915 aa, Homo sapiens
MDLKVLQFKNKKLAERLEQRQACEDELRERIEKLEKRQATDDATLLIVNRYWAQLDETVEALLRCHESQGELSSAPEAPGTQEGPTCDGTPLPEPGTSELRDPLLMQLRPPLSEPALAFVVALGASSSEEVELELQGRMEFSKAAVSRVVEASDRLQRRVEELCQRVYSRGDSEPLSEAAQAHTRELGRENRRLQDLATQLQEKHHRISLEYSELQDKVTSAETKVLEMETTVEDLQWDIEKLRKREQKLNKHLAEALEQLNSGYYVSGSSSGFQGGQITLSMQKVALRSLPEEVVRETGEYRMLQAQFSLLYNESLQVKTQLDEARGLLLATKNSHLRHIEHMESDELGLQKKLRTEVIQLEDTLAQVRKEYEMLRIEFEQNLAANEQAGPINREMRHLISSLQNHNHQLKGDAQRYKRKLREVQAEIGKLRAQASGSAHSTPNLGHPEDSGVSAPAPGKEEGGPGPVSTPDNRKEMAPVPGTTTTTTSVKKEELVPSEEDFQGITPGAQGPSSRGREPEARPKRELREREGPSLGPPPVASALSRADREKAKVEETKRKESELLKGLRAELKKAQESQKEMKLLLDMYKSAPKEQRDKVQLMAAERKAKAEVDELRSRIRELEERDRRESKKIADEDALRRIRQAEEQIEHLQRKLGATKQEEEALLSEMDVTGQAFEDMQEQNGRLLQQLREKDDANFKLMSERIKANQIHKLLREEKDELGEQVLGLKSQVDAQLLTVQKLEEKERALQGSLGGVEKELTLRSQALELNKRKAVEAAQLAEDLKVQLEHVQTRLREIQPCLAESRAAREKESFNLKRAQEDISRLRRKLEKQRKVEVYADADEILQEEIKEYKARLTCPCCNTRKKDAVLTKCFHVFCFECVRGRYEARQRKCPKCNAAFGAHDFHRIYIS

SEQ ID NO: 44296 - protein, 257 aa, Homo sapiens
MGASQHSLRALSWRRLYLSRAKLKASSRTSALLSGFAMVAMVEVQLESDHEYPPGLLVAFSACTTVLVAVHLFALMVSTCLLPHIEAVSNIHNLNSVHQSPHQRLHRYVELAWGFSTALGTFLFLAEVVLVGWVKFVPIGAPLDTPTPMVPTSRVPGTLAPVATSLSPASNLPRSSASAAPSQAEPACPPRQACGGGGAHGPGWQAAMASTAIMVPVGLVFVAFALHFYRSLVAHKTDRYKQELEELNRLQGELQAV

SEQ ID NO: 44297 - protein, 91 aa, Homo sapiens
MVEVQLESDHEYPPGLLVAFSACTTVLVAVHLFALMVSTCLLPHIEAVSNIHNLNSVHQSPHQRLHRYVELAWGFSTALGTFLFLAEVVLR

SEQ ID NO: 44298 - protein, 1595 aa, Homo sapiens
MCRKYGEVEEVEILLHPRTRKHLGLARVLFTSTRGAKETVKNLHLTSVMGNIIHAQLDIKGQQRMKYYELIVNGSYTPQTVPTGGKALSEKFQGSGAATETAESRRRSSSDTAAYPAGTTAVGTPGNGTPCSQDTSFSSSRQDTPSSFGQFTPQSSQGTPYTSRGSTPYSQDSAYSSSTTSTSFKPRRSENSYQDAFSRRHFSASSASTTASTAIAATTAATASSSASSSSLSSSSSSSSSSSSSQFRSSDANYPAYYESWNRYQRHTSYPPRRATREEPPGAPFAENTAERFPPSYTSYLPPEPSRPTDQDYRPPASEAPPPEPPEPGGGGGGGGPSPEREEVRTSPRPASPARSGSPAPETTNESVPFAQHSSLDSRIEMLLKEQRSKFSFLASDTEEEEENSSMVLGARDTGSEVPSGSGHGPCTPPPAPANFEDVAPTGSGEPGATRESPKANGQNQASPCSSGDDMEISDDDRGGSPPPAPTPPQQPPPPPPPPPPPPPYLASLPLGYPPHQPAYLLPPRPDGPPPPEYPPPPPPPPHIYDFVNSLELMDRLGAQWGGMPMSFQMQTQMLTRLHQLRQGKGLIAASAGPPGGAFGEAFLPFPPPQEAAYGLPYALYAQGQEGRGAYSREAYHLPMPMAAEPLPSSSVSGEEARLPPREEAELAEGKTLPTAGTVGRVLAMLVQEMKSIMQRDLNRKMVENVAFGAFDQWWESKEEKAKPFQNAAKQQAKEEDKEKTKLKEPGLLSLVDWAKSGGTTGIEAFAFGSGLRGALRLPSFKVKRKEPSEISEASEEKRPRPSTPAEEDEDDPEQEKEAGEPGRPGTKPPKRDEERGKTQGKHRKSFALDSEGEEASQESSSEKDEEDDEEDEEDEDREEAVDTTKKETEVSDGEDEESDSSSKCSLYADSDGENDSTSDSESSSSSSSSSSSSSSSSSSSSSSSSESSSEDEEEEERPAALPSASPPPREVPVPTPAPVEVPVPERVAGSPVTPLPEQEASPARPAGPTEESPPSAPLRPPEPPAGPPAPAPRPDERPSSPIPLLPPPKKRRKTVSFSAIEVVPAPEPPPATPPQAKFPGPASRKAPRGVERTIRNLPLDHASLVKSWPEEVSRGGRSRAGGRGRLTEEEEAEPGTEVDLAVLADLALTPARRGLPALPAVEDSEATETSDEAERPRPLLSHILLEHNYALAVKPTPPAPALRPPEPVPAPAALFSSPADEVLEAPEVVVAEAEEPKPQQLQQQREEGEEEGEEEGEEEEEESSDSSSSSDGEGALRRRSLRSHARRRRPPPPPPPPPPRAYEPRSEFEQMTILYDIWNSGLDSEDMSYLRLTYERLLQQTSGADWLNDTHWVHHTITNLTTPKRKRRPQDGPREHQTGSARSEGYYPISKKEKDKYLDVCPVSARQLEGVDTQGTNRVLSERRSEQRRLLSAIGTSAIMDSDLLKLNQLKFRKKKLRFGRSRIHEWGLFAMEPIAADEMVIEYVGQNIRQMVADMREKRYVQEGIGSSYLFRVDHDTIIDATKCGNLARFINHCCTPNCYAKVITIESQKKIVIYSKQPIGVDEEITYDYKFPLEDNKIPCLCGTESCRGSLN

SEQ ID NO: 44299 - protein, 342 aa, Homo sapiens
MLLQREPRLGELRVFDQHLGPWLEELKTGPVRVTAIQGDVTQAHEVAAAVAGAHVVIHTAGLVDVFGRASPKTIHEVNVQGTRNVIEACVQTGTRFLVYTSSMEVVGPNTKGHPFYRGNEDTPYEAVHRHPYPCSKALAEWLVLEANGRKVRGGLPLVTCALRPTGIYGEGHQIMRDFYRQGLRLGGWLFRAIPASVEHGRVYVGNVAWMHVLAARELEQRATLMGGQVYFCYDGSPYRSYEDFNMEFLGPCGLRLVGARPLLPYWLLVFLAALNALLQWLLRPLVLYAPLLNPYTLAVANTTFTVSTDKAQRHFGYEPLFSWEDSRTRTILWVQAATGSAQ

SEQ ID NO: 44300 - protein, 62 aa, Homo sapiens [sequence omitted]

SEQ ID NO: 44301 - protein, 49 aa, Homo sapiens
MLGTCHFQTVPATRFSPLAQPFSGPRSVFSGRLETFRPGPRLGTLFILA

SEQ ID NO: 44302 - protein, 371 aa, Homo sapiens [sequence omitted]

SEQ ID NO: 44303 - protein, 273 aa, Homo sapiens
MGGSDRGGFNKFGGPRDQGSRHDSEQDNSDNNTIFVQGLGENVTIESVADYFKQIGIIKTNKKTGQPMINLYTDRETGKLKGEATVSFDDPPSAKAAIDWFDGKEFSGNPIKVSFATRRADFNRGGGNGRGGRGRGGPMGRGGYGGGGSGGGGRGGFPSGGGGGGGQQRAGDWKCPNPTCENMNFSWRNECNQCKAPKPDGPGGGPGGSHMGGNYGDDRRGGRGGYDRGGYRGRGGDRGGFRGGRGGGDRGGFGPGKMDSRGEHRQDRRERPY

SEQ ID NO: 44304 - protein, 972 aa, Homo sapiens
MRGILYCYMRQADKVQQFKQDPRPTTCLHSVFNVHTGDELLSYEEYGHLQINAVSLYLLYLVEMISSGLQIIYNTDEVSFIQNLVFCVERVYRVPDFGVWERGSKYNNGSTELHSSSVGLAKAALEAINGFNLFGNQGCSWSVIFVDLDAHNRNRQTLCSLLPRESRSHNTDAALLPCISYPAFALDDEVLFSQTLDKVVRKLKGKYGFKRFLRDGYRTSLEDPNRCYYKPAEIKLFDGIECEFPIFFLYMMIDGVFRGNPKQVQEYQDLLTPVLHHTTEGYPVVPKYYYVPADFVEYEKNNPGSQKRFPSNCGRDGKLFLWGQALYIIAKLLADELISPKDIDPVQRYVPLKDQRNVSMRFSNQGPLENDLVVHVALIAESQRLQVFLNTYGIQTQTPQQVEPIQIWPQQELVKAYLQLGINEKLGLSGRPDRPIGCLGTSKIYRILGKTVVCYPIIFDLSDFYMSQDVFLLIDDIKNALQFIKQYWKMHGRPLFLVLIREDNIRGSRFNPILDMLAALKKGIIGGVKVHVDRLQTLISGAVVEQLDFLRISDTEELPEFKSFEELEPPKHSKVKRQSSTPSAPELGQQPDVNISEWKDKPTHEILQKLNDCSCLASQAILLGILLKREGPNFITKEGTVSDHIERVYRRAGSQKLWSVVRRAASLLSKVVDSLAPSITNVLVQGKQVTLGAFGHEEEVISNPLSPRVIQNIIYYKCNTHDEREAVIQQELVIHIGWIISNNPELFSGMLKIRIGWIIHAMEYELQIRGGDKPALDLYQLSPSEVKQLLLDILQPQQNGRCWLNRRQIDGSLNRTPTGFYDRVWQILERTPNGIIVAGKHLPQQPTLSDMTMYEMNFSLLVEDTLGNIDQPQYRQIVVELLMVVSIVLERNPELEFQDKVDLDRLVKEAFNEFQKDQSRLKEIEKQDDMTSFYNTPPLGKRGTCSYLTKAVMNLLLEGEVKPNNDDPCLIS

SEQ ID NO: 44305 - protein, 134 aa, Homo sapiens
MHQHKSITTLQGEDIVFLATDINLPGAVDWVMMQSCFGFHFMLVLEKQEKYDGHQQFFAIVQLIGTRKQAENFAYRLELNGHRRRLTWEATPRSIHEGIATAIMNSDCLVFDTSIAQLFAENGNLGINVTISMC

SEQ ID NO: 44306 - protein, 1292 aa, Homo sapiens
MSRRKQAKPRSVKVEEGEASDFSLAWDSSVTAAGGLEGEPECDQKTSRALEDRNSVTSQEERNEDDEDMEDESIYTCDHCQQDFESLADLTDHRAHRCPGDGDDDPQLSWVASSPSSKDVASPTQMIGDGCDLGLGEEEGGTGLPYPCQFCDKSFIRLSYLKRHEQIHSDKLPFKCTYCSRLFKHKRSRDRHIKLHTGDKKYHCHECEAAFSRSDHLKIHLKTHSSSKPFKCTVCKRGFSSTSSLQSHMQAHKKNKEHLAKSEKEAKKDDFMCDYCEDTFSQTEELEKHVLTRHPQLSEKADLQCIHCPEVFVDENTLLAHIHQAHANQKHKCPMCPEQFSSVEGVYCHLDSHRQPDSSNHSVSPDPVLGSVASMSSATPDSSASVERGSTPDSTLKPLRGQKKMRDDGQGWTKVVYSCPYCSKRDFNSLAVLEIHLKTIHADKPQQSHTCQICLDSMPTLYNLNEHVRKLHKNHAYPVMQFGNISAFHCNYCPEMFADINSLQEHIRVSHCGPNANPSDGNNAFFCNQCSMGFLTESSLTEHIQQAHCSVGSAKLESPVVQPTQSFMEVYSCPYCTNSPIFGSILKLTKHIKENHKNIPLAHSKKSKAEQSPVSSDVEVSSPKRQRLSASANSISNGEYPCNQCDLKFSNFESFQTHLKLHLELLLRKQACPQCKEDFDSQESLLQHLTVHYMTTSTHYVCESCDKQFSSVDDLQKHLLDMHTFVLYHCTLCQEVFDSKVSIQVHLAVKHSNEKKMYRCTACNWDFRKEADLQVHVKHSHLGNPAKAHKCIFCGETFSTEVELQCHITTHSKKYNCKFCSKAFHAIILLEKHLREKHCVFDAATENGTANGVPPMATKKAEPADLQGMLLKNPEAPNSHEASEDDVDASEPMYGCDICGAAYTMEVLLQNHRLRDHNIRPGEDDGSRKKAEFIKGSHKCNVCSRTFFSENGLREHLQTHRGPAKHYMCPICGERFPSLLTLTEHKVTHSKSLDTGTCRICKMPLQSEEEFIEHCQMHPDLRNSLTGFRCVVCMQTVTSTLELKIHGTFHMQKLAGSSAASSPNGQGLQKLYKCALCLKEFRSKQDLVKLDVNGLPYGLCAGCMARSANGQVGGLAPPEPADRPCAGLRCPECSVKFESAEDLESHMQVDHRDLTPETSGPRKGTQTSPVPRKKTYQCIKCQMTFENEREIQIHVANHMIEEGINHECKLCNQMFDSPAKLLCHLIEHSFEGMGGTFKCPVCFTVFVQANKLQQHIFAVHGQEDKIYDCSQCPQKFFFQTELQNHTMSQHAQ

SEQ ID NO: 44307 - protein, 731 aa, Homo sapiens
MQVELPPLEINSRVSLKVGETIESGTVIFCDVLPGKESLGYFVGVDMDNPIGNWDGRFDGVQLCSFACVESTILLHINDIIPESVTQERRPPKLAFMSRGVGDKGSSSHNKPKATGSTSDPGNRNRSELFYTLNGSSVDSQPQSKSKNTWYIDEVAEDPAKSLTEISTDFDRSSPPLQPPPVNSLTTENRFHSLPFSLTKMPNTNGSIGHSPLSLSAQSVMEELNTAPVQESPPLAMPPGNSHGLEVGSLAEVKENPPFYGVIRWIGQPPGLNEVLAGLELEDECAGCTDGTFRGTRYFTCALKKALFVKLKSCRPDSRFASLQPVSNQIERCNSLAFGGYLSEVVEENTPPKMEKEGLEIMIGKKKGIQGHYNSCYLDSTLFCLFAFSSVLDTVLLRPKEKNDVEYYSETQELLRTEIVNPLRIYGYVCATKIMKLRKILEKVEAASGFTSEEKDPEEFLNILFHHILRVEPLLKIRSAGQKVQDCYFYQIFMEKNEKVGVPTIQQLLEWSFINSNLKFAEAPSCLIIQMPRFGKDFKLFKKIFPSLELNITDLLEDTPRQCRICGGLAMYECRECYDDPDISAGKIKQFCKTCNTQVHLHPKRLNHKYNPVSLPKDLPDWDWRHGCIPCQNMELFAVLCIETSHYVAFVKYGKDDSAWLFFDSMADRDGGQNGFNIPQVTPCPEVGEYLKMSLEDLHSLDSRRIQGCARRLLCDAYMCMYQSPTMSLYK

SEQ ID NO: 44308 - protein, 286 aa, Homo sapiens [sequence omitted]

SEQ ID NO: 44309 - protein, 427 aa, Homo sapiens
MFFSMGFIVAVKGKIASPLEAPVFVAAPHSTFFDGIACVVAGLPSMVSRNENAQVPLIGRLLRAVQPVLVSRVDPDSRKNTINEIIKRTTSGGEWPQILVFPEGTCTNRSCLITFKPGAFIPGVPVQPVLLRYPNKLDTVTWTWQGYTFIQLCMLTFCQLFTKVEVEFMPVQVPNDEEKNDPVLFANKVRNLMAEALGIPVTDHTYEDCRLMISAGQLTLPMEAGLVEFTKISRKLKLDWDGVRKHLDEYASIASSSKGGRIGIEEFAKYLKLPVSDVLRQLFALFDRNHDGSIDFREYVIGLAVLCNPSNTEEIIQVAFKLFDVDEDGYITEEEFSTILQASLGVPDLDVSGLFKEIAQGDSISYEEFKSFALKHPEYAKIFTTYLDLQTCHVFSLPKEVQTTPSTASNKVSPEKHEESTSDKKDD

SEQ ID NO: 44310 - protein, 704 aa, Homo sapiens
MVAIGRYDGTHPCLAAATQTGKVFIHNPHTRNQHVSASRVFQSPLESDVSLLSINQAVSCLTAGVLNPELGYDALLVGTQTNLLAYDVYNNSDLFYREVADGANAIVLGTLGDISSPLAIIGGNCALQGFNHEGSDLFWTVTGDNVNSLALCDFDGDGKKELLVGSEDFDIRVFKEDEIVAEMTETEIVTSLCPMYGSRFGYALSNGTVGVYDKTSRYWRIKSKNHAMSIHAFDLNSDGVNELITGWSNGKVDARSDRTGEVIFKDNFSSAIAGVVEGDYRMDGHIQLICCSVDGEIRGYLPGTAEMRGNLMDTSAEQDLIRELSQKKQNLLLELRNYEENAKAELASPLNEADGHRGIIPANTRLHTTLSVSLGNETQTAHTELRISTSNDTIIRAVLIFAEGIFTGESHVVHPSIHNLSSSICIPIVPPKDVPVDLHLKAFVGYRSSTQFHVFESTRQLPRFSMYALTSLDPASEPISYVNFTIAERAQRVVVWLGQNFLLPEDTHIQNAPFQVCFTSLRNGGHLHIKIKLSGEITINTDDIDLAGDIIQSMASFFAIEDLQVEADFPVYFEELRKVLVKVDEYHSVHQKLSADMADHSNLIRSLLVGAEDARLMRDMKTMKSRYMELYDLNRDLLNGYKIRCNNHTELLGNLKAVNQAIQRAGRLRVGKPKNQVITACRDAIRSNNINTLFKIMRVGTASS

SEQ ID NO: 44311 - protein, 25 aa, Homo sapiens
MDPNCSCATGGSCSCASSCKCKECK

SEQ ID NO: 44312 - protein, 452 aa, Homo sapiens
MITLHEMAETDEGWLDVVQSLIRVIPLEDPLGPAVITLLLDECPLPTKDALQKLTEILNLNGEVACQDSSHPAKHRNTSAVLGCLAEKLAGPASIGLLSPGILEYLLQCLKLQSHPTVMLFALIALEKFAQTSENKLTISESSISDRLVTLESWANDPDYLKRQVGFCAQWSLDNLFLKEGRQLTYEKVNLSSIRAMLNSNDVSEYLKISPHGLEARCDASSFESVRCTFCVDAGVWYYEVTVVTSGVMQIGWATRDSKFLNHEGYGIGDDEYSCAYDGCRQLIWYNARSKPHIHPCWKEGDTVGFLLDLNEKQMIFFLNGNQLPPEKQVFSSTVSGFFAAASFMSYQQCEFNFGAKPFKYPPSMKFSTFNDYAFLTAEEKIILPRHRRLALLKQVSIRENCCSLCCDEVADTQLKPCGHSDLCMDCALQLETCPLCRKEIVSRIRQISHIS

SEQ ID NO: 44313 - protein, 129 aa, Homo sapiens
MDKYYLEFEDTEENKLIYTPIFNEYISLVEKYIEEQLLQRIPEFNMAAFTTTLQHHKDEVAGDIFDMLLTFTDFLAFKEMFLDYRALPRTICGTRSYLQPMNGIILDVTSPIGSAHDDRTHLGKTDSVM

SEQ ID NO: 44314 - protein, 103 aa, Homo sapiens [sequence omitted]

SEQ ID NO: 44315 - protein, 182 aa, Homo sapiens
MFGKDGSELILHFVTQCNTRLTRVLEEEQKLVQLGQAEKRKTDQFLRDAVETRLRMLIPYIEHWPRALSILMLPHNIPSSLSLLTSMVDDMWHYAGDQSTDFNWYTRRAMLAAIYNTTELVMMQDSSPDFEDTWRFLENRVNDAMNMGHTAKQVKSTGEALVQGLMGAAVTLKNLTGLNQRR

SEQ ID NO: 44316 - protein, 599 aa, Homo sapiens
MSLTGHTSPVESVRLNTPEELIVAGSQSGSIRVWDLEAAKILRTLMGHKANICSLDFHPYGEFVASGSQDTNIKLWDIRRKGCVFRYRGHSQAVRCLRFSPDGKWLASAADDHTVKLWDLTAGKMMSEFPGHTGPVNVVEFHPNEYLLASGSSDRTIRFWDLEKFQVVSCIEGEPGPVRSVLFNPDGCCLYSGCQDSLRVYGWEPERCFDVVLVNWGKVADLAICNDQLIGVAFSQSNVSSYVVDLTRVTRTGTVARDPVQDHRPLAQPLPNPSAPLRRIYERPSTTCSKPQRVKQNSESERRSPSSEDDRDERESRAEIQNAEDYNEIFQPKNSISRTPPRRSEPFPAPPEDDAATAKEAAKPSPAMDVQFPVPNLEVLPRPPVVASTPAPKAEPAIIPATRNEPIGLKASDFLPAVKIPQQAELVDEDAMSQIRKGHDTMCVVLTSRHKNLDTVRAVWTMGDIKTSVDSAVAINDLSVVVDLLNIVNQKASLWKLDLCTTVLPQIEKLLQSKYESYVQTGCTSLKLILQRFLPLITDMLAAPPSVGVDISREERLHKCRLCYKQLKSISGLVKSKSGLSGRHGSTFRELHLLMASLD

SEQ ID NO: 44317 - protein, 795 aa, Homo sapiens
MARPAPAPASPAARPFPHTGPGRLRTGRGKDTPVCGDEDSSARSAARPALAQCRALSVDWAGPGSPHGLYLTLQVEHLKEKLISQAQEVSRLRSELGGTDLEKHRDLLMVENERLRQEMRRCEAELQELRTKPAGPCPGCEHSQESAQLRDKLSQLQLEMAESKGMLSELNLEVQQKTDRLAEVELRLKDCLAEKAQEEERLSRRLRDSHETIASLRAQSPPVKYVIKTVEVESSKTKQALSESQARNQHLQEQVAMQRQVLKEMEQQLQSSHQLTARLRAQIAMYESELERAHGQMLEEMQSLEEDKNRAIEEAFARAQVEMKAVHENLAGVRTNLLTLQPALRTLTNDYNGLKRQVRGFPLLLQEALRSVKAEIGQAIEEVNSNNQELLRKYRRELQLRKKCHNELVRLKGNIRVIARVRPVTKEDGEGPEATNAVTFDADDDSIIHLLHKGKPVSFELDKVFSPQASQQDVFQEVQALVTSCIDGFNVCIFAYGQTGAGKTYTMEGTAENPGINQRALQLLFSEVQEKASDWEYTITVSAAEIYNEVLRDLLGKEPQEKLEIRLCPDGSGQLYVPGLTEFQVQSVDDINKVFEFGHTNRTTEFTNLNEHSSRSHALLIVTVRGVDCSTGLRTTGKLNLVDLAGSERVGKSGAEGSRLREAQHINKSLSALGDVIAALRSRQGHVPFRNSKLTYLLQDSLSGDSKTLMVVQVSPVEKNTSETLYSLKFAERVRSVELGPGLRRAELGSWSSQEHLEWEPACQTPQPSARAHSAPSSGTSSRPGSIRRKLQPSA

SEQ ID NO: 44318 - protein, 397 aa, Homo sapiens
MVARESVQAGELLFVVPRAALLSQHTCSIGGLLERERVALQSQSGWVPLLLALLHELQAPASRWRPYFALWPELGRLEHPMFWPEEERRCLLQGTGVPEAVEKDLANIRSEYQSIVLPFMEAHPDLFSLRVRSLELYHQLVALVMAYSFQEPLEEEEDEKEPNSPVMVPAADILNHLANHNANLEYSANCLRMVATQPIPKGHEIFNTYGQMANWQLIHMYGFVEPYPDNTDDTADIQMVTVREAALQGTKTEAERHLVYERWDFLCKLEMVGEEGAFVIGREEVLTEEELTTTLKVLCMPAEEFRELKDQDGGGDDKREEGSLTITNIPKLKASWRQLLQNSVLLTLQTYATDLKTDQGLLSNKEVYAKLSWREQQALQVRYGQKMILHQLLELTS

SEQ ID NO: 44319 - protein, 779 aa, Homo sapiens [sequence omitted]

SEQ ID NO: 44320 - protein, 113 aa, Homo sapiens [sequence omitted]

SEQ ID NO: 44321 - protein, 130 aa, Homo sapiens [sequence omitted]

SEQ ID NO: 44322 - protein, 98 aa, Homo sapiens
MLRLALTVTSMTFFIIAQAPEPYIVITGFEVTVILFFILLYVLRLDRLMKWLFWPLLVFALVTAVCCLADGALIYRKLLFNPSGPYQKKPVHEKKEVL

SEQ ID NO: 44323 - protein, 77 aa, Homo sapiens
MLRLDIINSLVTTVFMLIVSVLALIPETTTLTVGGGVFALVTAVCCLADGALIYRKLLFNPSGPYQKKPVHEKKEVL

SEQ ID NO: 44324 - protein, 146 aa, Homo sapiens
MLRLALTVTSMTFFIIAQAPEPYIVITGFEVTVILFFILLYVLRLDRLMKWLFWPLLDLTNSIITAVFLSVVAILAMQEKKRRHLLYVGGSLCLTAVIVCCIDAFVVTTKMRTNLKRFLGVEVERKLSPAKDAYPETGPDAPQRPA

SEQ ID NO: 44325 - protein, 365 aa, Homo sapiens
MSHQTLEHMEGAMESMKPLLPILHWLKHPGDSIYKDVTSVHLDHLRVYWQELLDLHMEMGLSIEEALMYSFQRLDSDISLEIQAPLEDEVTRNLSLQVAFSGATACMAHVDGIHLHVANAGDCRAILGVQEDNGMWSCLPLTRDHNAWNQAELSRLKREHPESEDRTIIMEDRLLGVLIPCRAFGDVQLKWSKELQRSILERGFNTEALNIYQFTPPHYYTPPYLTAEPEVTYHRLRPQDKFLVLASDGLWDMLSNEDVVRLVVGHLAEADWHKTDLAQRPANLGLMQSLLLQRKASGLHEADQNAATRLIRHAIGNNEYGEMEAERLAAMLTLPEDLARMYRDDITVTVVYFNSESIGAYYKGG

SEQ ID NO: 44326 - protein, 153 aa, Homo sapiens [sequence omitted]

SEQ ID NO: 44327 - protein, 31 aa, Homo sapiens
MWCLVIAVSVALPCFPGWVFASHHGGRARGD

SEQ ID NO: 44328 - protein, 576 aa, Homo sapiens
MEQLDPTLLQMKTEVMEGTVAPEAEAAVDDTQIITLQVVNMEEQPINIGELQLVQVPVPVTVPVATTSVEELQGAYENEVSKEGLAESEPMICHTLPLPEGFQVVKVGANGEVETLEQGELPPQEDPSWQKDPDYQPPAKKTKKTKKSKLRYTEEGKDVDVSVYDFEEEQQEGLLSEVNAEKVVGNMKPPKPTKIKKKGVKKTFQCELCSYTCPRRSNLDRHMKSHTDERPHKCHLCGRAFRTVTLLRNHLNTHTGTRPHKCPDCDMAFVTSGELVRHRRYKHTHEKPFKCSMCDYASVEVSKLKRHIRSHTGERPFQCSLCSYASRDTYKLKRHMRTHSGEKPYECYICHARFTQSGTMKMHILQKHTENVAKFHCPHCDTVIARKSDLGVHLRKQHSYIEQGKKCRYCDAVFHERYALIQHQKSHKNEKRFKCDQCDYACRQERHMIMHKRTHTGEKPYACSHCDKTFRQKQLLDMHFKRYHDPNFVPAAFVCSKCGKTFTRRNTMARHADNCAGPDGVEGENGGETKKSKRGRKRKMRSKKEDSSDSEFHSCGPGWSAVADLSSPQPPPPRFK

SEQ ID NO: 44329 - protein, 338 aa, Homo sapiens
MNIAFYTSRTDDILLHQDVDLVCISIPPPLTRQISVKALGIGKNVVCEKAATSVDAFRMVTASRYYPQLMSLVGNVLRFLPAFVRMKQLISEHYVGAVMICDARIYSGSLLSPSYGWICDELMGGGGLHTMGTYIVDLLTHLTGRRAEKVHGLLKTFVRQNAAIRGIRHVTSDDFCFFQMLMGGGVCSTVTLNFNMPGAFVHEVMVVGSAGRLVARGADLYGQKNSATQEELLLRDSLAVGAGLPEQGPQDVPLLYLKGMVYMVQALRQSFQGQGDRRTWDRTPVSMAASFEDGLYMQSVVDAIKRSSRSGEWEAVEVLTEEPDTNQNLCEALQRNNL

SEQ ID NO: 44330 - protein, 1333 aa, Homo sapiens [sequence omitted]

SEQ ID NO: 44331 - protein, 368 aa, Homo sapiens [sequence omitted]

SEQ ID NO: 44332 - protein, 915 aa, Homo sapiens
MSAIATNGVVPAGGSYFMISRSLGPEFGGAVGLCFYLGTTFAAAMYILGAIEILLTYIAPPAAIFYPSGAHDTSNATLNNMRVYGTIFLTFMTLVVFVGVKYVNKFASLFLACVIISILSIYAGGIKSIFDPPVFPVCMLGNRTLSRDQFDICAKTAVVDNETVATQLWSFFCHSPNLTTDSCDPYFMLNNVTEIPGIPGAAAGVLQENLWSAYLEKGDIVEKHGLPSADAPSLKESLPLYVVADIATSFTVLVGIFFPSVTGIMAGSNRSGDLRDAQKSIPVGTILAIITTSLVYFSSVVLFGACIEGVVLRDKYGDGVSRNLVVGTLAWPSPWVIVIGSFFSTCGAGLQSLTGAPRLLQAIAKDNIIPFLRVFGHGKVNGEPTWALLLTALIAELGILIASLDMVAPILSMFFLMCYLFVNLACAVQTLLRTPNWRPRFKYYHWALSFLGMSLCLALMFVSSWYYALVAMLIAGMIYKYIEYQGAEKEWGDGIRGLSLSAARYALLRLEEGPPHTKNWRPQLLVLLKLDEDLHVKYPRLLTFASQLKAGKGLTIVGSVIQGSFLESYGEAQAAEQTIKNMMEIEKVKGFCQVVVASKVREGLAHLIQSCGLGGMRHNSVVLGWPYGWRQSEDPRAWKTFIDTVRCTTAAHLALLVPKNIAFYPSNHERYLEGHIDVWWIVHDGGMLMLLPFLLRQHKVWRKCRMRIFTVAQMDDNSIQMKKDLAVFLYHLRLEAEVEVVEMHNSDISAYTYERTLMMEQRSQMLRQMRLTKTEREREAQLVKDRHSALRLESLYSDEEDESAVGADKIQMTWTRDKYMTETWDPSHAPDNFRELVHIKPDQSNVRRMHTAVKLNEVIVTRSHDARLVLLNMPGPPRNSEGDENYMEFLEVLTEGLERVLLVRGGGREVITIYS

SEQ ID NO: 44333 - protein, 298 aa, Homo sapiens [sequence omitted]

SEQ ID NO: 44334 - protein, 586 aa, Homo sapiens
MFIGTADDRYLRPHAFYQVHRITGKTVATASQEIIIASTKVLEIPLLPENNMSASIDCAGILKLRNSDIELRKGETDIGRKNTRVRLVFRVHIPQPSGKVLSLQIASIPVECSQRSAQELPHIEKYSINSCSVNGGHEMVVTGSNFLPESKIIFLEKGQDGRPQWEVEGKIIREKCQGAHIVLEVPPYHNPAVTAAVQVHFYLCNGKRKKSQSQRFTYTPVLMKQEHREEIDLSSVPSLPVPHPAQTQRPSSDSGCSHDSVLSGQRSLICSIPQTYASMVTSSHLPQLQCRDESVSKEQHMIPSPIVHQPFQVTPTPPVGSSYQPMQTNVVYNGPTCLPINAASSQEFDSVLFQQDATLSGLVNLGCQPLSSIPFHSSNSGSTGHLLAHTPHSVHTLPHLQSMGYHCSNTGQRSLSSPVADQITGQPSSQLQPITYGPSHSGSATTASPAASHPLASSPLSGPPSPQLQPMPYQSPSSGTASSPSPATRMHSGQHSTQAQSTGQGGLSAPSSLICHSLCDPASFPPDGATVSIKPEPEDREPNFATIGLQDITLDDDLFTSNNFDLLQLRPTFWPVPAGRYLRNLE

SEQ ID NO: 44335 - protein, 589 aa, Homo sapiens
MFIGTADDRYLRPHAFYQVHRITGKTVATASQEIIIASTKVLEIPLLPENNMSASIDCAGILKLRNSDIELRKGETDIGRKNTRVRLVFRVHIPQPSGKVLSLQIASIPVECSQRSAQELPHIEKYSINSCSVNGGHEMVVTGSNFLPESKIIFLEKGQDGRPQWEVEGKIIREKCQGAHIVLEVPPYHNPAVTAAVQVHFYLCNGKRKKSQSQRFTYTPVLMKQEHREEIDLSSVPSLPVPHPAQTQRPSSDSGCSHDSVLSGQRSLICSIPQTYASMVTSSHLPQLQCRDESVSKEQHMIPSPIVHQPFQVTPTPPVGSSYQPMQTNVVYNGPTCLPINAASSQEFDSVLFQQDATLSGLVNLGCQPLSSIPFHSSNSGSTGHLLAHTPHSVHTLPHLQSMGYHCSNTGQRSLSSPVADQITGQPSSQLQPITYGPSHSGSATTASPAASHPLASSPLSGPPSPQLQPMPYQSPSSGTASSPSPATRMHSGQHSTQAQSTGQGGLSAPSSLICHSLCDPASFPPDGATVSIKPEPEDREPNFATIGLQDITLDDDQFISDLEHQPSGSAEKWPNHSVLSCPAPFWRI

SEQ ID NO: 44336 - protein, 61 aa, Homo sapiens
MLKQYYIGDIHPSDLKPESGSKDPSKNDTCKSCWAYWILPIIGAVLLGFLYRYYTSESKSS

SEQ ID NO: 44337 - protein, 195 aa, Homo sapiens
MSQTSGGEAGSPPPAVVAADASSAPSSSSMGGACSSFTTSSSPTIYSTSVTDSKAMQVESCSSAVGNNMPGIQGATSSPQPQATLFHNTAGGTMNQLQNSPGSSQQTSGMFLFGIQNNCSQLLTSGPATLPDQLMAISQPGQPQNEGQPPVTTLLSQQMPENSPLASSINTNQNIEKIDLLVSLQNQGNNLTGSF

SEQ ID NO: 44338 - protein, 1483 aa, Homo sapiens
MSQTSGGEAGSPPPAVVAADASSAPSSSSMGGACSSFTTSSSPTIYSTSVTDSKAMQVESCSSAVGVSNRGVSEKQLTSNTVQQHPSTPKRHTVLYISPPPEDLLDNSRMSCQDEGCGLESEQSCSMWMEDSPSNFSNMSTSSYNDNTEVPRKSRKRNPKQRPGVKRRDCEESNMDIFDADSAKAPHYVLSQLTTDNKGNSKAGNGTLENQKGTGVKKSPMLCGQYPVKSEGKELKIVVQPETQHRARYLTEGSRGSVKDRTQQGFPTVKLEGHNEPVVLQVFVGNDSGRVKPHGFYQACRVTGRNTTPCKEVDIEGTTVIEVGLDPSNNMTLAVDCVGILKLRNADVEARIGIAGSKKKSTRARLVFRVNIMRKDGSTLTLQTPSSPILCTQPAGVPEILKKSLHSCSVKGEEEVFLIGKNFLKGTKVIFQENVSDENSWKSEAEIDMELFHQNHLIVKVPPYHDQHITLPVSVGIYVVTNAGRSHDVQPFTYTPDPAAGALNVNVKKEISSPARPCSFEEAMKAMKTTGCNLDKVNIIPNALMTPLIPSSMIKSEDVTPMEVTAEKRSSTIFKTTKSVGSTQQTLENISNIAGNGSFSSPSSSHLPSENEKQQQIQPKAYNPETLTTIQTQDISQPGTFPAVSASSQLPNSDALLQQATQFQTRETQSREILQSDGTVVNLSQLTEASQQQQQSPLQEQAQTLQQQISSNIFPSPNSVSQLQNTIQQLQAGSFTGSTASGSSGSVDLVQQVLEAQQQLSSVLFSAPDGNENVQEQLSADIFQQVSQIQSGVSPGMFSSTEPTVHTRPDNLLPGRAESVHPQSENTLSNQQQQQQQQQQVMESSAAMVMEMQQSICQAAAQIQSELFPSTASANGNLQQSPVYQQTSHMMSALSTNEDMQMQCELFSSPPAVSGNETSTTTTQQVATPGTTMFQTSSSGDGEETGTQAKQIQNSVFQTMVQMQHSGDNQPQVNLFSSTKSMMSVQNSGTQQQGNGLFQQGNEMMSLQSGNFLQQSSHSQAQLFHPQNPIADAQNLSQETQGSLFHSPNPIVHSQTSTTSSEQMQPPMFHSQSTIAVLQGSSVPQDQQSTNIFLSQSPMNNLQTNTVAQEAFFAAPNSISPLQSTSNSEQQAAFQQQAPISHIQTPMLSQEQAQPPQQGLFQPQVALGSLPPNPMPQSQQGTMFQSQHSIVAMQSNSPSQEQQQQQQQQQQQQQQQQQSILFSNQNTMATMASPKQPPPNMIFNPNQNPMANQEQQNQSIFHQQSNMAPMNQEQQPMQFQSQSTVSSLQNPGPTQSESSQTPLFHSSPQIQLVQGSPSSQEQQVTLFLSPASMSALQTSINQQDMQQSPLYSPQNNMPGIQGATSSPQPQATLFHNTAGGTMNQLQNSPGSSQQTSGMFLFGIQNNCSQLLTSGPATLPDQLMAISQPGQPQNEGQPPVTTLLSQQMPENSPLASSINTNQNIEKIDLLVSLQNQGNNLTGSF

SEQ ID NO: 44339 - protein, 172 aa, Homo sapiens [sequence omitted]

SEQ ID NO: 44340 - protein, 97 aa, Homo sapiens [sequence omitted]

SEQ ID NO: 44341 - protein, 320 aa, Homo sapiens
MATLPYLDSGALDGTHRVKLVPGYAGLQRLSKERLSGKSCACRRCMGDAGASDWFDSHFDGNISPVWTRENMDLPPDVQRWWMMLQPQFKSHNTNEVLEKLFQIVPGENPYRFRDPHQCRRCAVVGNSGNLRGSGYGQDVDGHNFIMRMNQAPTVGFEQDVGSRTTHHFMYPESAKNLPANVSFVLVPFKVLDLLWIASALSTGQIRFTYAPVKSFLRVDKEKVQIYNPAFFKYIHDRWTEHHGRYPSTGMLVLFFALHVCDEVNVYGFGADSRGNWHHYWENNRYAGEFRKTGVHDADFEAHIIDMLAKASKIEVYRGN

SEQ ID NO: 44342 - protein, 189 aa, Homo sapiens
MKHYFPINYKISVPYEGVFRIANVTRLQRAQVSERELRYLWVLVSLSATESVQDVLLEGHPSWKYLQEVETLLLNVQQGLTDVEVSPKVESVLSLLNAPGPNLKLVRPKALLDNCFRVMELLYCSCCKQSSVLNWQDCEVPSPQSCSPEPSLQYAATQLYPPPPWSPSSPPHSTGSVRPVRAQGEGLLP

SEQ ID NO: 44343 - protein, 583 aa, Homo sapiens
MDDRLIANTLHWWYFGPDNTGDIMTLKFLTGLQNFISSMATVHLVTADGSFDCQGNPGEQEALVSSLHYCEVVTALTTLGNGGSFVLKMFTMFEHCSINLMYLLNCCFDQVHVFKPATSKAGNSEVYVVCLHYKGREAIHPLLSKMTLNFGTEMKRKALFPHHVIPDSFLKRHEECCVFFHKYQLETISENIRLFECMGKAEQEKLNNLRDCAIQYFMQKFQLKHLSRNNWLVKKSSIGCSTNTKWFGQRNKYFKTYNERKMLEALSWKDKVAKGYFNSWAEEHGVYHPGQSSILEGTASNLECHLWHILEGKKLPKVKCSPFCNGEILKTLNEAIEKSLGGAFNLDSKFRPKQQYSCSCHVFSEELIFSELCSLTECLQDEQVVVPSNQIKCLLVGFSTLRNIKMHIPLEVRLLESAELTTFSCSLLHDGDPTYQRLFLDCLLHSLRELHTGDVMILPVLSCFTRFMAGLIFVLHSCFRFITFVCPTSSDPLRTCAVLLCVGYQDLPNPVFRYLQSVNELLSTLLNSDSPQQVLQFVPMEVLLKGALLDFLWDLNAAIAKRHLHFIIQREREEIINSLQLQN

SEQ ID NO: 44344 - protein, 609 aa, Homo sapiens
MLYKVAVPPATFSPTGLPSVVNMSPLPPTFNVASSLIQHPGIHYPPLHYAQLPSTSLQFIGSPYSLPYAVPPNFLPSPLLSPSANLATSHLPHFVPYASLLAEGATPPPQAPSPAHSFNKAPSATSPSGQLPHHSSTQPLDLAPGRMPIYYQMSRLPAGYTLHETPPAGASPVLTPQESQSALEAAAANGGQRPRERNLVRRESEALDSPNSKGEGQGLVPVVECVVDGQLFSGSQTPRVEVAAPAHRGTPDTDLEVQRVVGALASQDYRVVAAQRKEEPSPLNLSHHTPDHQGEGRGSARNPAELAEKSQARGFYPQSHQEPVKHRPLPKAMVVANGNLVPTGTDSGLLPVGSEILVASSLDVQARATFPDKEPTPPPITSSHLPSHFMKGAIIQLATGELKRVEDLQTQDFVRSAEVSGGLKIDSSTVVDIQESQWPGFVMLHFVVGEQQSKVSIEVPPEHPFFVYGQGWSSCSPGRTTQLFSLPCHRLQVGDVCISISLQSLNSNSVSQASCAPPSQLGPPRERPERTVLGSRELCDSEGKSQPAGEGSRVVEPSQPESGAQACWPAPSFQRYSMQGEEARAALLRPSFIPQEVKLSIEGRSNAGK

SEQ ID NO: 44345 - protein, 3665 aa, Homo sapiens
MEQSTGESHGPLDSLRAPFNERLAESTASAGPPSEPASKEVTCNECSASFASLQTYMEHHCPSARPPPPLREESASDTGEEGDEESDVENLAGEIVYQPDGSAYIVESLSQLTQGGGACGSGSGSGPLPSLFLNSLPGAGGKQGDPSCAAPVYPQIINTFHIASSFGKWFEGPDQAFPNTSALAGLSPVLHSFRVFDVRHKSNKDYLNSDGSAKSSCVSKDVPNNVDLSKFDGFVLYGKRKPILMCFLCKLSFGYVRSFVTHAVHDHRMTLSEDERKILSNKNISAIIQGIGKDKEPLVSFLEPKNKNFQHPLVSTANLIGPGHSFYGKFSGIRMEGEEALPAGSAAGPEQPQAGLLTPSTLLNLGGLTSSVLKTPITSVPLGPLASSPTKSSEGKDSGAAEGEKQEVGDGDCFSEKVEPAEEEAEEEEEEEEAEEEEEEEEEEEEEEEDEGCKGLFPSELDEELEDRPHEEPGAAAGSSSKKDLALSNQSISNSPLMPNVLQTLSRGTASTSSNSASSFVVFDGANRRNRLSFNSEGVRANVAEGGRRLDFADESANKDNATAPEPNESTEGDDGGFVPHHQHAGSLCELGVGECPSGSGVECPKCDTVLGSSRSLGGHMTMMHSRNSCKTLKCPKCNWHYKYQQTLEAHMKEKHPEPGGSCVYCKSGQPHPRLARGESYTCGYKPFRCEVCNYSTTTKGNLSIHMQSDKHLNNMQNLQNGGGEQVFSHTAGAAAAAVAAAAAAANISSSCGAPSPTKPKTKPTWRCEVCDYETNVARNLRIHMTSEKHMHNMMLLQQNMTQIQHNRHLGLGSLPSPAEAELYQYYLAQNMNLPNLKMDSAASDAQFMMSGFQLDPAGPMAAMTPALVGGEIPLDMRLGGGQLVSEELMNLGESFIQTNDPSLKLFQCAVCNKFTTDNLDMLGLHMNVERSLSEDEWKAVMGDSYQCKLCRYNTQLKANFQLHCKTDKHVQKYQLVAHIKEGGKANEWRLKCVAIGNPVHLKCNACDYYTNSLEKLRLHTVNSRHEASLKLYKHLQQHESGVEGESCYYHCVLCNYSTKAKLNLIQHVRSMKHQRSESLRKLQRLQKGLPEEDEDLGQIFTIRRCPSTDPEEAIEDVEGPSETAADPEELAKDQEGGASSSQAEKELTDSPATSKRISFPGSSESPLSSKRPKTAEEIKPEQMYQCPYCKYSNADVNRLRVHAMTQHSVQPMLRCPLCQDMLNNKIHLQLHLTHLHSVAPDCVEKLIMTVTTPEMVMPSSMFLPAAVPDRDGNSNLEEAGKQPETSEDLGKNILPSASTEQSGDLKPSPADPGSVREDSGFICWKKGCNQVFKTSAALQTHFNEVHAKRPQLPVSDRHVYKYRCNQCSLAFKTIEKLQLHSQYHVIRAATMCCLCQRSFRTFQALKKHLETSHLELSEADIQQLYGGLLANGDLLAMGDPTLAEDHTIIVEEDKEEESDLEDKQSPTGSDSGSVQEDSGSEPKRALPFRKGPNFTMEKFLDPSRPYKCTVCKESFTQKNILLVHYNSVSHLHKLKRALQESATGQPEPTSSPDNKPFKCNTCNVAYSQSSTLEIHMRSVLHQTKARAAKLEAASGSSNGTGNSSSISLSSSTPSPVSTSGSNTFTTSNPSSAGIAPSSNLLSQVPTESVGMPPLGNPIGANIASPSEPKEANRKKLADMIASRQQQQQQQQQQQQQQQQQQQAQTLAQAQAQVQAHLQQELQQQAALIQSQLFNPTLLPHFPMTTETLLQLQQQQHLLFPFYIPSAEFQLNPEVSLPVTSGALTLTGTGPGLLEDLKAQVQVPQQSHQQILPQQQQNQLSIAQSHSALLQPSQHPEKKNKLVIKEKEKESQRERDSAEGGEGNTGPKETLPDALKAKEKKELAPGGGSEPSMLPPRIASDARGNATKALLENFGFELVIQYNENKQKVQKKNGKTDQGENLEKLECDSCGKLFSNILILKSHQEHVHQNYFPFKQLERFAKQYRDHYDKLYPLRPQTPEPPPPPPPPPPPPLPAAPPQPASTPAIPASAPPITSPTIAPAQPSVPLTQLSMPMELPIFSPLMMQTMPLQTLPAQLPPQLGPVEPLPADLAQLYQHQLNPTLLQQQNKRPRTRITDDQLRVLRQYFDINNSPSEEQIKEMADKSGLPQKVIKHWFRNTLFKERQRNKDSPYNFSNPPITSLEELKIDSRPPSPEPPKQEYWGSKRSSRTRFTDYQLRVLQDFFDANAYPKDDEFEQLSNLLNLPTRVIVVWFQNARQKARKNYENQGEGKDGERRELTNDRYIRTSNLNYQCKKCSLVFQRIFDLIKHQKKLCYKDEDEEGQDDSQNEDSMDAMEILTPTSSSCSTPMPSQAYSAPAPSANNTASSAFLQLTAEAEELATFNSKTEAGDEKPKLAEAPSAQPNQTQEKQGQPKPELQQQEQPEQKTNTPQQKLPQLVSLPSLPQPPPQAPPPQCPLPQSSPSPSQLSHLPLKPLHTSTPQQLANLPPQLIPYQCDQCKLAFPSFEHWQEHQQLHFLSAQNQFIHPQFLDRSLDMPFMLFDPSNPLLASQLLSGAIPQIPASSATSPSTPTSTMNTLKRKLEEKASASPGENDSGTGGEEPQRDKRLRTTITPEQLEILYQKYLLDSNPTRKMLDHIAHEVGLKKRVVQVWFQNTRARERKGQFRAVGPAQAHRRCPFCRALFKAKTALEAHIRSRHWHEAKRAGYNLTLSAMLLDCDGGLQMKGDIFDGTSFSHLPPSSSDGQGVPLSPVSKTMELSPRTLLSPSSIKVEGIEDFESPSMSSVNLNFDQTKLDNDDCSSVNTAITDTTTGDEGNADNDSATGIATETKSSSAPNEGLTKAAMMAMSEYEDRLSSGLVSPAPSFYSKEYDNEGTVDYSETSSLADPCSPSPGASGSAGKSGDSGDRPGQKRFRTQMTNLQLKVLKSCFNDYRTPTMLECEVLGNDIGLPKRVVQVWFQNARAKEKKSKLSMAKHFGINQTSYEGPKTECTLCGIKYSARLSVRDHIFSQQHISKVKDTIGSQLDKEKEYFDPATVRQLMAQQELDRIKKANEVLGLAAQQQGMFDNTPLQALNLPTAYPALQGIPPVLLPGLNSPSLPGFTPSNTALTSPKPNLMGLPSTTVPSPGLPTSGLPNKPSSASLSSPTPAQATMAMGPQQPPQQQQQQQQPQVQQPPPPPAAQPPPTPQLPLQQQQQRKDKDSEKVKEKEKAHKGKGEPLPVPKKEKGEAPTATAATISAPLPTMEYAVDPAQLQALQAALTSDPTALLTSQFLPYFVPGFSPYYAPQIPGALQSGYLQPMYGMEGLFPYSPALSQALMGLSPGSLLQQYQQYQQSLQEAIQQQQQRQLQQQQQQKVQQQQPKASQTPVPPGAPSPDKDPAKESPKPEEQKNTPREVSPLLPKLPEEPEAESKSADSLYDPFIVPKVQYKLVCRKCQAGFSDEEAARSHLKSLCFFGQSVVNLQEMVLHVPTGGGGGGSGGGGGGGGGGGGGGSYHCLACESALCGEEALSQHLESALHKHRTITRAARNAKEHPSLLPHSACFPDPSTASTSQSAAHSNDSPPPPSAAAPSSASPHASRKSWPQVVSRASAAKPPSFPPLSSSSTVTSSSCSTSGVQPSMPTDDYSEESDTDLSQKSDGPASPVEGPKDPSCPKDSGLTSVGTDTFRL

SEQ ID NO: 44346 - protein, 244 aa, Homo sapiens [sequence omitted]

SEQ ID NO: 44347 - protein, 1194 aa, Homo sapiens
MFRLSAALHLLLLFAAGAEKLPGQGVHSQGQGPGANFVSFVGQAGGGGPAGQQLPQLPQSSQLQQQQQQQQQQQQPQPPQPPFPAGGPPARRGGAGAGGGWKLAEEESCREDVTRVCPKHTWSNNLAVLECLQDVREPENEISSDCNHLLWNYKLNLTTDPKFESVAREVCKSTITEIKECADEPVGKGYMVSCLVDHRGNITEYQCHQYITKMTAIIFSDYRLICGFMDDCKNDINILKCGSIRLGEKDAHSQGEVVSCLEKGLVKEAEEREPKIQVSELCKKAILRVAELSSDDFHLDRHLYFACRDDRERFCENTQAGEGRVYKCLFNHKFEESMSEKCREALTTRQKLIAQDYKVSYSLAKSCKSDLKKYRCNVENLPRSREARLSYLLMCLESAVHRGRQVSSECQGEMLDYRRMLMEDFSLSPEIILSCRGEIEHHCSGLHRKGRTLHCLMKVVRGEKGNLGMNCQQALQTLIQETDPGADYRIDRALNEACESVIQTACKHIRSGDPMILSCLMEHLYTEKMVEDCEHRLLELQYFISRDWKLDPVLYRKCQGDASRLCHTHGWNETSEFMPQGAVFSCLYRHAYRTEEQGRRLSRECRAEVQRILHQRAMDVKLDPALQDKCLIDLGKWCSEKTETGQELECLQDHLDDLVVECRDIVGNLTELESEDIQIEALLMRACEPIIQNFCHDVADNQIDSGDLMECLIQNKHQKDMNEKCAIGVTHFQLVQMKDFRFSYKFKMACKEDVLKLCPNIKKKVDVVICLSTTVRNDTLQEAKEHRVSLKCRRQLRVEELEMTEDIRLEPDLYEACKSDIKNFCSAVQYGNAQIIECLKENKKQLSTRCHQKVFKLQETEMMDPELDYTLMRVCKQMIKRFCPEADSKTMLQCLKQNKNSELMDPKCKQMITKRQITQNTDYRLNPMLRKACKADIPKFCHGILTKAKDDSELEGQVISCLKLRYADQRLSSDCEDQIRIIIQESALDYRLDPQLQLHCSDEISSLCAEEAAAQEQTGQVEECLKVNLLKIKTELCKKEVLNMLKESKADIFVDPVLHTACALDIKHHCAAITPGRGRQMSCLMEALEDKRVRLQPECKKRLNDRIEMWSYAAKVAPADGFSDLAMQVMTSPSKNYILSVISGSICILFLIGLMCGRITKRVTRELKDRLQYRSETMAYKGLVWSQDVTGSPA

SEQ ID NO: 44348 - protein, 1183 aa, Homo sapiens
MFRLSAALHLLLLFAAGAEKLPGQGVHSQGQGPGANFVSFVGQAGGGGPAGQQLPQLPQSSQLQQQQQQQQQQQQPQPPQPPFPAGGPPARRGGAGAGGGWKLAEEESCREDVTRVCPKHTWSNNLAVLECLQDVRELLWNYKLNLTTDPKFESVAREVCKSTITEIKECADEPVGKGYMVSCLVDHRGNITEYQCHQYITKMTAIIFSDYRLICGFMDDCKNDINILKCGSIRLGEKDAHSQGEVVSCLEKGLVKEAEEREPKIQVSELCKKAILRVAELSSDDFHLDRHLYFACRDDRERFCENTQAGEGRVYKCLFNHKFEESMSEKCREALTTRQKLIAQDYKVSYSLAKSCKSDLKKYRCNVENLPRSREARLSYLLMCLESAVHRGRQVSSECQGEMLDYRRMLMEDFSLSPEIILSCRGEIEHHCSGLHRKGRTLHCLMKVVRGEKGNLGMNCQQALQTLIQETDPGADYRIDRALNEACESVIQTACKHIRSGDPMILSCLMEHLYTEKMVEDCEHRLLELQYFISRDWKLDPVLYRKCQGDASRLCHTHGWNETSEFMPQGAVFSCLYRHAYRTEEQGRRLSRECRAEVQRILHQRAMDVKLDPALQDKCLIDLGKWCSEKTETGQELECLQDHLDDLVVECRDIVGNLTELESEDIQIEALLMRACEPIIQNFCHDVADNQIDSGDLMECLIQNKHQKDMNEKCAIGVTHFQLVQMKDFRFSYKFKMACKEDVLKLCPNIKKKVDVVICLSTTVRNDTLQEAKEHRVSLKCRRQLRVEELEMTEDIRLEPDLYEACKSDIKNFCSAVQYGNAQIIECLKENKKQLSTRCHQKVFKLQETEMMDPELDYTLMRVCKQMIKRFCPEADSKTMLQCLKQNKNSELMDPKCKQMITKRQITQNTDYRLNPMLRKACKADIPKFCHGILTKAKDDSELEGQVISCLKLRYADQRLSSDCEDQIRIIIQESALDYRLDPQLQLHCSDEISSLCAEEAAAQEQTGQVEECLKVNLLKIKTELCKKEVLNMLKESKADIFVDPVLHTACALDIKHHCAAITPGRGRQMSCLMEALEDKRVRLQPECKKRLNDRIEMWSYAAKVAPADGFSDLAMQVMTSPSKNYILSVISGSICILFLIGLMCGRITKRVTRELKDRLQYRSETMAYKGLVWSQDVTGSPA

SEQ ID NO: 44349 - protein, 769 aa, Homo sapiens [sequence omitted]

SEQ ID NO: 44350 - protein, 655 aa, Homo sapiens
MQRLCANDILDGVDEFIESISLLPEPEKTLHTEDTDHQHTASHGEEEALKEDPPRNLLEERKSDQLGLPQTLQQEFSLINVQIRNVNVEMDAADRSCTVSVHCSNHRVKMLVKFPAQYPNNAAPSFQFINPTTITSTMKAKLLKILKDTALQKVKRGQSCLEPCLRQLVSCLESFVNQEDSASSNPFALPNSVTPPLPTFARVTTAYGSYQDANIPFPRTSGARFCGAGYLVYFTRPMTMHRAVSPTEPTPRSLSALSAYHTGLIAPMKIRTEAPGNLRLYSGSPTRSEKEQVSISSFYYKERKSRRWKSKREGSDSGNRQIKAAGKVIIQDIACLLPVHKSLGELYILNVNDIQETCQKNAASALLVGRKDLVQVWSLATVATDLCLGPKSDPDLETPWARHPFGRQLLESLLAHYCRLRDVQTLAMLCSVFEAQSRPQGLPNPFGPFPNRSSNLVVSHSRYPSFTSSGSCSSMSDPGLNTGGWNIAGREAEHLSSPWGESSPEELRFGSLTYSDPRERERDQHDKNKRLLDPANTQQFDDFKKCYGEILYRWGLREKRAEVLKFVSCPPDPHKGIEFGVYCSHCRSEVRGTQCAICKGFTFQCAICHVAVRGSSNFCLTCGHGGHTSHMMEWFRTQEVCPTGCGCHCLLESTF

SEQ ID NO: 44351 - protein, 371 aa, Homo sapiens
MLENYSNLLSVEVWKADDQMERDHRNPDEQARQFLILKNQTPIEERGDLFGKALNLNTDFVSLRQVPYKYDLYEKTLKYNSDLLNSNRSYAGKQTDECNEFGKALLYLKQEKTHSGVEYSEYNKSGKALSHKAAIFKHQKIKNLVQPFICTYCDKAFSFKSLLISHKRIHTGEKPYECNVCKKTFSHKANLIKHQRIHTGEKPFECPECGKAFTHQSNLIVHQRAHMEKKPYECSECGKTFAQKFELTTHQRIHTGERPYECNECAKTFFKKSNLIIHQKIHTGEKRYECSECGKSFIQNSQLIIHMRTHTGEKPYECTECGKTFSQRSTLRLHLRIHTGEKPYECSECGKAFSRKSRLSVHQRVHIGEKP

SEQ ID NO: 44352 - protein, 377 aa, Homo sapiens
MSNSDLPTSPLAMEYVNDFDLMKFEVKKEPVETDRIISQCGRLIAGGSLSSTPMSTPCSSVPPSPSFSAPSPGSGSEQKAHLEDYYWMTGYPQQLNPEALGFSPEDAVEALISNSHQLQGGFDGYARGAQQLAAAAGAGAGASLGGSGEEMGPAAAVVSAVIAAAAAQSGAGPHYHHHHHHAAGHHHHPTAGAPGAAGSAAASAGGAGGAGGGGPASAGGGGGGGGGGGGGGAAGAGGALHPHHAAGGLHFDDRFSDEQLVTMSVRELNRQLRGVSKEEVIRLKQKRRTLKNRGYAQSCRFKRVQQRHVLESEKNQLLQQVDHLKQEISRLVRERDAYKEKYEKLVSSGFRENGSSSDNPSSPEFFMYPRESSTSVM

SEQ ID NO: 44353 - protein, 397 aa, Homo sapiens
MSNSDLPTSPLAMEYVNDFDLMKFEVKKEPVETDRIISQCGRLIAGGSLSSTPMSTPCSSVPPSPSFSAPSPGSGSEQKAHLEDYYWMTGYPQQLNPEALGFSPEDAVEALISNSHQLQGGFDGYARGAQQLAAAAGAGAGASLGGSGEEMGPAAAVVSAVIAAAAAQSGAGPHYHHHHHHAAGHHHHPTAGAPGAAGSAAASAGGAGGAGGGGPASAGGGGGGGGGGGGGGAAGAGGALHPHHAAGGLHFDDRFSDEQLVTMSVRELNRQLRGVSKEEVIRLKQKRRTLKNRGYAQSCRFKRVQQRHVLESEKNQLLQQVDHLKQEISRLVRERDAYKEKYEKLVSSGFRENGSSSDNPSSPEFFITEPTRKLEPSVGYATFWKPQHRVLTSVFTK

SEQ ID NO: 44354 - protein, 447 aa, Homo sapiens
MSKDKRIKSGKQSSTSKLLRDSRGPSVEKLSHRPSDPGKSKGTSHKRKRINPPLAKPKKGYSGKPSSGGDRATKTVSYRTTPSGLQIMPLKKSQNGMENGDAGSEKDERHFGNGSHQPGLDLNDHVGEQDMGECDVNHATLAENGLGSALTNGGLNLHSPVKRKLEAEKDYVFDKRLRYSVRQNESNCRFRDIVVRKEEGFTHILLSSQTSDNNALTPEIMKEVRRALCNAATDDSKLLLLSAVGSVFCSGLDYSYLIGRLSSDRRKESTRIAEAIRDFVKAFIQFKKPIVVAINGPALGLGASILPLCDIVWASEKAWFQTPYATIRLTPAGCSSYTFPQILGVALANEMLFCGRKLTAQEACSRGLVSQVFWPTTFSQEVMLRVKEMASCSAVVLEESKCLVRSFLKSVLEDVNEKECLMLKQLWSSSKGLDSLFSYLQDKIYEV

SEQ ID NO: 44355 - protein, 515 aa, Homo sapiens
MREILDYIFSGQIRLNEDTIQDVVQAADLLLLTDLKTLCCEFLEGCIAAENCIGIRDFALHYCLHHVHYLATEYLETHFRDVSSTEEFLELSPQKLKEVISLEKLNVGNERYVFEAVIRWIAHDTEIRKVHMKDVMSALWVSGLDSSYLREQMLNEPLVREIVKECSNIPLSQPQQGEAMLANFKPRGYSECIVTVGGEERVSRKPTAAMRCMCPLYDPNRQLWIELAPLSMPRINHGVLSAEGFLFVFGGQDENKQTLSSGEKYDPDANTWTALPPMNEARHNFGIVEIDGMLYILGGEDGEKELISMECYDIYSKTWTKQPDLTMVRKIGCYAAMKKKIYAMGGGSYGKLFESVECYDPRTQQWTAICPLKERRFGAVACGVAMELYVFGGVRSREDAQGSEMVTCKSEFYHDEFKRWIYLNDQNLCIPASSSFVYGAVPIGASIYVIGDLDTGTNYDYVREFKRSTGTWHHTKPLLPSDLRRTGCAALRIANCKLFRLQLQQGLFRIRVHSP

SEQ ID NO: 44356 - protein, 739 aa, Homo sapiens
MGAVPCRRALLLCNGMRYKLLQEGDIQVCVIRHPRTFLSKILTSKFLRRWEPHHLTLADNSLASATPTGYMENSVSYSAIEDVQLLSWENAPKYCLQLTIPGGTVLLQAANSYLRDQWFHSLQWKKKIYKYKKVLSNPSRWEVVLKEIRTLVDMALTSPLQDDSINQAPLEIVSKLLSENTNLTTQEHENIIVAIAPLLENNHPPPDLCEFFCKHCRERPRSMVVIEVFTPVVQRILKHNMDFGKCPRLRLFTQEYILALNELNAGMEVVKKFIQSMHGPTGHCPHPRVLPNLVAVCLAAIYSCYEEFINSRDNSPSLKEIRNGCQQPCDRKPTLPLRLLHPSPDLVSQEATLSEARLKSVVVASSEIHVEVERTSTAKPALTASAGNDSEPNLIDCLMVSPACSTMSIELGPQADRTLGCYVEILKLLSDYDDWRPSLASLLQPIPFPKEALAHEKFTKELKYVIQRFAEDPRQEVHSCLLSVRAGKDGWFQLYSPGGVACDDDGELFASMVHILMGSCYKTKKFLLSLAENKLGPCMLLALRGNQTMVEILCLMLEYNIIDNNDTQLQIISTLESTDVGKRMYEQLCDRQRELKELQRKGGPTRLTLPSKSTDADLARLLSSGSFGNLENLSLAFTNVTSACAEHLIKLPSLKQLNLWSTQFGDAGLRLLSEHLTMLQVLNLCETPVTDAGLLALSSMKSLCSLNMNSTKLSADTYEDLKAKLPNLKEVDVRYTEAW

SEQ ID NO: 44357 - protein, 848 aa, Homo sapiens
MGYTGANVRVAVFDTGLSEKHPHFKNVKERTNWTNERTLDDGLGHGTFVAGVIASMRECQGFAPDAELHIFRVFTNNQVSYTSWFLDAFNYAILKKIDVLNLSIGGPDFMDHPFVDKVWELTANNVIMVSAIGNDGPLYGTLNNPADQMDVIGVGGIDFEDNIARFSSRGMTTWELPGGYGRMKPDIVTYGAGVRGSGVKGGCRALSGTSVASPVVAGAVTLLVSTVQKRELVNPASMKQALIASARRLPGVNMFEQGHGKLDLLRAYQILNSYKPQASLSPSYIDLTECPYMWPYCSQPIYYGGMPTVVNVTILNGMGVTGRIVDKPDWQPYLPQNGDNIEVAFSYSSVLWPWSGYLAISISVTKKAASWEGIAQGHVMITVASPAETESKNGAEQTSTVKLPIKVKIIPTPPRSKRVLWDQYHNLRYPPGYFPRDNLRMKNDPLDWNGDHIHTNFRDMYQHLRSMGYFVEVLGAPFTCFDASQYGTLLMVDSEEEYFPEEIAKLRRDVDNGLSLVIFSDWYNTSVMRKVKFYDENTRQWWMPDTGGANIPALNELLSVWNMGFSDGLYEGEFTLANHDMYYASGCSIAKFPEDGVVITQTFKDQGLEVLKQETAVVENVPILGLYQIPAEGGGRIVLYGDSNCLDDSHRQKDCFWLLDALLQYTSYGVTPPSLSHSGNRQRPPSGAGSVTPERMEGNHLHRYSKVLEAHLGDPKPRPLPACPRLSWAKPQPLNETAPSNLWKHQKLLSIDLDKVVLPNFRSNRPQVRPLSPGESGAWDIPGGIMPGRYNQEVGQTIPVFAFLGAMVVLAFFVVQINKAKSRPKRRKPRVKRPQLMQQVHPPKTPSV

SEQ ID NO: 44358 - protein, 147 aa, Homo sapiens
MVHVVLPGMVERKKGAIVTISSGSCCKPTPQLAAFSASKAYLDHFSRALQYEYASKGIFVQSLIPFYVATSMTAPSNFLHRCSWLVPSPKVYAHHAVSTLGISKRTTGYWSHSIQFLFAQYMPEWLWVWGANILNRSLRKEALSCTA

SEQ ID NO: 44359 - protein, 345 aa, Homo sapiens [sequence omitted]

SEQ ID NO: 44360 - protein, 131 aa, Homo sapiens
MDRRDHPLPEVAHVKHLSASQKALKEKEKASWSSLSMDEKVELYRIKFKESFAEMNRGSNEWKTVVGGAMFFIGFTALVIMWQKHYVYGPLPQSFDKEWVAKQTKRMLDMKVNPIQGLASKWDYEKNEWKK

SEQ ID NO: 44361 - protein, 464 aa, Homo sapiens
MGVYSGHPEQYSAGMGRSYAPYHHHQPAAPKDLVKPPYSYIALITMAIQNAPEKKITLNGIYQFIMDRFPFYRENKQGWQNSIRHNLSLNECFVKVPRDDKKPGKGSYWTLDPDSYNMFENGSFLRRRRRFKKKDVSKEKEERAHLKEPPPAASKGAPATPHLADAPKEAEKKVVIKSEAASPALPVITKVETLSPESALQGSPRSAASTPAGSPDGSLPEHHAAAPNGLPGFSVENIMTLRTSPPGGELSPGAGRAGLVVPPLALPYAAAPPAAYGQPCAQGLEAGAAGGYQCSMRAMSLYTGAERPAHMCVPPALDEALSDHPSGPTSPLSALNLAAGQEGALAATGHHHQHHGHHHPQAPPPPPAPQPQPTPQPGAAAAQAASWYLNHSGDLNHLPGHTFAAQQQTFPNVREMFNSHRLGIENSTLGESQVSGNASCQLPYRSTPPLYRHAAPYSYDCTKY

SEQ ID NO: 44362 - protein, 286 aa, Homo sapiens
MAIQDAPEQRVTLNGIYQFIMDRFPFYHDNRQGWQNSIRHNLSLNDCFVKVPREKGRPGKGSYWTLDPRCLDMFENGNYRRRKRKPKPGPGAPEAKRPRAETHQRSAEAQPEAGSGAGGSGPAISRLQAAPAGPSPLLDGPSPPAPLHWPGTASPNEDAGDAAQGAAAVAVGQAARTGDGPGSPLRPASRSSPKSSDKSKSFSIDSILAGKQGQKPPSGDELLGGAKPGPGGRLGASLLAASSSLRPPFNASLMLDPHVQGGFYQLGIPFLSYFPLQVPDTVLHFQ

SEQ ID NO: 44363 - protein, 685 aa, Homo sapiens
MDTSPAILMPSSLQTPQTQEQNGILDWLRKLRLHKYYPVFKQLSMEKFLSLTEEDLNKFESLTMGAKKKLKTQLELEKEKSERRCLNPSAPPLVTSSGVARVPPTSHVGPVQSGRGSHAAELRVEVEQPHHQLPREGSSSEYSSSSSSPMGVQAREESSDSAEENDRRVEIHLESSDKEKPVMLLNHFTSSSARPTAQVLPVQNEASSNPSGHHPLPPQMLSAASHITPIRMLNSVHKPERGSADMKLLSSSVHSLLSLEERNKGSGPRSSMKVDKSFGSAMMDVLPASAPHQPVQVLSGLSESSSMSPTVSFGPRTKVVHASTLDRVLKTAQQPALVVETSTAATGTPSTVLHAARPPIKLLLSSSVPADSAISGQTSCPNNVQISVPPAIINPRTALYTANTKVAFSAMSSMPVGPLQGGFCANSNTASPSSHPSTSFANMATLPSCPAPSSSPALSSVPESSFYSSSGGGGSTGNIPASNPNHHHHHHHQQPPAPPQPAPPPPGCIVCTSCGCSGSCGSSGLTVSYANYFQHPFSGPSVFTFPFLPFSPMCSSGYVSAQQYGGGSTFPVVHAPYSSSGTPDPVLSGQSTFAVPPMQNFMAGTAGVYQTQGLVGSSNGSSHKKSGNLSCYNCGATGHRAQDCKQPSMDFNRPGKRAPWPRPPGSRRTSAHKCLVFMKSKLLSL

SEQ ID NO: 44364 - protein, 482 aa, Homo sapiens
MLAAKSADGSAPAGEGEGVTLQRNITLLNGVAIIVGTIIGSGIFVTPTGVLKEAGSPGLALVVWAACGVFSIVGALCYAELGTTISKSGGDYAYMLEVYGSLPAFLKLWIELLIIRPSSQYIVALVFATYLLKPLFPTCPVPEEAAKLVACLCVLLLTAVNCYSVKAATRVQDAFAAAKLLALALIILLGFVQIGKGDVSNLDPNFSFEGTKLDVGNIVLALYSGLFAYGGWNYLNFVTEEMINPYRNLPLAIIISLPIVTLVYVLTNLAYFTTLSTEQMLSSEAVAVDFGNYHLGVMSWIIPVFVGLSCFGSVNGSLFTSSRLFFVGSREGHLPSILSMIHPQLLTPVPSLVFTCVMTLLYAFSKDIFSVINFFSFFNWLCVALAIIGMIWLRHRKPELERPIKVNLALPVFFILACLFLIAVSFWKTPVECGIGFTIILSGLPVYFFGVWWKNKPKWLLQGIFSTTVLCQKLMQVVPQET

SEQ ID NO: 44365 - protein, 3940 aa, Homo sapiens
MTGDLQPRQVASSPGHPSQPPLEDNTPATRTTKGAREAGGQAQAMELPEAQPRQARDGELKPPSLRGQAPSSTPGKRGSPQTPPGRSPLQAPSRLAGRAEGSPPQRYILGIASSRTKPTLDETPENPQLEAAQLPEVDTPQGPGTGAPLRPGLPRTEAQPAAEELGFHRCFQEPPSSFTSTNYTSPSATPRPPAPGPPQSRGTSPLQPGSYPEYQASGADSWPPAAENSFPGANFGVPPAEPEPIPKGSRPGGSPRGVSFQFPFPALHGASTKPFPADVAGHAFTNGPLVFAFHQPQGAWPEEAVGTGPAYPLPTQPAPSPLPCYQGQPGGLNRHSDLSGALSSPGAAHSAPRPFSDSLHKSLTKILPERPPSAQDGLGSTRGPPSSLPQRHFPGQAYRASGVDTSPGPPDTELAAPGPPPARLPQLWDPTAAPYPTPPGGPLAATRSMFFNGQPSPGQRLCLPQSAPLPWPQVLPTARPSPHGMEMLSRLPFPAGGPEWQGGSQGALGTAGKTPGPREKLPAVRSSQGGSPALFTYNGMTDPGAQPLFFGVAQPQVSPHGTPSLPPPRVVGASPSESPLPSPATNTAGSTCSSLSPMSSSPANPSSEESQLPGPLGPSAFFHPPTHPQETGSPFPSPEPPHSLPTHYQPEPAKAFPFPADGLGAEGAFQCLEETPFPHEGPEVGRGGLQGFPRAPPPYPTHHFSLSSASLDQLDVLLTCRQCDRNYSSLAAFLAHRQFCGLLLARAKDGHQRSPGPPGLPSPPAAPRVPADAHAGLLSHAKTFLLAGDAQAEGKDDPLRTGFLPSLAATPFPLPASDLDMEDDAKLDSLITEALNGMEYQSDNPEIDSSFIDVFADEEPSGPRGPSSGHPLKSKAGVTPESKAPPPLPAATPDPQTPRPGDRGCPARGRPKTRSLGLAPTEADAPSQGRQQRRGKQLKLFRKDLDSGGAAEGSGSGGGGRASGLRPRRNDGLGERPPPRPRRPRTQAPGSRADPAPRVPRAAALPEETRSSRRRRLPPRKDPRKRKARGGAWGKELILKIVQQKNRRHRRLGRRAGRCGSLAAGRPRPGAEDRRLREYDFASESEEDEQPPPRGPGFRGRRGRGEKRKEVELTQGPREDEPQKPRKAARQEAGGDGAPANPEEPGGSRPGPGRSPQARGPSRSLETGAAAREGGPKCADRPSVAPKDPLQVPTNTETSEETRPSLDFPQEAKEPETAEESAPDSTEFTEALRSPPAACAGEMGASPGLLIPEQPPPSRHDTGTPKPSGSLANTAPHGSSPTPGVGSLLGGPGGTQAPVSHNSKDPPARQPGEFLAPVANPSSTACPKPSVLSSKISSFGCDPAGFNRDPLGVPVAKKGPQPYSSPHSELFLGPKDLAGCFLEELHPKPSARDAPPASSSCLCQDGEDAGSLEPQLPRSPPGTAETEPGRAASPPTLESSSLFPDLPVDRFDPPLYGSLSANRDSGLPFACADPPQKTVPSDPPYPSFLLLEEVSPMLPSHFPDLSGGKVLSKTCPPERTVVPGAAPSLPGKGSGCSVALMSHLSEDELEIQKLVTELESQLQRSKDTRGAPRELAEAESVGRVELGTGTEPPSQRRTCQATVPHEDTFSAADLTRVGESTAHREGAESAVATVEAVQGRPGGTWPCPASFHPGHAALLPCAQEDLVSGAPFSPRGANFHFQPVQKAGASKTGLCQAEGDSRPPQDVCLPEPSKQPGPQLDAGSLAKCSPDQELSFPKNKEAASSQESEDSLRLLPCEQRGGFLPEPGTADQPHRGAPAPEAFGSPAVHLAPDLAFQGDGAPPLDATWPFGASPSHAAQGHSAGRAGGHLHPTAGRPGFEGNEFAPAGASSLTAPRGREAWLVPVPSPACVSNTHPSRRSQDPALSPPIRQLQLPGPGVAKSKDGILGLQELTPAAQSPPRVNPSGLEGGTVEGGKVACGPAQGSPGGVQVTTLPAVAGHQLGLEADGHWGLLGQAEKTQGQGTANQLQPENGVSPGGTDNHASVNASPKTALTGPTEGAVLLEKCKGSRAAMSLQEEAEPTPSPPSPNRESLALALTAAHSRSGSEGRTPERASSPGLNKPLLATGDSPAPSVGDLAACAPSPTSAAHMPCSLGPLPREDPLTSPSRAQGGLGGQLPASPSCRDPPGPQQLLACSPAWAPLEEADGVQATTDTGAEDSPVAPPSLTTSPCDPKEALAGCLLQGEGSPLEDPSSWPPGSVSAVTCTHSGDTPKDSTLRIPEDSRKEKLWESPGRATSPPLAGAVSPSVAVRATGLSSTPTGDEAQAGRGLPGPDPQSRGAPPHTNPDRMPRGHSSYSPSNTARLGHREGQAVTAVPTEPPTLQGAGPDSPACLEGEMGTSSKEPEDPGTPETGRSGATKMPRVTCPSTGLGLGRTTAPSSTASDFQSDSPQSHRNASHQTPQGDPLGPQDLKQRSRGYKKKPASTENGQWKGQAPHGPVTCEVCAASFRSGPGLSRHKARKHRPHPGAPAEPSPAALPAQQPLEPLAQKCQPPRKKSHRVSGKERPNHSRGDPSHVTQPPPAQGSKEVLRAPGSPHSQQLHPPSPTEHEVDVKTPASKPRPDQAREDELHPKQAEKREGRRWRREPTVDSPSHSEGKSNKKRGKLRGRRLREESILPVSADVISDGRGSRPSPAMASYAASPSHCLSVEGGPEADGEQPPRLATLGPGVMEGAAETDQEALCAGETGAQKPPGDRMLCPGRMDGAALGEQPTGQKGASARGFWGPRETKALGVCKESGSEPAEDSSRAHSRSEEGVWEENTPPLGPLGFPETSSSPADSTTSSCLQGLPDNPDTQGGVQGPEGPTPDASGSSAKDPPSLFDDEVSFSQLFPPGGRLTRKRNPHVYGKRCEKPVLPLPTQPSFEEGGDPTLGPARLPTDLSDSSSLCLCHEDPWEDEDPAGLPESFLLDGFLNSRVPGIDPWAPGLSLWALEPSREAGAEKLPSHCPEDDRPEAIPELHMVPAAWRGLEMPAPADDSSSSLGDVSPEPPSLERERCDGGLPGNTHLLPLRATDFEVLSTKFEMQDLCFLGPFEDPVGLPGPSFLDFEGTASSQGPQSRRTEEAAGAGRAQGRGRPAKGRRASYKCKVCFQRFRSLGELDLHKLAHTPAPPPTCYMCVERRFGSRELLRGHLQERHAQSKAGPWACGMCLKEVADVWMYNEHLREHAVRFARRGQARRSLGDLPGGLEGSSAVAHLLNSITEPAPKHHRGKRSAGKAAGSPGDPWGQEGEAKKDSPGERAKPRARSTPSNPDGAATPDSASATALADAGSPGPPRTTPSPSPDPWAGGEPLLQATPVHEACKDPSRDCHHCGKRFPKPFKLQRHLAVHSPQRVYLCPRCPRVYPEHGELLAHLGGAHGLLERPELQHTPLYACELCATVMRIIKKSFACSSCNYTFAKKEQFDRHMNKHLRGGRQPFAFRGVRRPGAPGQKARALEGTLPSKRRRVAMPGSAPGPGEDRPPPRGSSPILSEGSLPALLHLCSEVAPSTTKGWPETLERPVDPVTHPIRGCELPSNHQECPPPSLSPFPAALADGRGDCALDGALERPENEASPGSPGPLLQQALPLGASLPRPGARGQDAEGKRAPLVFSGKRRAPGARGRCAPDHFQEDHLLQKEKEVSSSHMVSEGGPRGAFHKGSATKPAGCQSSSKDRSAASTPSKALKFPVHPRKAVGSLAPGELARGTENGMKPATPKAKPGPSSQGSGSPRPGTKTGGGSQPQPASGQLQSETATTPAKPSFPSRSPAPERLPARAQAKSCTKGPREAGEQGPHGSLGPKEKGESSTKRKKGQVPGPARSESVGSFGRAPSAPDKPPRTPRKQATPSRVLPTKPKPNSQNKPRPPPSEQRKAEPGHTQRKDRLGKAFPQGRPLLRPPKRGTAVHGAEPAEPHTHRTAEAQSDLLSQLFGQRLTGFKIPLKKDASE

SEQ ID NO: 44366 - protein, 974 aa, Homo sapiens
MEQKATAPEAPSPPSADVNSPPPLPPPTSPGGPKELEGQEPEPRPTEEEPGSPWSGPDELEPVVQDGQRRIRARLSLATGLSWGPFHGSVQTRASSPRQAEPSPALTLLLVDEACWLRTLPQALTEAEANTEIHRKDDALWCRVTKPVPAGGLLSVLLTAEPHSTPGHPVKKEPAEPTCPAPAHDLQLLPQQAGMASILATAVINKDVFPCKDCGIWYRSERNLQAHLLYYCASRQGTGSPAAAATDEKPKETYPNERVCPFPQCRKSCPSASSLEIHMRSHSGERPFVCLICLSAFTTKANCERHLKVHTDTLSGVCHSCGFISTTRDILYSHLVTNHMVCQPGSKGEIYSPGAGHPATKLPPDSLGSFQQQHTALQGPLASADLGLAPTPSPGLDRKALAEATNGEARAEPLAQNGGSSEPPAAPRSIKVEAVEEPEAAPILGPGEPGPQAPSRTPSPRSPAPARVKAELSSPTPGSSPVPGELGLAGALFLPQYVFGPDAAPPASEILAKMSELVHSRLQQGAGAGAGGAQTGLFPGAPKGATCFECEITFSNVNNYYVHKRLYCSGRRAPEDAPAARRPKAPPGPARAPPGQPAEPDAPRSSPGPGAREEGAGGAATPEDGAGGRGSEGSQSPGSSVDDAEDDPSRTLCEACNIRFSRHETYTVHKRYYCASRHDPPPRRPAAPPGPPGPAAPPAPSPAAPVRTRRRRKLYELHAAGAPPPPPPGHAPAPESPRPGSGSGSGPGLAPARSPGPAADGPIDLSKKPRRPLPGAPAPALADYHECTACRVSFHSLEAYLAHKKYSCPAAPPPGALGLPAAACPYCPPNGPVRGDLLEHFRLAHGLLLGAPLAGPGVEARTPADRGPSPAPAPAASPQPGSRGPRDGLGPEPQEPPPGPPPSPAAAPEAVPPPPAPPSYSDKGVQTPSKGTPAPLPNGNHRYCRLCNIKFSSLSTFIAHKKYYCSSHAAEHVK

SEQ ID NO: 44367 - protein, 145 aa, Homo sapiens
MTAEESANSPVDTTPKHPSQSTVCQKGTPNSASKTKDKVNKRNERGETRLHRAAIRGDARRIKELISEGADVNVKDFAGWTALHEACNRGYYDVAKQLLAAGAEVNTKGLDDDTPLHDAANNGHYKVGIPPFFTHPACPGIWVVL

SEQ ID NO: 44368 - protein, 775 aa, Homo sapiens
MAVLLLLLRALRRGPGPGPRPLWGPGPAWSPGFPARPGRGRPYMASRPPGDLAEAGGRALQSLQLRLLTPTFEGINGLLLKQHLVQNPVRLWQLLGGTFYFNTSRLKQKNKEKDKSKGKAPEEDEEERRRRERDDQMYRERLRTLLVIAVVMSLLNALSTSGGSISWNDFVHEMLAKGEVQRVQVVPESDVVEVYLHPGAVVFGRPRLALMYRMQVANIDKFEEKLRAAEDELNIEAKDRIPVSYKRTGFFGNALYSVGMTAVGLAILWYVFRLAGMTGREGGFSAFNQLKMARFTIVDGKMGKGVSFKDVAGMHEAKLEVREFVDYLKSPERFLQLGAKVPKGALLLGPPGCGKTLLAKAVATEAQVPFLAMAGPEFVEVIGGLGAARVRSLFKEARARAPCIVYIDEIDAVGKKRSTTMSGFSNTEEEQTLNQLLVEMDGMGTTDHVIVLASTNRADILDGALMRPGRLDRHVFIDLPTLQERREIFEQHLKSLKLTQSSTFYSQRLAELTPGFSGADIANICNEAALHAAREGHTSVHTLNFEYAVERVLAGTAKKSKILSKEEQKVVAFHESGHALVGWMLEHTEAVMKVSITPRTNAALGFAQMLPRDQHLFTKEQLFERMCMALGGRASEALSFNEVTSGAQDDLRKVTRIAYSMVKQFGMAPGIGPISFPEAQEGLMGIGRRPFSQGLQQMMDHEARLLVAKAYRHTEKVLQDNLDKLQAVRPWPGVGATASHSVHTAPTVPTPLVKYFQGTQSTENTLTDVNSTQLN

SEQ ID NO: 44369 - protein, 298 aa, Homo sapiens
MWPSLLRTATRWGPGRASHLSQACPFAGPQGSWVRSSFHLQPRMIGDVLSEDENDKKQNAQSSDESFEPYPERKVSGKKSESKEAKKSEEPRIRKKPGPKPGWKKKLRCEREELPTIYKCPYQGCTAVYRGADGMKKHIKEHHEEVRERPCPHPGCNKVFMIDRYLQRHVKLIHTEVRNYICDECGQTFKQRKHLLVHQMRHSGAKPLQCEVCGFQCRQRASLKYHMTKHKAETELDFACDQCGRRFEKAHNLNVHMSMVHPLTQTQDKALPLEAEPPPGPPSPSVTTEGQAVKPEPT

SEQ ID NO: 44370 - protein, 441 aa, Homo sapiens
MRLLESKKGLSFFAFEHSEEYQQAQHKFLVAVESMEPNNIVVLLQTSPYHVDSLLQLSDACRFQEDQEMARDLVERALYSMECAFHPLFSLTSGACRLDYRRPENRSFYLALYKQMSFLEKRGCPRTALEYCKLILSLEPDEDPLCMLLLIDHLALRARNYEYLIRLFQEWEAHRNLSQLPNFAFSVPLAYFLLSQQTDLPECEQSSARQKASLLIQQALTMFPGVLLPLLESCSVRPDASVSSHRFFGPNAEISQPPALSQLVNLYLGRSHFLWKEPATMSWLEENVHEVLQAVDAGDPAVEACENRRKVLYQRAPRNIHRHVILSEIKEAVAALPPDVTTQSVMGFDPLPPSDTIYSYVRPERLSPISHGNTIALFFRSLLPNYTMEGERPEEGVAGGLNRNQGLNRLMLAVRDMMANFHLNDLEAPHEDDAEGEGEWD

SEQ ID NO: 44371 - protein, 588 aa, Homo sapiens
MLARACQHAQGIARLHKRQRPVHQGFGLKGAVTLTILLGIFFLCWGPFFLHLTLIVLCPEHPTCGCIFKNFNLFLALIICNAIIDPLIYAFHSQELRRTLKEVLTCSCSQDRALVSWDVKSLGGSVCQELLPQQPQEKGLCDQKASSTALQRLLQKEFWEVISDEHGIDPSGNYVGDSDLQLERISVYYNEASSHKYVPRAILVDLEPGTMDSVRSGAFGHLFRPDNFIFGQSGAGNNWAKGHYTEGAELVDSVLDVVRKECENCDCLQGFQLTHSLGGGTGSGMGTLLISKVREEYPDRIMNTFSVVPSPKVSDTVVEPYNATLSIHQLVENTDETYCIDNEALYDICFRTLKLATPTYGDLNHLVSATMSGVTTSLRFPGQLNADLRKLAVNMVPFPRLHFFMPGFAPLTARGSQQYRALTVPELTQQMFDAKNMMAACDPRHGRYLTVATVFRGRMSMKEVDEQMLAIQSKNSSYFVEWIPNNVKVAVCDIPPRGLKMSSTFIGNSTAIQELFKRISEQFTAMFRRKAFLHWYTGEGMDEMEFTEAESNMNDLVSEYQQYQDATAEEEGEMYEDDEEESEAQGPK

SEQ ID NO: 44372 - protein, 668 aa, Homo sapiens
MTRRRQYGEVANLLQGVMNVLEHFHKYMGIPQIRQLSERVKAAQTELGQQILADFEEAFPSQGTKRPGGPSNVLRDACLVANILDPRIKQEIIKKFIKQHLSEYLVLFQENQDVAWLDKIDRRYAWIKRQLVDYEEKYGRMFPREWCMAERIAVEFCHVTRAELAKIMRTRAKEIEVKLLLFAIQRTTNFEGFLAKRFSGCTLTDGTLKKLESPPPSTNPFLEDEPTPEMEELATEKGDLDQPKKPKAPDNPFHGIVSKCFEPHLYVYIESQDKNLGELIDRFVADFKAQGPPKPNTDEGGAVLPSCADLFVYYKKCMVQCSQLSTGEPMIALTTIFQKYLREYAWKILSGNLPKTTTSSGGLTISSLLKEKEGSEVAKFTLEELCLICNILSTAEYCLATTQQLEEKLKEKVDVSLIERINLTGEMDTFSTVISSSIQLLVQDLDAACDPALTAMSKMQWQNVEHVGDQSPYVTSVILHIKQNVPIIRDNLASTRKYFTQFCVKFANSFIPKFITHLFKCKPISMVGAEQLLLDTHSLKMVLLDLPSISSQVVRKAPASYTKIVVKGMTRAEMILKVVMAPHEPLVVFVDNYIKLLTDCNTETFQKILDMKGLKRSEQSSMLELLRQRLPAPPSGAESSGSLSLTAPTPEQESSRIRKLEKLIKKRL

SEQ ID NO: 44373 - protein, 221 aa, Homo sapiens [sequence omitted]

SEQ ID NO: 44374 - protein, 313 aa, Homo sapiens [sequence omitted]

SEQ ID NO: 44375 - protein, 48 aa, Homo sapiens
MSLKQLLVVMPLKWTNGKQRVTEDNVLKNADSSSNCTPWNGQPSPICP

SEQ ID NO: 44376 - protein, 5 aa, Homo sapiens
MTFPQ

SEQ ID NO: 44377 - protein, 129 aa, Homo sapiens [sequence omitted]

SEQ ID NO: 44378 - protein, 159 aa, Homo sapiens
MLSDMDINAIAGTLKLYFRELPEPLLTDRLYPAFMEGIALSDPAAKENCMMHLLRSLPDPNLITFLFLLEHLKRVAEKEPINKMSLHNLATVFGPTLLRPSEVESKAHLTSAADIWSHDVMAQNSSGTHCTSPPTCSPRQGGCGRVVEPAPPAWGPTQT

SEQ ID NO: 44379 - protein, 152 aa, Homo sapiens
MEILLTKAENKDDKTLNLSKTLSGPLDLEQNSQGLPFKAISEGHLEAPLPRSPSRASSRRASSIATTSYAQDQEAPRDYLILAVVACFCPVWPLNLIPLIISIMSRSSMQQGNVDGARRLGRLARLLSITLIIMGIVIIMVAVTVNFTVQKK

SEQ ID NO: 44380 - protein, 483 aa, Homo sapiens
MLNLAFTVGSFLLSAITLPLGIVMDKYGPRKLRLLGSACFAVSCLLIAYGASKPNALSVLIFIALALNGFGGMCMTFTSLTLPNMFGDLRSTFIALMIGSYASSAVTFPGIKLIYDAGVSFIVVLVVWAGCSGLVFLNCFFNWPLEPFPGPEDMDYSVKIKFSWLGFDHKITGKQFYKQVTTVGRRLSVGSSMRSAKEQVALQEGHKLCLSTVDLEVKCQPDAAVAPSFMHSVFSPILLLSLVTMCVTQLRLIFYMGAMNNILKFLVSGDQKTVGLYTSIFGVLQLLCLLTAPVIGYIMDWRLKECEDASEEPEEKDANQGEKKKKKRDRQIQKITNAMRAFAFTNLLLVGFGVTCLIPNLPLQILSFILHTIVRGFIHSAVGGLYAAVYPSTQFGSLTGLQSLISALFALLQQPLFLAMMGPLQGDPLWVNVGLLLLSLLGFCLPLYLICYRRQLERQLQQRQEDDKLFLKINGSSNQEAFV

SEQ ID NO: 44381 - protein, 7 aa, Homo sapiens
MKKSMLH

SEQ ID NO: 44382 - protein, 495 aa, Homo sapiens
MPRNMALLWGLLVLSWSCLQGPCSVFSPVSAMEPLGRQLTSGPNQEQVSPLTLLKLGNQEPGGQTALKSPPGVCSRDPTPEQTHRLARAMMAFTADLFSLVAQTSTCPNLILSPLSVALALSHLALGAQNHTLQRLQQVLHAGSGPCLPHLLSRLCQDLGPGAFRLAARMYLQKGFPIKEDFLEQSEQLFGAKPVSLTGKQEDDLANINQWVKEATEGKIQEFLSGLPEDTVLLLLNAIHFQGFWRNKFDPSLTQRDSFHLDEQFTVPVEMMQARTYPLRWFLLEQPEIQVAHFPFKNNMSFVVLVPTHFEWNVSQVLANLSWDTLHPPLVWERPTKVRLPKLYLKHQMDLVATLSQLGLQELFQAPDLRGISEQSLVVSGVQHQSTLELSEVGVEAAAATSIAMSRMSLSSFSVNRPFLFFIFEDTTGLPLFVGSVRNPNPSAPRELKEQQDSPGNKDFLQSLKGFPRGDKLFGPDLKLVPPMEEDYPQFGSPK

SEQ ID NO: 44383 - protein, 603 aa, Homo sapiens
MQKGDTNIKPILQVINIRPITTGNSPPRYRLLMSDGLNTLSSFMLATQLNPLVEEEQLSSNCVCQIHRFIVNTLKDGRRVVILMELEVLKSAEAVGVKIGNPVPYNEGLGQPQVAPPAPAASPAASSRPQPQNGSSGMGSTVSKAYGASKTFGKAAGPSLSHTSGGTQSKVVPIASLTPYQSKWTICARVTNKSQIRTWSNSRGEGKLFSLELVDESGEIRATAFNEQVDKFFPLIEVNKVYYFSKGTLKIANKQFTAVKNDYEMTFNNETSVMPCEDDHHLPTVQFDFTGIDDLENKSKDSLVDIIGICKSYEDATKITVRSNNREVAKRNIYLMDTSGKVVTATLWGEDADKFDGSRQPVLAIKGARVSDFGGRSLSVLSSSTIIANPDIPEAYKLRGWFDAEGQALDGVSISDLKSGGVGGSNTNWKTLYEVKSENLGQGDKPDYFSSVATVVYLRKENCMYQACPTQDCNKKVIDQQNGLYRCEKCDTEFPNFKYRMILSVNIADFQENQWVTCFQESAEAILGQNAAYLGELKDKNEQAFEEVFQNANFRSFIFRVRVKVETYNDESRIKATVMDVKPVDYREYGRRLVMSIRRSALM

SEQ ID NO: 44384 - protein, 35 aa, Homo sapiens
MVMGDVTYGACCVDDFTARALGADFLVHYGHSCLS

SEQ ID NO: 44385 - protein, 656 aa, Homo sapiens
MAKVADTILFLLDPLEGWDSTGDYCLSCLFAQGLPTYTLAVQGISGLPLKKQIDTRKKLSKAVEKRFPHDKLLLLDTQQEAGMLLRQLANQKQQHLAFRDRRAYLFAHAVDFVPSEENNLVGTLKISGYVRGQTLNVNRLLHIVGYGDFQMKQIDAPGDPFPLNPRGIKPQKDPDMAMEICATDAVDDMEEGLKVLMKADPGRQESLQAEVIPDPMEGEQTWPTEEELSEAKDFLKESSKVVKKVPKGTSSYQAEWILDGGSQSGGEGDEYEYDDMEHEDFMEEESQDESSEEEEEYETMTIGESVHDDLYDKKVDEEAEAKMLEKYKQERLEEMFPDEVDTPRDVAARIRFQKYRGLKSFRTSPWDPKENLPQDYARIFQFQNFTNTRKSIFKEVEEKEVEGAEVGWYVTLHVSEVPVSVVECFRQGTPLIAFSLLPHEQKMSVLNMVVRRDPGNTEPVKAKEELIFHCGFRRFRASPLFSQHTAADKHKLQRFLTADMALVATVYAPITFPPASVLLFKQKSNGMHSLIATGHLMSVDPDRMVIKRVVLSGHPFKIFTKMAVVRYMFFNREDVLWFKPVELRTKWGRRGHIKEPLGTHGHMKCSFDGKLKSQDTVLMNLYKRVFPKWTYDPYVPEPVPWLKSEISSTVPQGGME

SEQ ID NO: 44386 - protein, 984 aa, Homo sapiens
MAALFTKVGKTCPVAGEICHKVQELQQQAEGRKPSGVSQEALRRQGSASGKAPALSPQALKHVWVRTALIEKVLDKVVQYLAENCSKYYEKEALLADPVFGPILASLLVGPCALEYTKLKTADHYWTDPSADELVQRHRIRGPPTRQDSPAKRPALGIRKRHSSGSASEDRLAACARECVESLHQNSRTRLLYGKNHVLVQPKEDMEAVPGYLSLHQSAESLTLKWTPNQLMNGTLGDSELEKSVYWDYALVVPFSQVVCIHCHQQKSGGTLVLVSQDGIQRPPLHFPQGGHLLSFLSCLENGLLPRGQLEPPLWTQQGKGKVFPKLRKRSSIRSVDMEEMGTGRATDYVFRIIYPGHRHEHITINYHHLAASRAASVDDDEEEEDKLHAMLSMICSRNLTAPNPMKDAGDMIEMQGFGPSLPAWHLEPLCSQGSSCLSCSSSSSPHATPSHCSCIPDRLPLRLLCESMKRQIVSRAFYGWLAHCRHLSTVRTHLSALVHHSVIPPDRPPGASAGLTKDVWSKYQKDKKNYKELELLRQVYYGGIEHEIRKDVWPFLLGHYKFGMSKKEMEQVDAVVAARYQQVLAEWKACEVVVRQREREAHPATRTKFSSGSSIDSHVQRLIHRDSTISNDVFISVDDLEPPEPQDPEDSRPKPEQEAGPGTPGTAVVEQQHSVEFDSPDSGLPSSRNYSVASGIQSSLDEGQSVGFEEEDGGGEEGSSGPGPAAHTLREPQDPSQEKPQAGELEAGEELAAVCAAAYTIELLDTVALNLHRIDKDVQRCDRNYWYFTPPNLERLRDVMCSYVWEHLDVGYVQGMCDLLAPLLVTLDNDQLAYSCFSHLMKRMSQNFPNGGAMDTHFANMRSLIQILDSELFELMHQNGDYTHFYFCYRWFLLDFKRELLYEDVFAVWEVIWAARHISSEHFVLFIALALVEAYREIIRDNNMDFTDIIKFFNERAEHHDAQEILRIARDLVHKVQMLIENK

SEQ ID NO: 44387 - protein, 556 aa, Homo sapiens [sequence omitted]

SEQ ID NO: 44388 - protein, 345 aa, Homo sapiens
MELESKLNEAKEEFTSGGPLGQKRDPKEWIPRPPEKYALSGHRSPVTRVIFHPVFSVMVSASEDATIKVWDYETGDFERTLKGHTDSVQDISFDHSGKLLASCSADMTIKLWDFQGFECIRTMHGHDHNVSSVAIMPNGDHIVSASRDKTIKMWEVQTGYCVKTFTGHREWVRMVRPNQDGTLIASCSNDQTVRVWVVATKECKAELREHEHVVECISWAPESSYSSISEATGSETKKSGKPGPFLLSGSRDKTIKMWDVSTGMCLMTLVGHDNWVRGVLFHSGGKFILSCADDKTLRVWDYKNKRCMKTLNAHEHFVTSLDFHKTAPYVVTGSVDQTVKVWECR

SEQ ID NO: 44389 - protein, 232 aa, Homo sapiens
MSEDLPYEVRRAQEINHLFGPKDSEDSYDIIFDLHNTTSNMGCTLILEDSRNNFLIQMFHYIKTSLAPLPCYVYLIEHPSLKYATTRSIAKYPVGIEVGPQPQGVLRADILDQMRKMIKHALDFIHHFNEGKEFPPCAIEVYKIIEKVDYPRDENGEIAAIIHPNLQDQDWKPLHPGDPMFLTLDGKTIPLGGDCTVYPVFVNEAAYYEKKEAFAKTTKLTLNAKSIRCCLH

SEQ ID NO: 44390 - protein, 47 aa, Homo sapiens
MQVNGWDMTMVTHDQARKRLTKRSEEVVRLLVTRQSLQKAVQQSMLS

SEQ ID NO: 44391 - protein, 64 aa, Homo sapiens
MRTSPGPGPGRDGKLAAWFVQRVAVMALVSGLHGVHLESGARLCVQFGSACGRMAFSELCHRFR

SEQ ID NO: 44392 - protein, 202 aa, Homo sapiens [sequence omitted]

SEQ ID NO: 44393 - protein, 519 aa, Homo sapiens
MGDPAPARSLDDIDLSALRDPAGIFELVEVVGNGTYGQVYKGRHVKTGQLAAIKVMDVTEDEEEEIKQEINMLKKYSHHRNIATYYGAFIKKSPPGNDDQLWLVMEFCGAGSVTDLVKNTKGNALKEDCIAYICREILRGLAHLHAHKVIHRDIKGQNVLLTENAEVKLVDFGVSAQLDRTVGRRNTFIGTPYWMAPEVIACDENPDATYDYRSDIWSLGITAIEMAEGAPPLCDMHPMRALFLIPRNPPPRLKSKKWSKKFIDFIDTCLIKTYLSRPPTEQLLKFPFIRDQPTERQVRIQLKDHIDRSRKKREETEYEYSGSEEEDDSHGEEGEPSSIMNVPGESTLRREFLRLQQENKSNSEALKQQQQLQQQQQRDPEAHIKHLLHQRQRRIEEQKEERRRVEEQQRREREQRKLQEKEQQRRLEDMQALRREEERRQAEREQVERRTRIPALPPSRSCCLPPLLPVPFPLLSPTPRFLLSFLASLFLSVFSHPSTPTLTPSLFLPCLIPISLPHP

SEQ ID NO: 44394 - protein, 324 aa, Homo sapiens
MAPEVIACDENPDATYDYRSDIWSLGITAIEMAEGAPPLCDMHPMRALFLIPRNPPPRLKSKKWSKKFIDFIDTCLIKTYLSRPPTEQLLKFPFIRDQPTERQVRIQLKDHIDRSRKKRGEKEETEYEYSGSEEEDDSHGEEGEPSSIMNVPGESTLRREFLRLQQENKSNSEALKQQQQLQQQQQRDPEAHIKHLLHQRQRRIEEQKEERRRVEEQQRREREQRKLQEKEQQRRLEDMQALRREEERRQAEREQEYIRHRLEEEQRQLEILQQQLLQEQALLLVTGPSASSGKMLFRASLLERDGNTSREGIHPGHQGNTSPL

SEQ ID NO: 44395 - protein, 160 aa, Homo sapiens [sequence omitted]

SEQ ID NO: 44396 - protein, 1103 aa, Homo sapiens
MKLKVQGMEPVSWQCLYGCYVHSSIVPTFHRRCYWLLQNPDIVLVHYLNVPALEDCGKGCSPIFCSISSDRREWLKWSREELLGQLKPMFHGIKWSCGNGTEEFSVEHLVQQILDTHPTKPAPRTHACLCSGGLGSGSLTHKCSSTKHRIISPKVEPRALTLTSIPHAHPPEPPPLIAPLPPELPKAHTSPSSSSSSSSSGFAEPLEIRPSPPTSRGGSSRGGTAILLLTGLEQRAGGLTPTRHLAPQADPRPSMSLAVVVGTEPSAPPAPPSPAFDPDRFLNSPQRGQTYGGGQGVSPDFPEAEAAHTPCSALEPAAALEPQAAARGPPPQSVAGGRRGNCFFIQDDDSGEELKGHGAAPPIPSPPPSPPPSPAPLEPSSRVGRGEALFGGPVGASELEPFSLSSFPDLMGELISDEAPSIPAPTPQLSPALSTITDFSPEWSYPEGGVKVLITGPWTEAAEHYSCVFDHIAVPASLVQPGVLRCYCPAHEVGLVSLQVAGREGPLSASVLFEYRARRFLSLPSTQLDWLSLDDNQFRMSILERLEQMEKRMAEIAAAGQVPCQGPDAPPVQDEGQGPGFEARVVVLVESMIPRSTWKGPERLAHGSPFRGMSLLHLAAAQGYARLIETLSQWRSVETGSLDLEQEVDPLNVDHFSCTPLMWACALGHLEAAVLLFRWNRQALSIPDSLGRLPLSVAHSRGHVRLARCLEELQRQEPSVEPPFALSPPSSSPDTGLSSVSSPSELSDGTFSVTSAYSSAPDGSPPPAPLPASEMTMEDMAPGQLSSGVPEAPLLLMDYEATNSKGPLSSLPALPPASDDGAAPEDADSPQAVDVIPVDMISLAKQIIEATPERIKREDFVGLPEAGASMRERTGAVGLSETMSWLASYLENVDHFPSSTPPSELPFERGRLAVPSAPSWAEFLSASTSGKMESDFALLTLSDHEQRELYEAARVIQTAFRKYKGRRLKEQQEVAAAVIQRCYRKYKQLTWIALKFALYKKMTQAAILIQSKFRSYYEQKRFQQSRRAAVLIQQHYRSYRRRPGPPHRTSATLPARNKGSFLTKKQDQAARKIMRFLRRCRHRMRELKQNQELEGLPQPGLAT

SEQ ID NO: 44397 - protein, 1008 aa, Homo sapiens
MFHGIKWSCGNGTEEFSVEHLVQQILDTHPTKPAPRTHACLCSGGLGSGSLTHKCSSTKHRIISPKVEPRALTLTSIPHAHPPEPPPLIAPLPPELPKAHTSPSSSSSSSSSGFAEPLEIRPSPPTSRGGSSRGGTAILLLTGLEQRAGGLTPTRHLAPQADPRPSMSLAVVVGTEPSAPPAPPSPAFDPDRFLNSPQRGQTYGGGQGVSPDFPEAEAAHTPCSALEPAAALEPQAAARGPPPQSVAGGRRGNCFFIQDDDSGEELKGHGAAPPIPSPPPSPPPSPAPLEPSSRVGRGEALFGGPVGASELEPFSLSSFPDLMGELISDEAPSIPAPTPQLSPALSTITDFSPEWSYPEGGVKVLITGPWTEAAEHYSCVFDHIAVPASLVQPGVLRCYCPAHEVGLVSLQVAGREGPLSASVLFEYRARRFLSLPSTQLDWLSLDDNQFRMSILERLEQMEKRMAEIAAAGQVPCQGPDAPPVQDEGQGPGFEARVVVLVESMIPRSTWKGPERLAHGSPFRGMSLLHLAAAQGYARLIETLSQWRSVETGSLDLEQEVDPLNVDHFSCTPLMWACALGHLEAAVLLFRWNRQALSIPDSLGRLPLSVAHSRGHVRLARCLEELQRQEPSVEPPFALSPPSSSPDTGLSSVSSPSELSDGTFSVTSAYSSAPDGSPPPAPLPASEMTMEDMAPGQLSSGVPEAPLLLMDYEATNSKGPLSSLPALPPASDDGAAPEDADSPQAVDVIPVDMISLAKQIIEATPERIKREDFVGLPEAGASMRERTGAVGLSETMSWLASYLENVDHFPSSTPPSELPFERGRLAVPSAPSWAEFLSASTSGKMESDFALLTLSDHEQRELYEAARVIQTAFRKYKGRRLKEQQEVAAAVIQRCYRKYKQFALYKKMTQAAILIQSKFRSYYEQKRFQQSRRAAVLIQQHYRSYRRRPGPPHRTSATLPARNKGSFLTKKQDQAARKIMRFLRRCRHRMRELKQNQELEGLPQPGLAT

SEQ ID NO: 44398 - protein, 610 aa, Homo sapiens
MVLELPKRWGKNSEFEGGKSTVNCSTTPVAERFFTSSTSLTLKHAAWYPSEILDPHVVLLTSDNVIRIYSLREPQTPTNVIILSEAEEESLVLNKGRAYTASLGETAVAFDFGPLAAVPKTLFGQNGKDEVVAYPLYILYENGETFLTYISLLHSPGNIGKLLGPLPMHPAAEDNYGYDACAVLCLPCVPNILVIATESGMLYHCVVLEGEEEDDHTSEKSWDSRIDLIPSLYVFECVELELALKLASGEDDPFDSDFSCPVKLHRDPKCPSRYHCTHEAGVHSVGLTWIHKLHKFLGSDEEDKDSLQELSTEQKCFVEHILCTKPLPCRQPAPIRGFWIVPDILGPTMICITSTYECLIWPLLSTVHPASPPLLCTREDVEVAESPLRVLAETPDSFEKHIRSILQRSVANPAFLKASEKDIAPPPEECLQLLSRATQVFREQYILKQDLAKEEIQRRVKLLCDQKKKQLEDLSYCREERKSLREMAERLADKYEEAKEKQEDIMNRMKKLLHSFHSELPVLSDSERDMKKELQLIPDQLRHLGNAIKQVTMKKDYQQQKMEKVLSLPKPTIILSAYQRKCIQSILKEEGEHIREMVKQINDIRNHVNF

SEQ ID NO: 44399 - protein, 426 aa, Homo sapiens
MVLELPKRWGKNSEFEGGKSTVNCSTTPVAERFFTSSTSLTLKHAAWYPSEILDPHVVLLTSDNVIRIYSLREPQTPTNVIILSEAEEESLVLNKGRAYTASLGETAVAFDFGPLAAVPKTLFGQNGKDEVVAYPLYILYENGETFLTYISLLHSPGNIGKLLGPLPMHPAAEDNYGYDACAVLCLPCVPNILVIATESGMLYHCVVLEGEEEDDHTSEKSWDSRIDLIPSLYVFECVELELALKLASGEDDPFDSDFSCPVKLHRDPKCPSRYHCTHEAGVHSVGLTWIHKLHKFLGSDEEDKDSLQELSTEQKCFVEHILCTKPLPCRQPAPIRGFWIVPDILGPTMICITSTYECLIWPLLSTVHPASPPLLCTREDVEVAESPLRVLAETPDSFEKHIRSILQRSVANPAFLKYATLGIAVL

SEQ ID NO: 44400 - protein, 40 aa, Homo sapiens
MAPSRLTATSTFQFQAILLPQPPPRVAGITEIALHKSTPV

SEQ ID NO: 44401 - protein, 700 aa, Homo sapiens
MLYVLQQQVKEIQEELDKLSPHKIKHTKKSWAMSKLAAAHRGAIRALQMFVTQFTDRGEHPLPARCKELGSLIRQLSLCSVKLDADPSVPDVVIDILQQIEALESLLEKKLSPKKVKKCFSEIRSRFPIGSQKALERWPSTSPKGERRPLTAKDTFPQETSRPSVAKQLLADKYQPDTELPETQRLQSELDVLDADIVLEEGPFILDQSASFKDEVLAVAKTKAGKKKPVTENVPFRKKDTLAPARQQGLRKAERGRQSQPHSKSRVQQTTVSSRLKMNRQPVKDRKAPWIPPNPTSPPASPKCAAWLKVKTSPRDATKEPLQQEDPQEESHLTGAVEHEAARLAWLDAETSKRLKELEELKAKEIDSMQKQRLDWLDAETSRRTKELNELKAEEMYRLQQLSVSATHLADKVEEAVLDRLKPLLVKAQRVNSTTEANIHLKDGSSVNTAKAQPAQEVAAVDFESNNIRQLDDFLEDCASELWAVTHAKILGSETLATVEDSKDSPDLEIMMRRMEEMEKYQESVRQRYNKIAYADPRLWMQEENNDQKISAISEKPLSPHPIRITKTVDRKDPAVNIMLERPCNGNSLDESVGTEEGSEKREAPLLSLAEDSQQKEGRAPLFVPPGMQHSIGDYCSRFEQYLRIISHEAVGSFNPWLIAESFSEELVDEALGAVAAELQDMCEDYAEAVFTSEFLEAAT

SEQ ID NO: 44402 - protein, 125 aa, Homo sapiens
METDDAGNRLRFQLELEFVQCLANPNYLNFLAQRGYFKDKAFVNYLKYLLYWKDPEYAKYLKYPQCLHMLELLQYEHFRKELVNAQCAKFIDEQQILHWQHYSRKRMRLQQALAEQQQQNNTSGK

SEQ ID NO: 44403 - protein, 628 aa, Homo sapiens [sequence omitted]

SEQ ID NO: 44404 - protein, 243 aa, Homo sapiens
MRTQCLLGLRTFVAFAAKLWSFFIYLLRRQIRTVIQYQTVRYDILPLSPVSRNRLAQVKRKILVLDLDETLIHSHHDGVLRPTVRPGTPPDFILKVVIDKHPVRFFVHKRPHVDFFLEVVSQWYELVVFTASMEIYGSAVADKLDNSRSILKRRYYRQHCTLELGSYIKDLSVVHSDLSSIVILDNSPGAYRSHPDNAIPIKSWFSDPSDTALLNLLPMLDALRFTADVRSVLSRNLHQHRLW

SEQ ID NO: 44405 - protein, 718 aa, Homo sapiens
MLPVWFTDNLEAAATYVQNQSEDCLYLNLYVPTEDGPLTKKRDEATLNPPDTDIRDPGKKPVMLFLHGGSYMEGTGNMFDGSVLAAYGNVIVATLNYRLGVLGFLSTGDQAAKGNYGLLDQIQALRWLSENIAHFGGDPERITIFGSGAGASCVNLLILSHHSEGLFQKAIAQSGTAISSWSVNYQPLKYTRLLAAKVGCDREDSAEAVECLRRKPSRELVDQDVQPARYHIAFGPVVDGDVVPDDPEILMQQGEFLNYDMLIGVNQGEGLKFVEDSAESEDGVSASAFDFTVSNFVDNLYGYPEGKDVLRETIKFMYTDWADRDNGEMRRKTLLALFTDHQWVAPAVATAKLHADYQSPVYFYTFYHHCQAEGRPEWADAAHGDELPYVFGVPMVGATDLFPCNFSKNDVMLSAVVMTYWTNFAKTGDPNQPVPQDTKFIHTKPNRFEEVVWSKFNSKEKQYLHIGLKPRVRDNYRANKVAFWLELVPHLHNLHTELFTTTTRLPPYATRWPPRPPAGAPGTRRPPPPATLPPEPEPEPGPRAYDRFPGDSRDYSTELSVTVAVGASLLFLNILAFAALYYKRDRRQELRCRRLSPPGGSGSGVPGGGPLLPAAGRELPPEEELVSLQLKRGGGVGADPAEALRPACPPDYTLALRRAPDDVPLLAPGALTLLPSGLGPPPPPPPPSLHPFGPFPPPPPTATSHNNTLPHPHSTTRV

SEQ ID NO: 44406 - protein, 42 aa, Homo sapiens
MMGSRVLRTGKLLEAAGAGPGSPALAVFAFGRGQSLLFQVPA

SEQ ID NO: 44407 - protein, 476 aa, Homo sapiens
MLLYSKSTSLTFHWKLWGRHRGRRRGLAHPKNHLSPQQGGATPQVPSPCCRFDSPRGPPPPRLGLLGALMAEDGVRGSPPVPSGPPMEEDGLRWTPKSPLDPDSGLLSCTLPNGFGGQSGPEGERSLAPPDASILISNVCSIGDHVAQELFQGSDLGMAEEAERPGEKAGQHSPLREEHVTCVQSILDEFLQTYGSLIPLSTDEVVEKLEDIFQQEFSTPSRKGLVLQLIQSYQRMPGNAMVRGFRVAYKRHVLTMDDLGTLYGQNWLNDQVMNMYGDLVMDTVPEKVHFFNSFFYDKLRTKGYDGVKRWTKNVDIFNKELLLIPIHLEVHWSLISVDVRRRTITYFDSQRTLNRRCPKHIAKYLQAEAVKKDRLDFHQGWKGYFKMNVARQNNDSDCGAFVLQYCKHLALSQPFSFTQQDMPKLRRQIYKELCHCKLTVQGNPPIPTISLLIPSSLAHVQAVSNPSLLQGKTNNI

SEQ ID NO: 44408 - protein, 577 aa, Homo sapiens [sequence omitted]

SEQ ID NO: 44409 - protein, 10 aa, Homo sapiens
MLRPPWRKEG

SEQ ID NO: 44410 - protein, 74 aa, Homo sapiens
MPEYRGQGIGSKIIKKVAEVALDKGCSQFRLAVLDWNQRAMDLYKALGAQDLTEAEGWHFFCFQGEATRKLAGK

SEQ ID NO: 44411 - protein, 517 aa, Homo sapiens [sequence omitted]

SEQ ID NO: 44412 - protein, 1313 aa, Homo sapiens
MDSSVSPAATTACVPYAPSRPPGLPGTTTSSSSSSSSNTGLRGVEPNPGIPGADHYQTPALEVSHHGRLGPSAHSSRKPFLGAPAATPHLSLPPGPSSPPPPPCPRLLRPPPPPAWLKGPACRAAREDGEILEELFFGTEGPPRPAPPPLPHREGFLGPPASRFSVGTQDSHTPPTPPTPTTSSSNSNSGSHSSSPAGPVSFPPPPYLARSIDPLPRPPSPAQNPQDPPLVPLTLALPPAPPSSCHQNTSGSFRRPESPRPRVSFPKTPEVGPGPPPGPLSKAPQPVPPGVGELPARGPRLFDFPPTPLEDQFEEPAEFKILPDGLANIMKMLDESIRKEEEQQQHEAGVAPQPPLKEPFASLQSPFPTDTAPTTTAPAVAVTTTTTTTTTTTATQEEEKKPPPALPPPPPLAKFPPPSQPQPPPPPPPSPASLLKSLASVLEGQKYCYRGTGAAVSTRPGPLPTTQYSPGPPSGATALPPTSAAPSAQGSPQPSASSSSQFSTSGGPWARERRAGEEPVPGPMTPTQPPPPLSLPPARSESEVLEEISRACETLVERVGRSATDPADPVDTAEPADSGTERLLPPAQAKEEAGGVAAVSGSCKRRQKEHQKEHRRHRRACKDSVGRRPREGRAKAKAKVPKEKSRRVLGNLDLQSEEIQGREKSRPDLGGASKAKPPTAPAPPSAPAPSAQPTPPSASVPGKKAREEAPGPPGVSRADMLKLRSLSEGPPKELKIRLIKVESGDKETFIASEVEERRLRMADLTISHCAADVVRASRNAKVKGKFRESYLSPAQSVKPKINTEEKLPREKLNPPTPSIYLESKRDAFSPVLLQFCTDPRNPITVIRGLAGSLRLNLGLFSTKTLVEASGEHTVEVRTQVQQPSDENWDLTGTRQIWPCESSRSHTTIAKYAQYQASSFQESLQEEKESEDEESEEPDSTTGTPPSSAPDPKNHHIIKFGTNIDLSDAKRWKPQLQELLKLPAFMRVTSTGNMLSHVGHTILGMNTVQLYMKVPGSRTPGHQENNNFCSVNINIGPGDCEWFAVHEHYWETISAFCDRHGVDYLTGSWWPILDDLYASNIPVYRFVQRPGDLVWINAGTVHWVQATGWCNNIAWNVGPLTAYQYQLALERYEWNEVKNVKSIVPMIHVSWNVARTVKISDPDLFKMIKFCLLQSMKHCQVQRESLVRAGKKIAYQGRVKDEPAYYCNECDVEVFNILFVTSENGSRNTYLVHCEGCARRRSAGLQGVVVLEQYRTEELAQAYDAFTLVRARRARGQRRRALGQAAGTGFGSPAAPFPEPPPAFSPQAPASTSR

SEQ ID NO: 44413 - protein, 1798 aa, Homo sapiens
MRPLIAKKNPKIPMSKMMTILGAKWREFSANNPFKGSAAAVAAAAAAAAAAVAEQVSAAVSSATPIAPSGPPALPPPPAADIQPPPIRRAKTKEGKGPGHKRRSKSPRVPDGRKKLRGKKMAPLKIKLGLLGGKRKKGGSYVFQSDEGPEPEAEESDLDSGSVHSASGRPDGPVRTKKLKRGRPGRKKKKVLGCPAVAGEEEVDGYETDHQDYCEVCQQGGEIILCDTCPRAYHLVCLDPELDRAPEGKWSCPHCEKEGVQWEAKEEEEEYEEEGEEEGEKEEEDDHMEYCRVCKDGGELLCCDACISSYHIHCLNPPLPDIPNGEWLCPRCTCPVLKGRVQKILHWRWGEPPVAVPAPQQADGNPDVPPPRPLQGRSEREFFVKWVGLSYWHCSWAKELQLEIFHLVMYRNYQRKNDMDEPPPLDYGSGEDDGKSDKRKVKDPHYAEMEEKYYRFGIKPEWMTVHRIINHSVDKKGNYHYLVKWRDLPYDQSTWEEDEMNIPEYEEHKQSYWRHRELIMGEDPAQPRKYKKKKKELQGDGPPSSPTNDPTVKYETQPRFITATGGTLHMYQLEGLNWLRFSWAQGTDTILADEMGLGKTIQTIVFLYSLYKEGHTKGPFLVSAPLSTIINWEREFQMWAPKFYVVTYTGDKDSRAIIRENEFSFEDNAIKGGKKAFKMKREAQVKFHVLLTSYELITIDQAALGSIRWACLVVDEAHRLKNNQSKFFRVLNGYKIDHKLLLTGTPLQNNLEELFHLLNFLTPERFNNLEGFLEEFADISKEDQIKKLHDLLGPHMLRRLKADVFKNMPAKTELIVRVELSPMQKKYYKYILTRNFEALNSRGGGNQVSLLNIMMDLKKCCNHPYLFPVAAMESPKLPSGAYEGGALIKSSGKLMLLQKMLRKLKEQGHRVLIFSQMTKMLDLLEDFLDYEGYKYERIDGGITGALRQEAIDRFNAPGAQQFCFLLSTRAGGLGINLATADTVIIFDSDWNPHNDIQAFSRAHRIGQANKVMIYRFVTRASVEERITQVAKRKMMLTHLVVRPGLGSKAGSMSKQELDDILKFGTEELFKDENEGENKEEDSSVIHYDNEAIARLLDRNQDATEDTDVQNMNEYLSSFKVAQYVVREEDKIEEIEREIIKQEENVDPDYWEKLLRHHYEQQQEDLARNLGKGKRVRKQVNYNDAAQEDQDNQSEYSVGSEEEDEDFDERPEGRRQSKRQLRNEKDKPLPPLLARVGGNIEVLGFNTRQRKAFLNAVMRWGMPPQDAFTTQWLVRDLRGKTEKEFKAYVSLFMRHLCEPGADGSETFADGVPREGLSRQQVLTRIGVMSLVKKKVQEFEHINGRWSMPELMPDPSADSKRSSRASSPTKTSPTTPEASATNSPCTSKPATPAPSEKGEGIRTPLEKEEAENQEEKPEKNSRIGEKMETEADAPSPAPSLGERLEPRKIPLEDEVPGVPGEMEPEPGYRGDREKSEDVKGDRELRPGPRDEPRSNGRREEKTEKPRFMFNIADGGFTELHTLWQNEERAAISSGKLNEIWHRRHDYWLLAGIVLHGYARWQDIQNDAQFAIINEPFKTEANKGNFLEMKNKFLARRFKLLEQALVIEEQLRRAAYLNLSQEPAHPAMALHARFAEAECLAESHQHLSKESLAGNKPANAVLHKVLNQLEELLSDMKADVTRLPATLSRIPPIAARLQMSERSILSRLASKGTEPHPTPAYPPGPYATPPGYGAAFSAAPVGALAAAGANYSQMPAGSFITAATNGPPVLVKKEKEMVGALVSDGLDRKEPRAGEVICIDD

SEQ ID NO: 44414 - protein, 71 aa, Homo sapiens
MRVNVDKVLERDQKLSELDDRADALQAGASQFETSAAKLKRKYWWKNLKMMIILGVICAIILIIIIVYFST

SEQ ID NO: 44415 - protein, 146 aa, Homo sapiens
MGAIDVSDLRPVPDNQEVFCHPVTDQSLIVELLELQAHVRGEAAARYHFEDVGGVQGARAVHVESVQPLSLENLALRGRCQEAWVLSGKQQIAKENQQVRARECVMSWKGGSGDAEIQVSILTLIPLGSKGRDTSSGLAEAAPVPD

SEQ ID NO: 44416 - protein, 379 aa, Homo sapiens
MSVTKLVESKSYNSKVFSKEKYFQTIKEVKEAKEKGKKSSRDYRRAAKYDVISVQGTEKLIEATHGERDRIRYYVHKEELFDILHDTHLSIGHGGRTRMLKELQGKYGNVTKEVIVLYLTLCKQCHQKNPVPKRGLAPKPMTFKDIDSTCQVEILDMQSSADGEFKFILYYQDHSTKFIILRPLRTKQAHEVVSVLLDIFTILGTPSVLDSDSGVEFTNQVVHELNELWPDLKIVSGKYHPGQSQGSLEGASRDVKNMISTWMQSNHSCHWAKGLRFMQMVRNQAFDVSLQQSPFEAMFGYKAKFGLYSSNLPRETVATLQTEEELEIAEEQLENSLWIRQEERAEIGADRSDMDDDMDPTPEASEPSTSQGTSGLLCW

SEQ ID NO: 44417 - protein, 140 aa, Homo sapiens
MDSAVQASLSLPATPVGKGTENTFPSPKAIPNGFGTSPLTPSARISALNIVGDLLRKVGALESKLAACRNFAKDQASRKSYISGNVNCGVLNGNGTKFSRSGHTSFFDKGAVNGFDPAPPPPGLGSSRPSSAPGMLPLSV

SEQ ID NO: 44418 - protein, 123 aa, Homo sapiens
MDSAVQASLSLPATPVGKGTENTFPSPKAIPNGFGTSPLTPSARISALNIVGDLLRKVGALESKLAACRNFAKDQASRKSYISGNVNCGVLNGNGTKFSRSGHTSFFDKGQEKVIFPTLFMGQ

SEQ ID NO: 44419 - protein, 1498 aa, Homo sapiens
MVTRINQQLDTKQPRQYFIGVLDIAGFEIFDFNSLEQLCINFTNEKLQQFFNHHMFVLEQEEYKKEGIEWEFIDFGMDLAACIELIEKPMGIFSILEEECMFPKATDTSFKNKLYDQHLGKSNNFQKPKPAKGKAEAHFSLVHYAGTVDYNIAGWLDKNKDPLNETVVGLYQKSSLKLLSFLFSNYAGAETGDSGGSKKGGKKKGSSFQTVSAVFRENLNKLMTNLRSTHPHFVRCLIPNETKTPGVMDHYLVMHQLRCNGVLEGIRICRKGFPSRILYADFKQRYRILNASAIPEGQFIDSKNASEKLLNSIDVDREQFRFGNTKVFFKAGLLGLLEEMRDEKLVTLMTSTQAVCRGYLMRVEFKKMMERRDSIFCIQYNIRSFMNVKHWPWMNLFFKIKPLLKSAEAEKEMATMKEDFERTKEELARSEARRKELEEKMVSLLQEKNDLQLQVQSETENLMDAEERCEGLIKSKILLEAKVKELTERLEEEEEMNSELVAKKRNLEDKCSSLKRDIDDLELTLTKVEKEKHATENKVKNLSEEMTALEENISKLTKEKKSLQEAHQQTLDDLQVEEDKVNGLIKINAKLEQQTDDLEGSLEQEKKLRADLERAKRKLEGDLKMSQESIMDLENDKQQIEEKLKKKEFELSQLQAKIDDEQVHSLQFQKKIKELQARIEELEEEIEAEHTLRAKIEKQRSDLARELEEISERLEEASGATSAQIEMNKKREAEFQKMRRDLEEATLQHEATAATLRKKQADSVAELGEQIDNLQRVKQKLEKEKSELKMEIDDMASNIEALSKSKSNIERTCRTVEDQFSEIKAKDEQQTQLIHDLNMQKARLQTQNGELSHRVEEKESLISQLTKSKQALTQQLEELKRQMEEETKAKNAMAHALQSSRHDCDLLREQYEEEQEAKAELQRALSKANSEVAQWRTKYETDAIQRTEELEEAKKKLAQRLQEAEENTETANSKCASLEKTKQRLQGEVEDLMRDLERSHTACATLDKKQRNFDKVLAEWKQKLDESQAELEAAQKESRSLSTELFKMRNAYEEVVDQLETLRRENKNLQEEISDLTEQIAETGKNLQEAEKTKKLVEQEKSDLQVALEEVEGSLEHEESKILRVQLELSQVKSELDRKVIEKDEEIEQLKRNSQRAAEALQSVLDAEIRSRNDALRLKKKMEGDLNEMEIQLGHSNRQMAETQKHLRTVQGQLKDSQLHLDDALRSNEDLKEQLAIVERRNGLLLEELEEMKVALEQTERTRRLSEQELLDASDRVQLLHSQNTSLINTKKKLEADIAQCQAEVENSIQESRNAEEKAKKAITDAAMMAEELKKEQDTSAHLERMKKNLEQTVKDLQHRLDEAEQLALKGGKKQIQKLENRVRELENELDVEQKRGAEALKGAHKYERKVKEMTYQAEEDHKNILRLQDLVDKLQAKVKSYKRQAEEAEEQANTQLSRCRRVQHELEEAAERADIAESQVNKLRAKSRDVGSQKMEE

SEQ ID NO: 44420 - protein, 1933 aa, Homo sapiens
MAIFGEAAPFLRKSERERIEAQNKPFDAKTSVFVVDPKESFVKATVQSREGGKVTAKTEAGATVTVKDDQVFPMNPPKYDKIEDMAMMTHLHEPAVLYNLKERYAAWMIYTYSGLFCVTVNPYKWLPVYNAEVVTAYRGKKRQEAPPHIFSISDNAYQFMLTDRENQSILITGESGAGKTVNTKRVIQYFATIAVTGEKKKEEVTSGKMQGTLEDQIISANPLLEAFGNAKTVRNDNSSRFGKFIRIHFGTTGKLASADIETYLLEKSRVTFQLKAERSYHIFYQIMSNKKPDLIEMLLITTNPYDYAFVSQGEITVPSIDDQEELMATDSAIEILGFTSDERVSIYKLTGAVMHYGNMKFKQKQREEQAEPDGTEVADKAAYLQNLNSADLLKALCYPRVKVGNEYVTKGQTVQQVYNAVGALAKAVYDKMFLWMVTRINQQLDTKQPRQYFIGVLDIAGFEIFDFNSLEQLCINFTNEKLQQFFNHHMFVLEQEEYKKEGIEWTFIDFGMDLAACIELIEKPMGIFSILEEECMFPKATDTSFKNKLYEQHLGKSNNFQKPKPAKGKPEAHFSLIHYAGTVDYNIAGWLDKNKDPLNETVVGLYQKSAMKTLALLFVGATGAEAEAGGGKKGGKKKGSSFQTVSALFRENLNKLMTNLRSTHPHFVRCIIPNETKTPGAMEHELVLHQLRCNGVLEGIRICRKGFPSRILYADFKQRYKVLNASAIPEGQFIDSKKASEKLLGSIDIDHTQYKFGHTKVFFKAGLLGLLEEMRDEKLAQLITRTQAMCRGFLARVEYQKMVERRESIFCIQYNVRAFMNVKHWPWMKLYFKIKPLLKSAETEKEMANMKEEFEKTKEELAKTEAKRKELEEKMVTLMQEKNDLQLQVQAEADSLADAEERCDQLIKTKIQLEAKIKEVTERAEDEEEINAELTAKKRKLEDECSELKKDIDDLELTLAKVEKEKHATENKVKNLTEEMAGLDETIAKLTKEKKALQEAHQQTLDDLQAEEDKVNTLTKAKIKLEQQVDDLEGSLEQEKKIRMDLERAKRKLEGDLKLAQESTMDIENDKQQLDEKLKKKEFEMSGLQSKIEDEQALGMQLQKKIKELQARIEELEEEIEAERASRAKAEKQRSDLSRELEEISERLEEAGGATSAQIEMNKKREAEFQKMRRDLEEATLQHEATAATLRKKHADSVAELGEQIDNLQRVKQKLEKEKSEMKMEIDDLASNMETVSKAKGNLEKMCRALEDQLSEIKTKEEEQQRLINDLTAQRARLQTESGEYSRQLDEKDTLVSQLSRGKQAFTQQIEELKRQLEEEIKAKSALAHALQSSRHDCDLLREQYEEEQEAKAELQRAMSKANSEVAQWRTKYETDAIQRTEELEEAKKKLAQRLQDAEEHVEAVNAKCASLEKTKQRLQNEVEDLMIDVERTNAACAALDKKQRNFDKILAEWKQKCEETHAELEASQKESRSLSTELFKIKNAYEESLDQLETLKRENKNLQQEISDLTEQIAEGGKRIHELEKIKKQVEQEKSELQAALEEAEASLEHEEGKILRIQLELNQVKSEVDRKIAEKDEEIDQMKRNHIRIVESMQSTLDAEIRSRNDAIRLKKKMEGDLNEMEIQLNHANRMAAEALRNYRNTQAILKDTQLHLDDALRSQEDLKEQLAMVERRANLLQAEIEELRATLEQTERSRKIAEQELLDASERVQLLHTQNTSLINTKKKLETDISQIQGEMEDIIQEARNAEEKAKKAITDAAMMAEELKKEQDTSAHLERMKKNLEQTVKDLQHRLDEAEQLALKGGKKQIQKLEARVRELEGEVESEQKRNVEAVKGLRKHERKVKELTYQTEEDRKNILRLQDLVDKLQAKVKSYKRQAEEAEEQSNVNLSKFRRIQHELEEAEERADIAESQVNKLRVKSREVHTKIISEE

SEQ ID NO: 44421 - protein, 299 aa, Homo sapiens [sequence omitted]

SEQ ID NO: 44422 - protein, 247 aa, Homo sapiens
MFKRLKVPVHHTWGNHEFYNFSREYLTHSKLNTKFLEDQIVHHPETMPSEDYYAYHFVPFPKFRFILLDAYDLSVLGVDQSSPKYEQCMKILREHNPNTELNSPQGLSEPQFVQFNGGFSQEQLNWLNEVLTFSDTNQEKVVIVSHLPIYPDASDNVCLAWNYRDALAVIWSHECVVCFFAGHTHDGGYSEDPFGVYHVNLEGVIETAPDSQAFGTVHVYPDKMMLKGRGRVPDRIMNYKKERAFHC

SEQ ID NO: 44423 - protein, 253 aa, Homo sapiens
MDLDVVMRSSDCPYIVQFYGALFREGDCWICMELMSTSFDKFYKYVYSVLDDVIPEEILGKITLATVKALNHLKENLKIIHRDIKPSNILLDRSGNIKLCDFGISGQLVDSIAKTRDAGCRPYMAPERIDPSASRQGYDVRSDVWSLGITLYELATGRFPYPKWNSVFDQLTQVVKGDPPQLSNSEEREFSPSFINFVNLCLTKDESKRPKYKELLKHPFILMYEERAVEVACYVCKILDQMPATPSSPMYVD

SEQ ID NO: 44424 - protein, 273 aa, Homo sapiens
MKDEPEEAELILHDALRLAYQTDNKKAITYTYDLMANLAFIRGQLENAEQLFKATMSYLLGGGMKQEDNAIIEISLKLASIYAAQNRQEFAVAGYEFCISTLEEKIEREKELAEDIMSVEEKANTHLLLGMCLDACARYLLFSKQPSQAQRMYEKALQISEEIQGERHPQTIVLMSDLATTLDAQGRFDEAYIYMQRASDLARQINHPELHMVLSNLAAVLMHRERYTQAKEIYQEALKQAKLKKDEISVQHIREELAELSKKSRPLTNSVKL

SEQ ID NO: 44425 - protein, 2256 aa, Homo sapiens
MDRVDREIAKVEQQILKLKKKQQQLEEEAAKPPEPEKPVSPPPVEQKHRSIVQIIYDENRKKAEEAHKIFEGLGPKVELPLYNQPSDTKVYHENIKTNQVMRKKLILFFKRRNHARKQREQKICQRYDQLMEAWEKKVDRIENNPRRKAKESKTREYYEKQFPEIRKQREQQERFQRVGQRGAGLSATIARSEHEISEIIDGLSEQENNEKQMRQLSVIPPMMFDAEQRRVKFINMNGLMEDPMKVYKDRQFMNVWTDHEKEIFKDKFIQHPKNFGLIASYLERKSVPDCVLYYYLTKKNENYKALVRRNYGKRRGRNQQIARPSQEEKVEEKEEDKAEKTEKKEEEKKDEEEKDEKEDSKENTKEKDKIDGTAEETEEREQATPRGRKTANSQGRRKGRITRSMTNEAAAASAAAAAATEEPPPPLPPPPEPISTEPVETSRWTEEEMEVAKKGLVEHGRNWAAIAKMVGTKSEAQCKNFYFNYKRRHNLDNLLQQHKQKTSRKPREERDVSQCESVASTVSAQEDEDIEASNEEENPEDSEVEAVKPSEDSPENATSRGNTEPAVELEPTTETAPSTSPSLAVPSTKPAEDESVETQVNDSISAETAEQMDVDQQEHSAEEGSVCDPPPATKADSVDVEVRVPENHASKVEGDNTKERDLDRASEKVEPRDEDLVVAQQINAQRPEPQSDNDSSATCSADEDVDGEPERQRMFPMDSKPSLLNPTGSILVSSPLKPNPLDLPQLQHRAAVIPPMVSCTPCNIPIGTPVSGYALYQRHIKAMHESALLEEQRQRQEQIDLECRSSTSPCGTSKSPNREWEVLQPAPHQVITNLPEGVRLPTTRPTRPPPPLIPSSKTTVASEKPSFIMGGSISQGTPGTYLTSHNQASYTQETPKPSVGSISLGLPRQQESAKSATLPYIKQEEFSPRSQNSQPEGLLVRAQHEGVVRGTAGAIQEGSITRGTPTSKISVESIPSLRGSITQGTPALPQTGIPTEALVKGSISRMPIEDSSPEKGREEAASKGHVIYEGKSGHILSYDNIKNAREGTRSPRTAHEISLKRSYESVEGNIKQGMSMRESPVSAPLEGLICRALPRGSPHSDLKERTVLSGSIMQGTPRATTESFEDGLKYPKQIKRESPPIRAFEGAITKGKPYDGITTIKEMGRSIHEIPRQDILTQESRKTPEVVQSTRPIIEGSISQGTPIKFDNNSGQSAIKHNVKSLITGPSKLSRGMPPLEIVPENIKVVERGKYEDVKAGETVRSRHTSVVSSGPSVLRSTLHEAPKAQLSPGIYDDTSARRTPVSYQNTMSRGSPMMNRTSDVTISSNKSTNHERKSTLTPTQRESIPAKSPVPGVDPVVSHSPFDPHHRGSTAGEVYRSHLPTHLDPAMPFHRALDPAAAAYLFQRQLSPTPGYPSQYQLYAMENTRQTILNDYITSQQMQVNLRPDVARGLSPREQPLGLPYPATRGIIDLTNMPPTILVPHPGGTSTPPMDRITYIPGTQITFPPRPYNSASMSPGHPTHLAAAASAEREREREREKERERERIAAASSDLYLRPGSEQPGRPGSHGYVRSPSPSVRTQETMLQQRPSVFQGTNGTSVITPLDPTAQLRIMPLPAGGPSISQGLPASRYNTAADALAALVDAAASAPQMDVSKTKESKHEAARLEENLRSRSAAVSEQQQLEQKTLEVEKRSVQCLYTSSAFPSGKPQPHSSVVYSEAGKDKGPPPKSRYEEELRTRGKTTITAANFIDVIITRQIASDKDARERGSQSSDSSSSLSSHRYETPSDAIEVISPASSPAPPQEKLQTYQPEVVKANQAENDPTRQYEGPLHHYRPQQESPSPQQQLPPSSQAEGMGQVPRTHRLITLADHICQIITQDFARNQVSSQTPQQPPTSTFQNSPSALVSTPVRTKTSNRYSPESQAQSVHHQRPGSRVSPENLVDKSRGSRPGKSPERSHVSSEPYEPISPPQVPVVHEKQDSLLLLSQRGAEPAEQRNDARSPGSISYLPSFFTKLENTSPMVKSKKQEIFRKLNSSGGGDSDMAAAQPGTEIFNLPAVTTSGSVSSRGHSFADPASNLGLEDIIRKALMGSFDDKVEDHGVVMSQPMGVVPGTANTSVVTSGETRREEGDPSPHSGGVCKPKLISKSNSRKSKSPIPGQGYLGTERPSSVSSVHSEGDYHRQTPGWAWEDRPSSTGSTQFPYNPLTMRMLSSTPPTPIACAPSAVNQAAPHQQNRIWEREPAPLLSAQYETLSDSDD

SEQ ID NO: 44426 - protein, 754 aa, Homo sapiens
MNSSSRSQILLRWKSDKAQSGPYNVEKEILTSRFLRDTETCRQNFRNFPYPDLAGPRKALSQLRELCLKWLRPEIHSKEQILELLVLEQFLTILPGEVRTWVKSQYPESSEEAVTLVEDLTQILEEEAPQNSTLSQDTPEEDPRGKHAFQTGWLNDLVTKESMTFKDVAVDITQEDWELMRPVQKELYKTVTLQNYWNMVSLGLTVYRPTVIPILEEPWMVIKEILEGPSPEWETKAQACTPVEDMSKLTKEETHTIKLEDSYDYDDRLERRGKGGFWKIHTDERGFSLKSVLSQEYDPTEECLSKYDIYRNNFEKHSNLIVQFDTQLDNKTSVYNEGRATFNHVSYGIVHRKILPGEKPYKCNVCGKKFRKYPSLLKHQSTHAKEKSYECEECGKEFRHISSLIAHQRMHTGEKPYECHQCGKAFSQRAHLTIHQRIHTGEKPYKCDDCGKDFSQRAHLTIHQRTHTGEKPYKCLECGKTFSHSSSLINHQRVHTGEKPYICNECGKTFSQSTHLLQHQKIHTGKKPYKCNECWKVFSQSTYLIRHQRIHSGEKCYKCNECGKAFAHSSTLIQHQTTHTGEKSYICNICGKAFSQSANLTQHHRTHTGEKPYKCSVCGKAFSQSVHLTQHQRIHNGEKPFKCNICGKAYRQGANLTQHQRIHTGEKPYKCNECGKAFIYSSSLNQHQRTHTGERPYKCNECDKDFSQRTCLIQHQRIHTGEKPYACRICGKTFTQSTNLIQHQRVHTGAKHRN

SEQ ID NO: 44427 - protein, 880 aa, Homo sapiens
MVYPRTNKQNQKKKRKVEPPTPQEPGPAKVAVTSSSSSSSSSSSIPSAEKVPTTKSTLWQEEMRTKDQPDGSSLSPAQSPSQSQPPAASSLREPGLESKEEESAMSSDRMDCGRKVRVESGYFSLEKTKQDLKAEEQQLPPPLSPPSPSTPNHRRSQVIEKFEALDIEKAEHMETNAVGPSPSSDTRQGRSEKRAFPRKRDFTNEAPPAPLPDASASPLSPHRRAKSLDRRSTEPSVTPDLLNFKKGWLTKQYEDGQWKKHWFVLADQSLRYYRDSVAEEAADLDGEIDLSACYDVTEYPVQRNYGFQIHTKEGEFTLSAMTSGIRRNWIQTIMKHVHPTTAPDVTSSLPEEKNKSSCSFETCPRPTEKQEAELGEPDPEQKRSRARERRREGRSKTFDWAEFRPIQQALAQERVGGVGPADTHEPLRPEAEPGELERERARRREERRKRFGMLDATDGPGTEDAALRMEVDRSPGLPMSDLKTHNVHVEIEQRWHQVETTPLREEKQVPIAPVHLSSEDGGDRLSTHELTSLLEKELEQSQKEASDLLEQNRLLQDQLRVALGREQSAREGYVLQATCERGFAAMEETHQKKIEDLQRQHQRELEKLREEKDRLLAEETAATISAIEAMKNAHREEMERELEKSQRSQISSVNSDVEALRRQYLEELQSVQRELEVLSEQYSQKCLENAHLAQALEAERQALRQCQRENQELNAHNQELNNRLAAEITRLRTLLTGDGGGEATGSPLAQGKDAYELEVLLRVKESEIQYLKQEISSLKDELQTALRDKKYASDKYKDIYTELSIAKAKADCDISRLKEQLKAATEALGEKSPDSATVSGYDIMKSKSNPDFLKKDRSCVTRQLRNIRSKSVIEQVSWDT

SEQ ID NO: 44428 - protein, 2280 aa, Homo sapiens
MVYPRTNKQNQKKKRKVEPPTPQEPGPAKVAVTSSSSSSSSSSSIPSAEKVPTTKSTLWQEEMRTKDQPDGSSLSPAQSPSQSQPPAASSLREPGLESKEEESAMSSDRMDCGRKVRVESGYFSLEKTKQDLKAEEQQLPPPLSPPSPSTPNHRYSCPESPSQELGGPLPSPGPRLPHQMVCSISLSSLDVASQPPAYVDSGSTRGRGTERLGSAFAFKASRQYATLADVPKAIRISHREAFQVERRRLERRTRARSPGREEVARLFGNERRRSQVIEKFEALDIEKAEHMETNAVGPSPSSDTRQGRSEKRAFPRKRDFTNEAPPAPLPDASASPLSPHRRAKSLDRRSTEPSVTPDLLNFKKGWLTKQYEDGQWKKHWFVLADQSLRYYRDSVAEEAADLDGEIDLSACYDVTEYPVQRNYGFQIHTKEGEFTLSAMTSGIRRNWIQTIMKHVHPTTAPDVTSSLPEEKNKSSCSFETCPRPTEKQEAELGEPDPEQKRSRARERRREGRSKTFDWAEFRPIQQALAQERVGGVGPADTHEPLRPEAEPGELERERARRREERRKRFGMLDATDGPGTEDAALRMEVDRSPGLPMSDLKTHNVHVEIEQRWHQVETTPLREEKQVPIAPVHLSSEDGGDRLSTHELTSLLEKELEQSQKEASDLLEQNRLLQDQLRVALGREQSAREGYVLQTEVAASPSGAWQRLHRVNQDLQSELEAQCQRQELITHQIQTLKRSYGEAKDTIRHHEAEIRSLQARLSNAAAELAIKEQALAKLKGDLKREQGRVREQLEERQHSEAALSSQLRASEQKLKSAEALLLEKTQELRGLETQQALQRDRQKEVQRLQERIADLSQQLGASEQAQRLMEEKLQRNYELLLESCEKEKQALLQNLKEVEDKASAYEDQLQGQAQQVETLQKEKLSATFEGSEQVHQLEEQLEAREASVRRLAEHVQSLCDERDLLRQRFQELTERVATSDEDVAELREKLRRREADNQSLEHSYQRVSSQLQSMHTLLREKEEELERIKEAHEKVLEKKEQDLNEALVKMVALGSSLEETEIKLQAKEEILRKFASESPKDMEEPRSTPEETERDGTLLPGQPVQATRAPLGLPHTRLEDEDEDLGAPPGEEYGDGSPSREDSMVPPKSVEVLDREGHQQGTAKLDQGAPGVKRQRIRFSTIQCQRYIHPEGSEKTWTSSTSSDTSQDRSPSEESMSSEPAPSVLPATGDSDTYLSIIHSLETKLYVTEEKLKDVTVRLESQQGQSREALLALHHQWAGTEAQLREQLRASLLQVGALASQLEQERQERARRVEGHVGELGDFQVKNSQALMCLENCREQLRSLPRASQEDEQDARAASLASVESALVSAIQALQHWPAPAHGGARAQLETGGTEENGKPASLQQCSQSELTEQEQVRLLSDQIALEASLISQIADSLKNTTSDVSRMLHEISWSGQPPMESAGAPVDTWARKVLVDGEFWSQVESLRKHLGTLGGEAVGASGDGQQSIPQGLAPILANATWVRAELSFATQSVRESFHRRLQSIQETLRGTQTALRQHKCLLREILGAYQTPDFERVMQQVLEALRLPAGHEDGVQLSWDLSPLGEVLGRDSDSSQEPFDVSDQSPGAFVAIQEELAQQLKEKASLLEEIAAALPSLPPVESLRDCQKLLQVSQSLSYNTCLGGLGQYSSLLVQDAIIQAQVCYASCRIRLEYEKELQLCKESWQTREPSCSEQAQAARALREEYEELLRKQKSEYLDVIAIVERENAELKAKAAQLDHQQQCLEDAESKHSMSMFTLRGRYEEEIRCVVEQLTRTESTLQAERSRVLSQLDASVRDRQDMERHHGEQIQTLEDRFQLKVRELQTIHEEELRTLQEHYSQSLRCLQDTLCLHQGPHPKALPAPAPNWQATQGEADSMTGLRERIQELEAQMDVMREELGHKDLEGDAATLREKYQRDLESLKATCERGFAAMEETHQKKIEDLQRQHQRELEKLREEKDRLLAEETAATISAIEAMKNAHREEMERELEKSQRSQISSVNSDVEALRRQYLEELQSVQRELEVLSEQYSQKCLENAHLAQALEAERQALRQCQRENQELNAHNQELNNRLAAEITRLRTLLTGDGGGEATGSPLAQGKDAYELEVLLRVKESEIQYLKQEISSLKDELQTALRDKKYASDKYKDIYTELSIAKAKADCDISRLKEQLKAATEALGEKSPDSATVSGYDIMKSKSNPDFLKKDRSCVTRQLRNIRSKSLKEGLTVQERLKLFESRDLKKD

SEQ ID NO: 44429 - protein, 936 aa, Homo sapiens
MCLENCREQLRSLPRASQEDEQDARAASLASVESALVSAIQALQHWPAPAHGGARAQLETGGTEENGKPASLQQCSQSELTEQEQVRLLSDQIALEASLISQIADSLKNTTSDVSRMLHEISWSGQPPMESAGAPVDTWARKVLVDGEFWSQVESLRKHLGTLGGEAVGASGDGQQSIPQGLAPILANATWVRAELSFATQSVRESFHRRLQSIQETLRGTQTALRQHKCLLREILGAYQTPDFERVMQQVLEALRLPAGHEDGVQLSWDLSPLGEVLGRDSDSSQEPFDVSDQSPGAFVAIQEELAQQLKEKASLLEEIAAALPSLPPVESLRDCQKLLQVSQSLSYNTCLGGLGQYSSLLVQDAIIQAQVCYASCRIRLEYEKELQLCKESWQTREPSCSEQAQAARALREEYEELLRKQKSEYLDVIAIVERENAELKAKAAQLDHQQQCLEDAESKHSMSMFTLRGRYEEEIRCVVEQLTRTESTLQAERSRVLSQLDASVRDRQDMERHHGEQIQTLEDRFQLKVRELQTIHEEELRTLQEHYSQSLRCLQDTLCLHQGPHPKALPAPAPNWQATQGEADSMTGLRERIQELEAQMDVMREELGHKDLEGDAATLREKYQRDLESLKATCERGFAAMEETHQKKIEDLQRQHQRELEKLREEKDRLLAEETAATISAIEAMKNAHREEMERELEKSQRSQISSVNSDVEALRRQYLEELQSVQRELEVLSEQYSQKCLENAHLAQALEAERQALRQCQRENQELNAHNQELNNRLAAEITRLRTLLTGDGGGEATGSPLAQGKDAYELEVLLRVKESEIQYLKQEISSLKDELQTALRDKKYASDKYKDIYTELSIAKAKADCDISRLKEQLKAATEALGEKSPDSATVSGYDIMKSKSNPDFLKKDRSCVTRQLRNIRSKSVIEQVSWDT

SEQ ID NO: 44430 - protein, 1063 aa, Homo sapiens
MKFRFRRQGADPQREKLKQELFAFNKTVEHGFPNQPSALAFDPELRIMAIGTRSGAVKIYGAPGVEFTGLHRDAATVTQMHFLTGQGRLLSLLDDSSLHLWEIVHHNGCAHLEEALSFQLPSRPGFDGASAPLSLTRVTVVLLVAASDIAALGTEGSSVFFLDVTTLTLLEGQTLAPGEVLRSVPDDYRCGKALGPVESLQGHLRDPTKILIGYSRGLLVIWNQASQCVDHIFLGNQQLESLCWGRDSSTVVSSHSDGSYAVWSVDAGSFPTLQPTVATTPYGPFPCKAINKILWRNCESGGHFIIFSGGMPRASYGDRHCVSVLRAETLVTLDFTSRIIDFFTVHSTRPEDEFDDPQALAVLLEEELVVLDLQTPGWPAVPAPYLAPLHSSAITCSAHVASVPAKLWARIVSAGEQQSPQPVSSALSWPITGGRNLAQEPSQRGLLLTGHEDGTVRFWDASGVALRPLYKLSTAGLFQTDCEHADSLAQAAEDDWPPFRKVGCFDPYSDDPRLGVQKVALCKYTAQMVVAGTAGQVLVLELSDVPVEQAVSVAIIDLLQDREGFTWKGHERLSPRTGPLPWPAGFQPRVLVQCLPPAAVTAVTLHTEWSLVAFGTSHGFGLFDYQRKSPVLARCTLHPNDSLAMEGPLSRVKSLKKSLRQSFRRIRKSRVSGKKRAANASSKLQEANAQLAEQACPHDVEMTPVQRRIEPRSADDSLSGVVRCLYFADTFLRDGAHHGPTMWAGTNSGSVFAYALEVPAAAVGGEKRPEQAVEAVLGKEVQLMHRAPVVAIAVLDGRGRPLPEPYEASRDLAQAPDMQGGHAVLIASEEQFKVFTLPKVSAKTKFKLTAHEGCRVRKVALATFASVACEDYAETCLACLTNLGDVHVFSVPGLRPQVHYSCIRKEDISGIASCVFTRHGQGFYLISPSEFERFSLSARNITEPLCSLDINWPRDATQASYRIRESPKLSQANGTPSILLAPQSLDGSPDPAHSMGPDTPEPPEAALSPMSIDSATSADTTLDTTGDVTVEDVKDFLGSSEESEKNLRNLAEDEAHACAILIK

SEQ ID NO: 44431 - protein, 669 aa, Homo sapiens
MTSLRWLKLNRTGLCYLPEELAALQKLEHLSVSHNNLTTLHGELSSLPSLRAIVARANSLKNSGVPDDIFKLDDLSVLDLSHNQLTECPRELENAKNMLVLNLSHNSIDTIPNQLFINLTDLLYLDLSENRLESLPPQMRRLVHLQTLVLNGNPLLHAQLRQLPAMTALQTLHLRSTQRTQSNLPTSLEGLSNLADVDLSCNDLTRVPECLYTLPSLRRLNLSSNQITELSLCIDQWVHVETLNLSRNQLTSLPSAICKLSKLKKLYLNSNKLDFDGLPSGIGKLTNLEEFMAANNNLELVPESLCRCPKLRKLVLNKNHLVTLPEAIHFLTEIEVLDVRENPNLVMPPKPADRAAEWYNIDFSLQNQLRLAGASPATVAAAAAGSGPKDPMARKMRLRRRKDSAQDDQAKQVLKGMSDVAQEKNKKQEESADARAPSGKVRRWDQGLEKPRLDYSEFFTEDVGQLPGLTIWQIENFVPVLVEEAFHGKFYEADCYIVLKTFLDDSGSLNWEIYYWIGGEATLDKKACSAIHAVNLRNYLGAECRTVREEMGDESEEFLQVFDNDISYIEGGTASGFYTVEDTHYVTRMYRVYGKKNIKLEPVPLKGTSLDPRNMSGRAGCAWSARAMSSTPLPAASTPGAPSARPWPKTGWHSPRLGEEEEGASSTVC

SEQ ID NO: 44432 - protein, 1238 aa, Homo sapiens [sequence omitted]

SEQ ID NO: 44433 - protein, 481 aa, Homo sapiens [sequence omitted]

SEQ ID NO: 44434 - protein, 442 aa, Homo sapiens [sequence omitted]

SEQ ID NO: 44435 - protein, 583 aa, Homo sapiens
MAPRELPTCSICLERLRDPISLDCGHDFCIRCFSTHRLPGCEPPCCPECRKICKQKRGLRSLGEKMKLLPQRPLPPALQETCPVRAEPLLLVRINASGGLILRMGAINRCLKHPLARDTPVCLLAVLGEQHSGKSFLLNHLLQGLPGLESGEGGRPRGGEASLQGCRWGANGLARGIWMWSHPFLLGKEGKKVAVFLVDTGDAMSPELSRETRIKLCALTTMLSSYQILSTSQELKDTDLDYLEMFVHVAEVMGKHYGMVPIQHLDLLVRDSSHPNKAGQGHVGNIFQRLSGRYPKVQELLQGKRARCCLLPAPGRRRMNQGHASPGDTDDDFRHLLGAYVSDVLSAAPQHAKSRCQGYWNEGRAVARGDRRLLTGQQLAQEIKNLSGWMGRTGPGFTSPDEMAAQLHDLRKVEAAKREFEEYVRQQDVATKRIFSALRVLPDTMRNLLSTQKDAILARHGVALLCKGRDQTLEALEAELQATAKAFMDSYTMRFCGHLAAVGGAVGAGLMGLAGGVVGAGMAAAALAAEAGMVAAGAAVGATGAAVVGGGVGAGLAATVGCMEKEEDERLLEGDREPLLQEE

SEQ ID NO: 44436 - protein, 476 aa, Homo sapiens
MVQEREKDILTAIAADLCKSEFNVYSQEVITVLGEIDFMLENLPEWVTAKPVKKNVLTMLDEAYIQPQPLGVVLIIGAWNYPFVLTIQPLIGAIAAGNAVIIKPSELSENTAKILAKLLPQYLDQDLYIVINGGVEETTELLKQRFDHIFYTGNTAVGKIVMEAAAKHLTPVTLELGGKSPCYIDKDCDLDIVCRRITWGKYMNCGQTCIAPDYILCEASLQNQIVWKIKETVKEFYGENIKESPDYERIINLRHFKRILSLLEGQKIAFGGETDEATRYIAPTVLTDVDPKTKVMQEEIFGPILPIVPVKNVDEAINFINEREKPLALYVFSHNHKLIKRMIDETSSGGVTGNDVIMHFTLNSFPFGGVGSSGMGAYHGKHSFDTFSHQRPCLLKSLKREGANKLRYPPNSQSKVDWGKFFLLKRFNKEKLGLLLLTFLGIVAAVLVKKYQAVLRRKALLIFLVVHRLRWSSKQR

SEQ ID NO: 44437 - protein, 251 aa, Homo sapiens [sequence omitted]

SEQ ID NO: 44438 - protein, 918 aa, Homo sapiens
MRILHSKGIIHRDLKPQNILLSYANRRKSSVSGIRIKIADFGFARYLHSNMMAATLCGSPMYMAPEVIMSQHYDAKADLWSIGTVIYQCLVGKPPFQANSPQDLRMFYEKNRSLMPSIPRETSPYLANLLLGLLQRNQKDRMDFEAFFSHPFLEQGPVKKSCPVPVPMYSGSVSGSSCGSSPSCRFASPPSLPDMQHIQEENLSSPPLGPPNYLQVSKDSASTSSKNSSCDTDDFVLVPHNISSDHSCDMPVGTAGRRASNEFLVCGGQCQPTVSPHSETAPIPVPTQIRNYQRIEQNLTSTASSGTNVHGSPRSAVVRRSNTSPMGFLRPGSCSPVPADTAQTVGRRLSTGSSRPYSPSPLVGTIPEQFSQCCCGHPQGHDSRSRNSSGSPVPQAQSPQSLLSGARLQSAPTLTDIYQNKQKLRKQHSDPVCPSHTGAGYSYSPQPSRPGSLGTSPTKHLGSSPRSSDWFFKTPLPTIIGSPTKTTAPFKIPKTQASSNLLALVTRHGPAEEQSKDGNEPRECAHCLLVQGSERQRAEQQSKAVFGRSVSTGKLSDQQGKTPICRHQGSTDSLNTERPMDIAPAGACGGVLAPPAGTAASSKAVLFTVGSPPHSAAAPTCTHMFLRTRTTSVGPSNSGGSLCAMSGRVCVGSPPGPGFGSSPPGAEAAPSLRYVPYGASPPSLEGLITFEAPELPEETLMEREHTDTLRHLNVMLMFTECVLDLTAMRGGNPELCTSAVSLYQIQESVVVDQISQLSKDWGRVEQLVLYMKAAQLLAASLHLAKAQIKSGKLSPSTAVKQVVKNLNERYKFCITMCKKLTEKLNRFFSDKQRFIDEINSVTAEKLIYNCAVEMVQSAALDEMFQQTEDIVYRYHKAALLLEGLSRILQDPADIENVHKYKCSIERRLSALCHSTATV

SEQ ID NO: 44439 - protein, 640 aa, Homo sapiens [sequence omitted]

SEQ ID NO: 44440 - protein, 174 aa, Homo sapiens [sequence omitted]

SEQ ID NO: 44441 - protein, 179 aa, Homo sapiens
MDKYTMIRKLEGHHHDVVACDFSPDGALLATASYDTRVYIWDPHNGDILMEFGHLFPPPTPIFAGGANDRWVRSVSFSHDGLHVASLADDKMVRFWRIDEDYPVQVAPLSNGLCCAFSTDGSVLAAGTHDGSVYFWATPRQVPSLQHLCRMSIRRVMPTQEVQELPIPSKLLEFLSYRI

SEQ ID NO: 44442 - protein, 807 aa, Homo sapiens
MPREARGVSPPGLEDYEEIPRDLTLDALLEMNEAKVKETLRRCGASGDECGRLQYALTCLRKVTGLGGEHKEDSSWSSLDARRESGSGPSTDTLSAASLPWPPGSSQLGRAGNSAQGPRSISVSALPASDSPTPSFSEGLSDTCIPLHASGRLTPRALHSFITPPTTPQLRRHTKLKPPRTPPPPSRKVFQLLPSFPTLTRSKSHESQLGNRIDDVSSMRFDLSHGSPQMVRRDIGLSVTHRFSTKSWLSQVCHVCQKSMIFGVKCKHCRLKCHNKCTKEAPACRISFLPLTRLRRTESVPSDINNPVDRAAEPHFGTLPKALTKKEHPPAMNHLDSSSNPSSTTSSTPSSPAPFPTSSNPSSATTPPNPSPGQRDSRFNFPDISAFAHAAPLPEAADGTRLDDQPKADVLEAHEAEAEEPEAGKSEAEDDEDEVDDLPSSRRPWRGPISRKASQTSVYLQEWDIPFEQVELGEPIGQGRWGRVHRGRWHGEVAIRLLEMDGHNQDHLKLFKKEVMNYRQTRHENVVLFMGACMNPPHLAIITSFCKGRTLHSFVRDPKTSLDINKTRQIAQEIIKGMGYLHAKGIVHKDLKSKNVFYDNGKVVITDFGLFGISGVVREGRRENQLKLSHDWLCYLAPEIVREMTPGKDEDQLPFSKAADVYAFGTVWYELQARDWPLKNQAAEASIWQIGSGEGMKRVLTSVSLGKEVSEILSACWAFDLQERPSFSLLMDMLEKLPKLNRRLSHPGHFWKSADRWRSRYYGKGRYGHPDFKSSCPILEEYINSSKVVPRFERFGLGVLESSNPKM

SEQ ID NO: 44443 - protein, 409 aa, Homo sapiens [sequence omitted]

SEQ ID NO: 44444 - protein, 13 aa, Homo sapiens
MAGAGAKPGRTRT

SEQ ID NO: 44445 - protein, 81 aa, Homo sapiens [sequence omitted]

SEQ ID NO: 44446 - protein, 91 aa, Homo sapiens
MKKIEDNNTLVFIVDVKANKHQIKQAVKKLYDIDVAKVNTLIRPDGEKKAYVRLAPDYDALDVANKVSFLPTNPLMLTPWVQMMHMLATKA

SEQ ID NO: 44447 - protein, 176 aa, Homo sapiens
MLVEIETAWSLSGYLLVCFSAGYFIHDTVDIVASGQTRASWEYLVHHVMAMGAFFSGIFWSSFVGGGVLTLLVEVSNIFLTIRMMMKISNAQDHLLYRVNKYVNLVMYFLFRLAPQAYLTHFFLRYVNQRTLGTFLLGILLMLDVMIIIYFSRLLRSDFCPEHVPKKQHKDKFLTE

SEQ ID NO: 44448 - protein, 112 aa, Homo sapiens
MEQIQALLAPPKTDEAEKRSRKPEKEPRRSGRATNHDSCDSCKEGGDLLCCDHCPAAFHLQCCNPPLSEEMLPPGEWMCHRCTVRRKPWNHPTLPMVTVWNPVGPKNPNMGC

SEQ ID NO: 44449 - protein, 2016 aa, Homo sapiens
MSLRRGFFNLNRSSKRESKTRLEISNPIPIKVASGSDLHLTDIDSDSNRGSVILDSGHLSTASSSDDLKGEEGSFRGSVLQRAAKFGSLAKQNSQMIVKRFSFSQRSRDESASETSTPSEHSAAPSPQVEVRTLEGQLVQHPGPGIPRPGHRSRAPELVTKKFPVDLRLPPVVPLPPPTLRELELQRRPTGDFGFSLRRTTMLDRGPEGQACRRVVHFAEPGAGTKDLALGLVPGDRLVEINGHNVESKSRDEIVEMIRQSGDSVRLKVQPIPELSELSRSWLRSGEGPRREPSDAKTEEQIAAEEAWNETEKVWLVHRDGFSLASQLKSEELNLPEGKVRVKLDHDGAILDVDEDDVEKANAPSCDRLEDLASLVYLNESSVLHTLRQRYGASLLHTYAGPSLLVLGPRGAPAVYSEKVMHMFKGCRREDMAPHIYAVAQTAYRAMLMSRQDQSIILLGSSGSGKTTSCQHLVQYLATIAGISGNKVFSVEKWQALYTLLEAFGNSPTIINGNATRFSQILSLDFDQAGQVASASIQTMLLEKLRVARRPASEATFNVFYYLLACGDGTLRTELHLNHLAENNVFGIVPLAKPEEKQKAAQQFSKLQAAMKVLGISPDEQKACWFILAAIYHLGAAGATKEAAEAGRKQFARHEWAQKAAYLLGCSLEELSSAIFKHQHKGGTLQRSTSFRQGPEESGLGDGTGPKLSALECLEGMAAGLYSELFTLLVSLVNRALKSSQHSLCSMMIVDTPGFQNPEQGGSARGASFEELCHNYTQDRLQRLFHERTFVQELERYKEENIELAFDDLEPPTDDSVAAVDQASHQSLVRSLARTDEARGLLWLLEEEALVPGASEDTLLERLFSYYGPQEGDKKGQSPLLHSSKPHHFLLGHSHGTNWVEYNVTGWLNYTKQNPATQNAPRLLQDSQKKIISNLFLGRAGSATVLSGSIAGLEGGSQLALRRATSMRKTFTTGMAAVKKKSLCIQMKLQVDALIDTIKKSKLHFVHCFLPVAEGWAGEPRSASSRRVSSSSELDLPSGDHCEAGLLQLDVPLLRTQLRGSRLLDAMRMYRQGYPDHMVFSEFRRRFDVLAPHLTKKHGRNYIVVDERRAVEELLECLDLEKSSCCMGLSRVFFRAGTLARLEEQRDEQTSRNLTLFQAACRGYLARQHFKKRKIQDLAIRCVQKNIKKNKGVKDWPWWKLFTTVRPLIEVQLSEEQIRNKDEEIQQLRSKLEKAEKERNELRLNSDRLESRISELTSELTDERNTGESASQLLDAETAERLRAEKEMKELQTQYDALKKQMEVMEMEVMEARLIRAAEINGEVDDDDAGGEWRLKYERAVREVDFTKKRLQQEFEDKLEVEQQNKRQLERRLGDLQADSEESQRALQQLKKKCQRLTAELQDTKLHLEGQQVRNHELEKKQRRFDSELSQAHEEAQREKLQREKLQREKDMLLAEAFSLKQQLEEKDMDIAGFTQKVVSLEAELQDISSQESKDEASLAKVKKQLRDLEAKVKDQEEELDEQAGTIQMLEQAKLRLEMEMERMRQTHSKEMESRDEEVEEARQSCQKKLKQMEVQLEEEYEDKQKVLREKRELEGKLATLSDQVNRRDFESEKRLRKDLKRTKALLADAQLMLDHLKNSAPSKREIAQLKNQLEESEFTCAAAVKARKAMEVEIEDLHLQIDDIAKAKTALEEQLSRLQREKNEIQNRLEEDQEDMNELMKKHKAAVAQASRDLAQINDLQAQLEEANKEKQELQEKLQALQSQVEFLEQSMVDKSLVSRQEAKIRELETRLEFERTQVKRLESLASRLKENMEKLTEERDQRIAAENREKEQNKRLQRQLRDTKEEMGELARKEAEASRKKHELEMDLESLEAANQSLQADLKLAFKRIGDLQAAIEDEMESDENEDLINSLQDMVTKYQKRKNKLEGDSDVDSELEDRVDGVKSWLSKNKGPSKAASDDGSLKSSSPTSYWKSLAPDRSDDEHDPLDNTSRPRYSHSYLSDSDTEAKLTETNA

SEQ ID NO: 44450 - protein, 451 aa, Homo sapiens [sequence omitted]

SEQ ID NO: 44451 - protein, 1317 aa, Homo sapiens [sequence omitted]

SEQ ID NO: 44452 - protein, 1316 aa, Homo sapiens
MVVVSTNGRQDTEESIVLGMDFSSNDSTCTMGLVLPLWSDTLIHLDGDGGFSVSTDNRVHIFKPVSVQAMWSALQSLHKACEVARAHNYYPGSLFLTWVSYYESHINSDQSSVNEWNAMQDVQSHRPDSPALFTDIPTERERTERLIKTKLREIMMQKDLENITSKEIRTELEMQMVCNLREFKEFIDNEMIVILGQMDSPTQIFEHVFLGSEWNASNLEDLQNRGVRYILNVTREIDNFFPGVFEYHNIRVYDEEATDLLAYWNDTYKFISKAKKHGSKCLVHCKMGVSRSASTVIAYAMKEYGWNLDRAYDYVKERRTVTKPNPSFMRQLEEYQGILLASKQRHNKLWRSHSDSDLSDHHEPICKPGLELNKKDITTSADQIAEVKTMESHPPIPPVFVEHMVPQDANQKGLCTKERMICLEFTSREFHAGQIEDELNLNDINGCSSGCCLNESKFPLDNCHASKALIQPGHVPEMANKFPDLTVEDLETDALKADMNVHLLPMEELTSPLKDPPMSPDPESPSPQPSCQTEISDFSTDRIDFFSALEKFVELSQETRSRSFSHSRMEELGGGRNESCRLSVVEVAPSKVTADDQRSSSLSNTPHASEESSMDEEQSKAISELVSPDIFMQSHSENAISVKEIVTEIESISQGVGQIQLKGDILPNPCHTPKKNSIHELLLERAQTPENKPGHMEQDEDSCTAQPELAKDSGMCNPEGCLTTHSSIADLEEGEPAEGEQELQGSGMHPGAKWYPGSVRRATLEFEERLRQEQEHHGAAPTCTSLSTRKNSKNDSSVADLAPKGKSDEAPPEHSFVLKEPEMSKGKGKYSGSEAGSLSHSEQNATVPAPRVLEFDHLPDPQEGPGSDTGTQQEGVLKDLRTVIPYQESETQAVPLPLPKRVEIIEYTHIVTSPNHTGPGSEIATSEKSGEQGLRKVNMEKSVTVLCTLDENLNRTLDPNQVSLHPQVLPLPHSSSPEHNRPTDHPTSILSSPEDRGSSLSTALETAAPFVSHTTHLLSASLDYLHPQTMVHLEGFTEQSSTTDEPSAEQVSWEESQESPLSSGSEVPYKDSQLSSADLSLISKLGDNTGELQEKMDPLPVACRLPHSSSSENIKSLSHSPGVVKERAKEIESRVVFQAGLTKPSQMRRSASLAKLGYLDLCKDCLPEREPASCESPHLKLLQPFLRTDSGMHAMEDQESLENPGAPHNPEPTKSFVEQLTTTECIVQSKPVERPLVQYAKEFGSSQQYLLPRAGLELTSSEGGLPVLQTQGLQCACPAPGLAVAPRQQHGRTHPLRRLKKANDKKRTTNPFYNTM

SEQ ID NO: 44453 - protein, 181 aa, Homo sapiens
MAIEIEQLLARLTGVNDKMAEYTNSAGVPSLNAALMHTLQRHRDILQDYTHEFHKTKANFMAIRERENLMGSVRKDIESYKSGSGVNNRRTELFLKEHDHLRNSDRLIEETISIAMATKENMTSQRGMLKSIHSKMNTLANRFPAVNSLIQRINLRKRRDSLILGGVIGICTILLLLYAFH

SEQ ID NO: 44454 - protein, 326 aa, Homo sapiens
MLGGVGEENEKLWSFTKKASHIQLDSLPEVPLLVDVPCLSAQLDDSILNIVKDHIFKHGTVASRPPVQIEELIEKPGGIIVRWCKVDDDFTAQDYRLQFRKCTSNHFEDVYVGSETEFIVLHIDPNVDYQFRVCARGDGRQEWSPWSVPQIGHSTLVPHEWTAGFEGYSLSSRRNIALRNDSESSGVLYSRAPTYFCGQTLTFRVETVGQPDRRDSIGVCAEKQDGYDSLQRDQAVCISTNGAVFVNGKEMTNQLPAVTSGSTVTFDIEAVTLGTTSNNEGGHFKLRVTISSNNREVVFDWLLDQSCGSLYFGCSFFYPGWKVLVF

SEQ ID NO: 44455 - protein, 99 aa, Homo sapiens [sequence omitted]

SEQ ID NO: 44456 - protein, 2738 aa, Homo sapiens
MRLDETMLVKQLLPEICHFLHTCREGNQHAAELRNSASGVLFSLSCNNFNAVFSRISTRLQELTVCSEDNVDVHDIELLQYINVDCAKLKRLLKETAFKFKALKKVAQLAVINSLEKAFWNWVENYPDEFTKLYQIPQTDMAECAEKLFDLVDGFAESTKRKAAVWPLQIILLILCPEIIQDISKDVVDENNMNKKLFLDSLRKALAGHGGSRQLTESAAIACVKLCKASTYINWEDNSVIFLLVQSMVVDLKNLLFNPSKPFSRGSQPADVDLMIDCLVSCFRISPHNNQHFKICLAQNSPSTFHYVLVNSLHRIITNSALDWWPKIDAVYCHSVELRNMFGETLHKAVQGCGAHPAIRMAPSLTFKEKVTSLKFKEKPTDLETRSYKYLLLSMVKLIHADPKLLLCNPRKQGPETQGSTAELITGLVQLVPQSHMPEIAQEAMEALLVLHQLDSIDLWNPDAPVETFWEISSQMLFYICKKLTSHQMLSSTEILKWLREILICRNKFLLKNKQADRSSCHFLLFYGVGCDIPSSGNTSQMSMDHEELLRTPGASLRKGKGNSSMDSAAGCSGTPPICRQAQTKLEVALYMFLWNPDTEAVLVAMSCFRHLCEEADIRCGVDEVSVHNLLPNYNTFMEFASVSNMMSTGRAALQKRVMALLRRIEHPTAGNTEAWEDTHAKWEQATKLILNYPKAKMEDGQAAESLHKTIVKRRMSHVSGGGSIDLSDTDSLQEWINMTGFLCALGGVCLQQRSNSGLATYSPPMGPVSERKGSMISVMSSEGNADTPVSKFMDRLLSLMVCNHEKVGLQIRTNVKDLVGLELSPALYPMLFNKLKNTISKFFDSQGQVLLTDTNTQFVEQTIAIMKNLLDNHTEGSSEHLGQASIETMMLNLVRYVRVLGNMVHAIQIKTKLCQLVEVMMARRDDLSFCQEMKFRNKMVEYLTDWVMGTSNQAADDDVKCLTRDLDQASMEAVVSLLAGLPLQPEEGDGVELMEAKSQLFLKYFTLFMNLLNDCSEVEDESAQTGGRKRGMSRRLASLRHCTVLAMSNLLNANVDSGLMHSIGLGYHKDLQTRATFMEVLTKILQQGTEFDTLAETVLADRFERLVELVTMMGDQGELPIAMALANVVPCSQWDELARVLVTLFDSRHLLYQLLWNMFSKEVELADSMQTLFRGNSLASKIMTFCFKVYGATYLQKLLDPLLRIVITSSDWQHVSFEVDPTRLEPSESLEENQRNLLQMTEKFFHAIISSSSEFPPQLRSVCHCLYQATCHSLLNKATVKEKKENKKSVVSQRFPQNSIGAVGSAMFLRFINPAIVSPYEAGILDKKPPPRIERGLKLMSKILQSIANHVLFTKEEHMRPFNDFVKSNFDAARRFFLDIASDCPTSDAVNHSLSFISDGNVLALHRLLWNNQEKIGQYLSSNRDHKAVGRRPFDKMATLLAYLGPPEHKPVADTHWSSLNLTSSKFEEFMTRHQVHEKEEFKALKTLSIFYQAGTSKAGNPIFYYVARRFKTGQINGDLLIYHVLLTLKPYYAKPYEIVVDLTHTGPSNRFKTDFLSKWFVVFPGFAYDNVSAVYIYNCNSWVREYTKYHERLLTGLKGSKRLVFIDCPGKLAEHIEHEQQKLPAATLALEEDLKVFHNALKLAHKDTKVSIKVGSTAVQVTSAERTKVLGQSVFLNDIYYASEIEEICLVDENQFTLTIANQGTPLTFMHQECEAIVQSIIHIRTRWELSQPDSIPQHTKIRPKDVPGTLLNIALLNLGSSDPSLRSAAYNLLCALTCTFNLKIEGQLLETSGLCIPANNTLFIVSISKTLAANEPHLTLEFLEECISGFSKSSIELKHLCLEYMTPWLSNLVRFCKHNDDAKRQRVTAILDKLITMTINEKQMYPSIQAKIWGSLGQITDLLDVVLDSFIKTSATGGLGSIKAEVMADTAVALASGNVKLVSSKVIGRMCKIIDKTCLSPTPTLEQHLMWDDIAILARYMLMLSFNNSLDVAAHLPYLFHVVTFLVATGPLSLRASTHGLVINIIHSLCTCSQLHFSEETKQVLRLSLTEFSLPKFYLLFGISKVKSAAVIAFRSSYRDRSFSPGSYERETFALTSLETVTEALLEIMEACMRDIPTCKWLDQWTELAQRFAFQYNPSLQPRALVVFGCISKRVSHGQIKQIIRILSKALESCLKGPDTYNSQVLIEATVIALTKLQPLLNKDSPLHKALFWVAVAVLQLDEVNLYSAGTALLEQNLHTLDSLRIFNDKSPEEVFMAIRNPLEWHCKQMDHFVGLNFNSNFNFALVGHLLKGYRHPSPAIVARTVRILHTLLTLVNKHRNCDKFEVNTQSVAYLAALLTVSEEVRSRCSLKHRKSLLLTDISMENVPMDTYPIHHGDPSYRTLKETQPWSSPKGSEGYLAATYPTVGQTSPRARKSMSLDMGQPSQANTKKLLGTRKSFDHLISDTKAPKRQEMESGITTPPKMRRVAETDYEMETQRISSSQQHPHLRKVSVSESNVLLDEEVLTDPKIQALLLTVLATLVKYTTDEFDQRILYEYLAEASVVFPKVFPVVHNLLDSKINTLLSLCQDPNLLNPIHGIVQSVVYHEESPPQYQTSYLQSFGFNGLWRFAGPFSKQTQIPDYAELIVKFLDALIDTYLPGIDEETSEESLLTPTSPYPPALQSQLSITANLNLSNSMTSLATSQHSPGIDKENVELSPTTGHCNSGRTRHGSASQVQKQRSAGSFKRNSIKKIV

SEQ ID NO: 44457 - protein, 44 aa, Homo sapiens
MFKLSPIGLLFMFVNIPGTNFNINNLKFYGSIQSCVKPESRDQT

SEQ ID NO: 44458 - protein, 232 aa, Homo sapiens
MEHTGHYLHLAFLMTTVFSLSPGTKANYTRLWANSTSSWDSVIQNKTGRNQNENINTNPITPEVDYKGNSTNMPETSHIVALTSKSEQELYIPSVVSNSPSTVQSIENTSKSHGEIFKKDVCAENNNNMAMLICLIIIAVLFLICTFLFLSTVVLANKVSSLRRSKQVGKRQPRSNGDFLASGLWPAESDTWKRTKQLTGPNLVMQSTGVLTATRERKDEEGTEKLTNKQIG

SEQ ID NO: 44459 - protein, 599 aa, Homo sapiens
MSHRNSRTNIKSLSAHLQLTFTGFFHKNDKPSPNSENEQNSVTLEVLLVKVCHKKRKDVSCPIRQVPTGKKQVPLNPDLNQTKPGNFPSLAVSSNEFEPSNSHMVKSYSLLFRVTRPGRREFNGMINGETNENIDVNEELPARRKRNREDGEKTFVAQMTVFDKNRRLQLLDGEYEVAMQEMEECPISKKRATWETILDGKRLPPFETFSQGPTLQFTLRWTGETNDKSTAPIAKPLATRNSESLHQENKPGSVKPTQTIAVKESLTTDLQTRKEKDTPNENRQKLRIFYQFLYNNNTRQQTEARDDLHCPWCTLNCRKLYSLLKHLKLCHSRFIFNYVYHPKGARIDVSINECYDGSYAGNPQDIHRQPGFAFSRNGPVKRTPITHILVCRPKRTKASMSEFLESEDGEVEQQRTYSSGHNRLYFHSDTCLPLRPQEMEVDSEDEKDPEWLREKTITQIEEFSDVNEGEKEVMKLWNLHVMKHGFIADNQMNHACMLFVENYGQKIIKKNLCRNFMLHLVSMHDFNLISIMSIDKAVTKLREMQQKLEKGESASPANEEITEEQNGTANGFSEINSKEKALETDSVSGVSKQSKKQKL

SEQ ID NO: 44460 - protein, 564 aa, Homo sapiens
METILPIMNQYTEIETCVECSAKNLKNISELFYYAQKAVLHPTGPLYCPEEKEMKPACIKALTRIFKISDQDNDGTLNDAELNFFQRICFNTPLAPQALEDVKNVVRKHISDGVADSGLTLKGFLFLHTLFIQRGRHETTWTVLRRFGYDDDLDLTPEYLFPLLKIPPDCTTELNHHAYLFLQSTFDKHDLDRDCALSPDELKDLFKVFPYIPWGPDVNNTVCTNERGWITYQGFLSQWTLTTYLDVQRCLEYLGYLGYSILTEQESQASAVTVTRDKKIDLQKKQTQRNVFRCNVIGVKNCGKSGVLQALLGRNLMRQKKIREDHKSYYAINTVYVYGQEKYLLLHDISESEFLTEAEIICDVVCLVYDVSNPKSFEYCARIFKQHFMDSRIPCLIVAAKSDLHEVKQEYSISPTDFCRKHKMPPPQAFTCNTADAPSKDIFVKLTTMAMYPEDHYRDRLSRDMGHTDRIENLRKIWVFLKTAFHARLRCMCTCNRCTFCICQNFLNSDLLQSVKNKIFTAVLNRHVTQADLKSSTFWLRASFGATVFAVLGFAMYKALLKQR

SEQ ID NO: 44461 - protein, 424 aa, Homo sapiens
MQVHKETIDAVPNAIPGRTDIELEIYGMEGIPEKDMDERRRLLEQKTQESQKKKQQDDSDEYDDDDSAASTSFQPQPVQPQQGYIPPMAQPGLPPVPGAPGMPPGIPPLMPGVPPLMPGMPPVMPGMPPGMMPMGGMMPPGPGIPPLMPGMPPGMPPPVPRPGIPPMTQAQAVSAPGILNRPPAPTATVPAPQPPVTKPLFPSAGQMGTPVTSSSTASSNSESLSASSKALFPSTAQAQAAVQGPVGTDFKPLNSTPATTTEPPKPTFPAYTQSTASTTSTTNSTAAKPAASITSKPATLTTTSATSKLIHPDEDISLEERRAQLPKYQRNLPRPGQAPIGNPPVGPIGGMMPPQPGIPQQQGMRPPMPPHGQYGGHHQGMPGYLPGAMPPYGQGPPMVPPYQGGPPRPPMGMRPPVMSQGGRY

SEQ ID NO: 44462 - protein, 440 aa, Homo sapiens
MQVHKETIDAVPNAIPGRTDIELEIYGMEGIPEKDMDERRRLLEQKTQESQKKKQQDDSDEYDDDDSAASTSFQPQPVQPQQGYIPPMAQPGLPPVPGAPGMPPGIPPLMPGVPPLMPGMPPVMPGMPPGLHHQRKYTQSFCGENIMMPMGGMMPPGPGIPPLMPGMPPGMPPPVPRPGIPPMTQAQAVSAPGILNRPPAPTATVPAPQPPVTKPLFPSAGQMGTPVTSSSTASSNSESLSASSKALFPSTAQAQAAVQGPVGTDFKPLNSTPATTTEPPKPTFPAYTQSTASTTSTTNSTAAKPAASITSKPATLTTTSATSKLIHPDEDISLEERRAQLPKYQRNLPRPGQAPIGNPPVGPIGGMMPPQPGIPQQQGMRPPMPPHGQYGGHHQGMPGYLPGAMPPYGQGPPMVPPYQGGPPRPPMGMRPPVMSQGGRY

SEQ ID NO: 44463 - protein, 409 aa, Homo sapiens
MQVHKETIDAVPNAIPGRTDIELEIYGMEGIPEKDMDERRRLLEQKTQESQKKKQQDDSDEYDDDDSAASTSFQPQPVQPQQGYIPPMAQPGLPPVPGAPGMPPGIPPLMPGVPPLMPGMPPVMPGMPPGLHHQRKYTQSFCGENIMMPMGGMMPPGPGIPPLMPGMPPGMPPPVPRPGIPPMTQAQAVSAPGILNRPPAPTATVPAPQPPVTKPLFPSAGQAQAAVQGPVGTDFKPLNSTPATTTEPPKPTFPAYTQSTASTTSTTNSTAAKPAASITSKPATLTTTSATSKLIHPDEDISLEERRAQLPKYQRNLPRPGQAPIGNPPVGPIGGMMPPQPGIPQQQGMRPPMPPHGQYGGHHQGMPGYLPGAMPPYGQGPPMVPPYQGGPPRPPMGMRPPVMSQGGRY

SEQ ID NO: 44464 - protein, 945 aa, Homo sapiens
MDTVSMPEFMANLRLRFEKGRIYTFIGEVVVSVNPYKLLNIYGRDTIEQYKGRELYERPPHLFAIADAAYKAMKRRSKDTCIVISGESGAGKTEASKYIMQYIAAITNPSQRAEVERVKNMLLKSNCVLEAFGNAKTNRNDNSSRFGKYMDINFDFKGDPIGGHINNYLLEKSRVIVQQPGERSFHSFYQLLQGGSEQMLRSLHLQKSLSSYNYIHVGAQLKSSINDAAEFRVVADAMKVIGFKPEEIQTVYKILAAILHLGNLKFVVDGDTPLIENGKVVSIIAELLSTKTDMVEKALLYRTVATGRDIIDKQHTEQEASYGRDAFAKAIYERLFCWIVTRINDIIEVKNYDTTIHGKNTVIGVLDIYGFEIFDNNSFEQFCINYCNEKLQQLFIQLVLKQEQEEYQREGIPWKHIDYFNNQIIVDLVEQQHKGIIAILDDACMNVGKVTDEMFLEALNSKLGKHAHFSSRKLCASDKILEFDRDFRIRHYAGDVVYSVIGFIDKNKDTLFQDFKRLMYNSSNPVLKNMWPEGKLSITEVTKRPLTAATLFKNSMIALVDNLASKEPYYVRCIKPNDKKSPQIFDDERCRHQVEYLGLLENVRVRRAGFAFRQTYEKFLHRYKMISEFTWPNHDLPSDKEAVKKLIERCGFQDDVAYGKTKIFIRTPRTLFTLEELRAQMLIRIVLFLQKVWRGTLARMRYKRTKAALTIIRYYRRYKVKSYIHEVARRFHGVKTMRDYGKHVKWPSPPKVLRRFEEALQTIFNRWRASQLIKSIPASDLPQVRAKVAAVEMLKGQRADLGLQRAWEGNYLASKPDTPQTSGTFVPVANELKRKDKYMNVLFSCHVRKVNRFSKVEDRAIFVTDRHLYKMDPTKQYKVMKTIPLYNLTGLSVSNGKDQLVVFHTKDNKDLIVCLFSKQPTHESRIGELVGVLVNHFKRNHLLIL

SEQ ID NO: 44465 - protein, 109 aa, Homo sapiens
MLKLTPLPSKMKVSAALLCLLLMAATFSPQGLAQPDSVSIPITCCFNVINRKIPIQRLESYTRITNIQCPKEAVIFKTKRGKEVCADPKERWVRDSMKHLDQIFQNLKP

SEQ ID NO: 44466 - protein, 335 aa, Homo sapiens
MKHKLGTDTKLIQGLVLDHGARHPDMKKRVEDAFILICNVSLEYEKTEVNSGFFYKTAEEKEKLVKAERKFIEDRVQKIIDLKDKVCAQSNKGFVVINQKGIDPFSLDSLAKHGIVALRRAKRRNMERLSLACGGMAVNSFEDLTVDCLGHAGLVYEYTLGEEKFTFIEECVNPCSVTLLVKGPNKHTLTQVKDAIRDGLRAIKNAIEDGCMVPGAGAIEVAMAEALVTYKNSIKGRARLGVQAFADALLIIPKVLAQNAGYDPQETLVKVQAEHVESKQLVGVDLNTGEPMVAADAGVWDNYCVKKQLLHSCTVIATNILLVDEIMRAGMSSLK

SEQ ID NO: 44467 - protein, 348 aa, Homo sapiens [sequence omitted]

SEQ ID NO: 44468 - protein, 313 aa, Homo sapiens
MIQLLRSHRIKTVVDLVSADLEEVAQKCGLSYKALVALRRVLLAQFSAFPVNGADLYEELKTSTAILSTGIGSLDKLLDAGLYTGEVTEIVGGPGSGKTQVCLCMAANVAHGLQQNVLYVDSNGGLTASRLLQLLQAKTQDEEEQAEALRRIQVVHAFDIFQMLDVLQELRGTVAQQVTGSSGTVKVVVVDSVTAVVSPLLGGQQREGLALMMQLARELKTLARDLGMAVVVTNHITRDRDSGRLKPALGRSWSFVPSTRILLDTIEGAGASGGRRMACLAKSSRQPTGFQEMVDIGTWGTSEQSATLQGDQT

SEQ ID NO: 44469 - protein, 232 aa, Homo sapiens [sequence omitted]

SEQ ID NO: 44470 - protein, 855 aa, Homo sapiens
MRAACALLNSGGGVIRMAKKVEHPVEMGLDLEQSLRELIQSSDLQAFFETKQQGRCFYIFVKSWSSGPFPEDRSVKPRLCSLSSSLYRRSETSVRSMDSREAFCFLKTKRKPKILEEGPFHKIHKGVYQELPNSDPADPNSDPADLIFQKDYLEYGEILPFPESQLVEFKQFSTKHFQEYVKRTIPEYVPAFANTGGGYLFIGVDDKSREVLGCAKENVDPDSLRRKIEQAIYKLPCVHFCQPQRPITFTLKIVNVLKRGELYGYACMIRVNPFCCAVFSEAPNSWIVEDKYVCSLTTEKWVGMMTDTDPDLLQLSEDFECQLSLSSGPPLSRPVYSKKGLEHKKELQQLLFSVPPGYLRYTPESLWRDLISEHRGLEELINKQMQPFFRGILIFSRSWAVDLNLQEKPGVICDALLIAQNSTPILYTILREQDAEGQDYCTRTAFTLKQKLVNMGGYTGKVCVRAKVLCLSPESSAEALEAAVSPMDYPASYSLAGTQHMEALLQSLVIVLLGFRSLLSDQLGCEVLNLLTAQQYEIFSRSLRKNRELFVHGLPGSGKTIMAMKIMEKIRNVFHCEAHRILYVCENQPLRNFISDRNICRAETRKTFLRENFEHIQHIVIDEAQNFRTEDGDWYGKAKSITRRAKGGPGILWIFLDYFQTSHLDCSGLPPLSDQYPREELTRIVRNADPIAKYLQKEMQVIRSNPSFNIPTGCLEVFPEAEWSQGVQGTLRIKKYLTVEQIMTCVADTCRRFFDRGYSPKDVAVLVSTAKEVEHYKYELLKAMRKKRVVQLSDACDMLGDHIVLDSVRRFSGLERSIVFGIHPRTADPAILPNVLICLASRAKQHLYIFPWGGH

SEQ ID NO: 44471 - protein, 395 aa, Homo sapiens
MTGSSGGDRGGFKNFGGHRDYGPRTDADSESDNSDNNTIFVQGLGEGVSTDQVGEFFKQIGIIKTNKKTGKPMINLYTDKDTGKPKGEATVSFDDPPSAKAAIDWFDGKEFHGNIIKVSFATRRPEFMRGGGSGGGRRGRGGYRGRGGFQGRGGDPKSGDWVCPNPSCGNMNFARRNSCNQCNEPRPEDSRPSGGDFRGRGYGGERGYRGRGGRGGDRGGYGGDRSGGGYGGDRSSGGGYSGDRSGGGYGGDRSGGGYGGDRGGGYGGDRGGGYGGDRGGGYGGDRGGYGGDRGGGYGGDRGGYGGDRGGYGGDRGGYGGDRGGYGGDRSRGGYGGDRGGGSGYGGDRSGGYGGDRSGGGYGGDRGGGYGGDRGGYGGKMGGRNDYRNDQRNRPY

SEQ ID NO: 44472 - protein, 380 aa, Homo sapiens
MTSDFPVLDPSWTAQEEMALLEAVMDCGFGNWQDVANQMCTKTKEECEKHYMKHFINNPLFASTLLNLKQAEEAKTADTAIPFHSTDDPPRPTFDSLLSRDMAGYMPARADFIEEFDNYAEWDLRDIDFVEDDSDILHALKMAVVDIYHSRLKERQRRKKIIRDHGLINLRKFQLMERRYPKEVQDLYETMRRFARIVGPVEHDKFIESHALEFELRREIKRLQEYRTAGITNFCSARTYDHLKKTREEERLKRTMLSEVLQYIQDSSACQQWLRRQADIDSGLSPSIPMASNSGRRSAPPLNLTGLPGTEKLNEKEKELCQMVRLVPGAYLEYKSALLNECNKQGGLRLAQARALIKIDVNKTRKIYDFLIREGYITKG

SEQ ID NO: 44473 - protein, 1249 aa, Homo sapiens
MNYSSQMSQGPIAMQAGIPMGPMPAAGMPYLGQAPFLGMRPPGPQYTPDMQKQFAEEQQKRFEQQQKLLEEERKRRQFEEQKQKLRLLSSVKPKTGEKSRDDALEAIKGNLDGFSRDAKMHPTPASHPKKPGPSLEEKFLVSCDISTSGQEQIKLNTSEVGHKALGPGSSKKYPSLMASNGVAVDGCVSGTTTAEAENTSDQNLSIEESGVGVFPSQDPAQPRMPPWIYNESLVPDAYKKILETTMTPTGIDTAKLYPILMSSGLPRETLGQIWALANRTTPGKLTKEELYTVLAMIAVTQRGVPAMSPDALNQFPAAPIPTLSGFSMTLPTPVSQPTVIPSGPAGSMPLSLGQPVMGINLVGPVGGAAAQASSGFIPTYPANQVVKPEEDDFQDFQDASKSGSLDDSFSDFQELPASSKTSNSQHGNSAPSLLMPLPGTKALPSMDKYAVFKGIAADKSSENTVPPGDPGDKYSAFRELEQTAENKPLGESFAEFRSAGTDDGFTDFKTADSVSPLEPPTKDKTFPPSFPSGTIQQKQQTQVKNPLNLADLDMFSSVNCSSEKPLSFSAVFSTSKSVSTPQSTGSAATMTALAATKTSSLADDFGEFSLFGEYSGLAPVGEQDDFADFMAFSNSSISSEQKPDDKYDALKEEASPVPLTSNVGSTVKGGQNSTAASTKYDVFRQLSLEGSGLGVEDLKDNTPSGKSDDDFADFHSSKFSSINSDKSLGEKAVAFRHTKEDSASVKSLDLPSIGGSSVGKEDSEDALSVQFDMKLADVGGDLKHVMSDSSLDLPTVSGQHPPAADIEDLKYAAFGSYSSNFAVSTLTSYDWSDRDDATQGRKLSPFVLSAGSGSPSATSILQKKETSFGSSENITMTSLSKVTTFVSEDALPETTFPALASFKDTIPQTSEQKEYENRDYKDFTKQDLPTAERSQEATCPSPASSGASQETPNECSDDFGEFQSEKPKISKFDFLVATSQSKMKSSEEMIKSELATFDLSVQGSHKRSLSLGDKEISRSSPSPALEQPFRDRSNTLNEKPALPVIRDKYKDLTGEVEENERYAYEWQRCLGSALNVIKKANDTLNGISSSSVCTEVIQSAQGMEYLLGVVEVYRVTKRVELGIKATAVCSEKLQQLLKDIDKVWNNLIGFMSLATLTPDENSLDFSSCMLRPGIKNAQELACGVCLLNVDSRSRKEEKPAEEHPKKAFNSETDSFKLAYGGHQYHASCANFWINCVEPKPPGLVLPDLL

SEQ ID NO: 44474 - protein, 1159 aa, Homo sapiens
MNYSSQMSQGPIAMQAGIPMGPMPAAGMPYLGQAPFLGMRPPGPQYTPDMQKQFAEEQQKRFEQQQKLLEEERKRRQFEEQKQKLRLLSSVKPKTGEKSRDDALEAIKGNLDGFSRDAKMHPTPASHPKKPGVGVFPSQDPAQPRMPPWIYNESLVPDAYKKILETTMTPTGIDTAKLYPILMSSGLPRETLGQIWALANRTTPGKLTKEELYTVLAMIAVTQRGVPAMSPDALNQFPAAPIPTLSGFSMTLPTPVSQPTVIPSGPAGSMPLSLGQPVMGINLVGPVGGAAAQASSGFIPTYPANQVVKPEEDDFQDFQDASKSGSLDDSFSDFQELPASSKTSNSQHGNSAPSLLMPLPGTKALPSMDKYAVFKGIAADKSSENTVPPGDPGDKYSAFRELEQTAENKPLGESFAEFRSAGTDDGFTDFKTADSVSPLEPPTKDKTFPPSFPSGTIQQKQQTQVKNPLNLADLDMFSSVNCSSEKPLSFSAVFSTSKSVSTPQSTGSAATMTALAATKTSSLADDFGEFSLFGEYSGLAPVGEQDDFADFMAFSNSSISSEQKPDDKYDALKEEASPVPLTSNVGSTVKGGQNSTAASTKYDVFRQLSLEGSGLGVEDLKDNTPSGKSDDDFADFHSSKFSSINSDKSLGEKAVAFRHTKEDSASVKSLDLPSIGGSSVGKEDSEDALSVQFDMKLADVGGDLKHVMSDSSLDLPTVSGQHPPAADIEDLKYAAFGSYSSNFAVSTLTSYDWSDRDDATQGRKLSPFVLSAGSGSPSATSILQKKETSFGSSENITMTSLSKVTTFVSEDALPETTFPALASFKDTIPQTSEQKEYENRDYKDFTKQDLPTAERSQEATCPSPASSGASQETPNECSDDFGEFQSEKPKISKFDFLVATSQSKMKSSEEMIKSELATFDLSVQGSHKRSLSLGDKEISRSSPSPALEQPFRDRSNTLNEKPALPVIRDKYKDLTGEVEENERYAYEWQRCLGSALNVIKKANDTLNGISSSSVCTEVIQSAQGMEYLLGVVEVYRVTKRVELGIKATAVCSEKLQQLLKDIDKVWNNLIGFMSLATLTPDENSLDFSSCMLRPGIKNAQELACGVCLLNVDSRSRAFNSETDSFKLAYGGHQYHASCANFWINCVEPKPPGLVLPDLL

SEQ ID NO: 44475 - protein, 530 aa, Homo sapiens
MNYSSQMSQGPIAMQAGIPMGPMPAAGMPYLGQAPFLGMRPPGPQYTPDMQKQFAEEQQKRFEQQQKLLEEERKRRQFEEQKQKLRLLSSVKPKTGEKSRDDALEAIKGNLDGFSRDAKMHPTPASHPKKPDCPTSSHSTKTVSPSPAFLDEEEFSDFMQGPVEVPPCGPSSTSQPFQSFHPSTPLGQLHTQKAGTQPLPPSQSPVPFALHGVPGQIPYFSTASASHSVPEAGPSLEEKFLVSCDISTSGQEQIKLNTSEVGHKALGPGSSKKYPSLMASNGVAVDGCVSGTTTAEAENTSDQNLSIEESGVGVFPSQDPAQPRMPPWIYNESLVPDAYKKILETTMTPTGIDTAKLYPILMSSGLPRETLGQIWALANRTTPGKLTKEELYTVLAMIAVTQRGVPAMSPDALNQFPAAPIPTLSGFSMTLPTPVSQPTVIPSGPAGSMPLSLGQPVMGINLVGPVGGAAAQASSGFIPTYPANQVVKPEEDDFQDFQDASKSGSLDDSFSDFQELPASSKTSNSQHGNR

SEQ ID NO: 44476 - protein, 79 aa, Homo sapiens
MGFFFSVANVIQQAGCPVPEYIKGFQKLLSKQKKKMIKKPLERESISTTPKCFLEKAKDKQKKVTGQNSKKKVALEDKS

SEQ ID NO: 44477 - protein, 34 aa, Homo sapiens
MVALCTCKATQRPPYCDGTHRSERVQKAEVGSPL

SEQ ID NO: 44478 - protein, 328 aa, Homo sapiens [sequence omitted]

SEQ ID NO: 44479 - protein, 257 aa, Homo sapiens
MHNILKKYHQFIVECHGNTLLPQFLGMYRLTVDGVETYMVVTRNVFSHRLTVHRKYDLKGSTVAREASDKEKAKDLPTFKDNDFLNEGQKLHVGEESKKNFLEKLKRDVEFLAQLKIMDYSLLVGIHDVDRAEQEEMEVEERAEDEECENDGVGGNLLCSYGTPPDSPGNLLSFPRFFGPGEFDPSVDVYAMKSHESSPKKEVYFMAIIDILTPYDTKKKAAHAAKTVKHGAGAEISTVNPEQYSKRFNEFMSNILT

SEQ ID NO: 44480 - protein, 41 aa, Homo sapiens [sequence omitted]

SEQ ID NO: 44481 - protein, 225 aa, Homo sapiens
MTLNMKNYKGYEKKPYCNAHYPKQSFTMVADTPENLRLKQQSELQSQVRYKEEFEKNKGKGFSVVADTPELQRIKKTQDQISNIKYHEEFEKSRMGPSGGEGMEPERRDSQDGSSYRRPLEQQQPHHIPTSAPVYQQPQQQPVAQSYGGYKEPAAPVSIQRSAPGGGGKRYRAVYDYSAADEDEVSFQDGDTIVNVQQIDDGWMYGTVERTGDTGMLPANYVEAI

SEQ ID NO: 44482 - protein, 422 aa, Homo sapiens
MFSNSDEAVINKKLPKELLLRIFSFLDVVTLCRCAQVSRAWNVLALDGSNWQRIDLFDFQRDIEGRVVENISKRCGGFLRKLSLRGCLGVGDNALRTFAQNCRNIEVLNLNGCTKTTDATCTSLSKFCSKLRHLDLASCTSITNMSLKALSEGCPLLEQLNISWCDQVTKDGIQALVRGCGGLKALFLKGCTQLEDEALKYIGAHCPELVTLNLQTCLQITDEGLITICRGCHKLQSLCASGCSNITDAILNALGQNCPRLRILEVARCSQLTDVGFTTLARNCHELEKMDLEECVQITDSTLIQLSIHCPRLQVLSLSHCELITDDGIRHLGNGACAHDQLEVIELDNCPLITDASLEHLKSCHSLERIELYDCQQITRAGIKRLRTHLPNIKVHAYFAPVTPPPSVGGSRQRFCRCCIIL

SEQ ID NO: 44483 - protein, 390 aa, Homo sapiens
MFSNSDEAVINKKLPKELLLRIFSFLDVVTLCRCAQVSRAWNVLALDGSNWQRIDLFDFQRDIEGRVVENISKRCGGFLRKLSLRGCLGVGDNALRTFAQNCRNIEVLNLNGCTKTTDAEGCPLLEQLNISWCDQVTKDGIQALVRGCGGLKALFLKGCTQLEDEALKYIGAHCPELVTLNLQTCLQITDEGLITICRGCHKLQSLCASGCSNITDAILNALGQNCPRLRILEVARCSQLTDVGFTTLARNCHELEKMDLEECVQITDSTLIQLSIHCPRLQVLSLSHCELITDDGIRHLGNGACAHDQLEVIELDNCPLITDASLEHLKSCHSLERIELYDCQQITRAGIKRLRTHLPNIKVHAYFAPVTPPPSVGGSRQRFCRCCIIL

SEQ ID NO: 44484 - protein, 1566 aa, Homo sapiens [sequence omitted]

SEQ ID NO: 44485 - protein, 1429 aa, Homo sapiens
MGLVTPEAASLGTVIKPLVEYDDISSDSDTFSDDMAFKLDRRENDERRGSDRSDRLHKHRHHQHRRSRDLLKAKQTEKEKSQEVSSKSGSMKDRISGSSKRSNEETDDYGKAQVAKSSSKESRSSKLHKEKTRKERELKSGHKDRSKSHRKRETPKSYKTVDSPKRRSRSPHRKWSDSSKQDDSPSGASYGQDYDLSPSRSHTSSNYDSYKKSPGSTSRRQSVSPPYKEPSAYQSSTRSPSPYSRRQRSVSPYSRRRSSSYERSGSYSGRSPSPYGRRRSSSPFLSKRSLSRSPLPSRKSMKSRSRSPAYSRHSSSHSKKKRSSSRSRHSSISPVRLPLNSSLGAELSRKKKERAAAAAAAKMDGKESKGSPVFLPRKENSSVEAKDSGLESKKLPRSVKLEKSAPDTELVNVTHLNTEVKNSSDTGKVKLDENSEKHLVKDLKAQGTRDSKPIALKEEIVTPKETETSEKETPPPLPTIASPPPPLPTTTPPPQTPPLPPLPPIPALPQQPPLPPSQPAFSQVPASSTSTLPPSTHSKTSAVSSQANSQPPVQVSVKTQVSVTAAIPHLKTSTLPPLPLPPLLPGDDDMDSPKETLPSKPVKKEKEQRTRHLLTDLPLPPELPGGDLSPPDSPEPKAITPPQQPYKKRPKICCPRYGERRQTESDWGKRCVDKFDIIGIIGEGTYGQVYKAKDKDTGELVALKKVRLDNEKEGFPITAIREIKILRQLIHRSVVNMKEIVTDKQDALDFKKDKGAFYLVFEYMDHDLMGLLESGLVHFSEDHIKSFMKQLMEGLEYCHKKNFLHRDIKCSNILLNNSGQIKLADFGLARLYNSEESRPYTNKVITLWYRPPELLLGEERYTPAIDVWSCGCILGELFTKKPIFQANLELAQLELISRLCGSPCPAVWPDVIKLPYFNTMKPKKQYRRRLREEFSFIPSAALDLLDHMLTLDPSKRCTAEQTLQSDFLKDVELSKMAPPDLPHWQDCHELWSKKRRRQRQSGVVVEEPPPSKTSRKETTSGTSTEPVKNSSPAPPQPAPGKVESGAGDAIGLADITQQLNQSELAVLLNLLQSQTDLSIPQMAQLLNIHSNPEMQQQLEALNQSISALTEATSQQQDSETMAPEESLKEAPSAPVILPSAEQTTLEASSTPADMQNILAVLLSQLMKTQEPAGSLEENNSDKNSGPQGPRRTPTMPQEEAAEKRPPEPPGPPPPPPPPPLVEGDLSSAPQELNPAVTAALLQLLSQPEAEPPGHLPHEHQALRPMEYSTRPRPNRTYGNTDGPETGFSAIDTDERNSGPALTESLVQTLVKNRTFSGSLSHLGESSSYQGTGSVQFPGDQDLRFARVPLALHPVVGQPFLKAEGSSNSVVHAETKLQNYGELGPGTTGASSSGAGLHWGGPTQSSAYGKLYRGPTRVPPRGGRGRGVPY

SEQ ID NO: 44486 - protein, 1438 aa, Homo sapiens
MGLVTPEAASLGTVIKPLVEYDDISSDSDTFSDDMAFKLDRRENDERRGSDRSDRLHKHRHHQHRRSRDLLKAKQTEKEKSQEVSSKSGSMKDRISGSSKRSNEETDDYGKAQVAKSSSKESRSSKLHKEKTRKERELKSGHKDRSKSHRKRETPKSYKTVDSPKRRSRSPHRKWSDSSKQDDSPSGASYGQDYDLSPSRSHTSSNYDSYKKSPGSTSRRQSVSPPYKEPSAYQSSTRSPSPYSRRQRSVSPYSRRRSSSYERSGSYSGRSPSPYGRRRSSSPFLSKRSLSRSPLPSRKSMKSRSRSPAYSRHSSSHSKKKRSSSRSRHSSISPVRLPLNSSLGAELSRKKKERAAAAAAAKMDGKESKGSPVFLPRKENSSVEAKDSGLESKKLPRSVKLEKSAPDTELVNVTHLNTEVKNSSDTGKVKLDENSEKHLVKDLKAQGTRDSKPIALKEEIVTPKETETSEKETPPPLPTIASPPPPLPTTTPPPQTPPLPPLPPIPALPQQPPLPPSQPAFSQVPASSTSTLPPSTHSKTSAVSSQANSQPPVQVSVKTQVSVTAAIPHLKTSTLPPLPLPPLLPGDDDMDSPKETLPSKPVKKEKEQRTRHLLTDLPLPPELPGGDLSPPDSPEPKAITPPQQPYKKRPKICCPRYGERRQTESDWGKRCVDKFDIIGIIGEGTYGQVYKAKDKDTGELVALKKVRLDNEKEGFPITAIREIKILRQLIHRSVVNMKEIVTDKQDALDFKKDKGAFYLVFEYMDHDLMGLLESGLVHFSEDHIKSFMKQLMEGLEYCHKKNFLHRDIKCSNILLNNSGQIKLADFGLARLYNSEESRPYTNKVITLWYRPPELLLGEERYTPAIDVWSCGCILGELFTKKPIFQANLELAQLELISRLCGSPCPAVWPDVIKLPYFNTMKPKKQYRRRLREEFSFIPSAALDLLDHMLTLDPSKRCTAEQTLQSDFLKDVELSKMAPPDLPHWQDCHELWSKKRRRQRQSGVVVEEPPPSKTSRKETTSGTSTEPVKNSSPAPPQPAPGKVESGAGDAIGLADITQQLNQSELAVLLNLLQSQTDLSIPQMAQLLNIHSNPEMQQQLEALNQSISALTEATSQQQDSETMAPEESLKEAPSAPVILPSAEQTTLEASSTPADMQNILAVLLSQLMKTQEPAGSLEENNSDKNSGPQGPRRTPTMPQEEAAACPPHILPPEKRPPEPPGPPPPPPPPPLVEGDLSSAPQELNPAVTAALLQLLSQPEAEPPGHLPHEHQALRPMEYSTRPRPNRTYGNTDGPETGFSAIDTDERNSGPALTESLVQTLVKNRTFSGSLSHLGESSSYQGTGSVQFPGDQDLRFARVPLALHPVVGQPFLKAEGSSNSVVHAETKLQNYGELGPGTTGASSSGAGLHWGGPTQSSAYGKLYRGPTRVPPRGGRGRGVPY

SEQ ID NO: 44487 - protein, 139 aa, Homo sapiens
MVLWNKTVTACQILQRVEDNTLISYDVSAGAAGGVVSPRDFVNVRRIERRRDRYLSSGIATSHSAKPPTHKYVRGENGPGGFIVLKSASNPRVCTFVWILNTDLKGRLPRYLIHQSLAATMFEFAFHLRQRISELGARA

SEQ ID NO: 44488 - protein, 264 aa, Homo sapiens
MSLAGWTCRDDCKYECMWVTVGLYLQEGHKVPQFHGKWPFSRFLFFQEPASAVASFLNGLASLVMLCRYRTFVPASSPMYHTCVAFAWVSLNAWFWSTVFHTRDTDLTEKMDYFCASTVILHSIYLCCVRTVGLQHPAVVSAFRALLLLMLTVHVSYLSLIRFDYGYNLVANVAIGLVNVVWWLAWCLWNQRRLPHVRKCVVVVLLLQGLSLLELLDFPPLFWVLDAHAIWHISTIPVHVLFFSFLEDDSLYLLKESEDKFKLD

SEQ ID NO: 44489 - protein, 257 aa, Homo sapiens
MQQVTLVLLGHILPGLLTDSSKWHSLMDPPGTALAKLAVWCALSSYSSHKGQASTRQKKRHREDIEDYISLFPLDDVQPSKLMRLLSSNEDDANILSSPRSSLGSPCTSYLRWVKVGLGHPRGAPLLHSAGCFPALHLLRPTADRSMSSSLSASQLHTVNMRDPLNRVLANLFLLISSILGSRTAGPHTQFVQWFMEECVDCLEQGGRGSVLQFMPFTTVSELVKVSAMSSPKVVLAITDLSLPLGRQVAAKAIAAL

SEQ ID NO: 44490 - protein, 452 aa, Homo sapiens [sequence omitted]

SEQ ID NO: 44491 - protein, 459 aa, Homo sapiens
MRSAVFKAAAAPAGGNPEQRLDYERAAALGGPEDEPGAAEAHFLPRHRKLKEPGPPLASSQGGSPAPSPAGCGGKGRGLLLPAGAAPGQQEESWGGSVPLPCPPPATKQAGIGGEPAAAGAGCSPRPKYQAVLPIQTGSLVAAAKEPTPWAGDKGGAASPAATASDPAGPPPLPLPGPPPLAPTATAGTLAASEGRWKSMRKSPLGGGGGSGASSQAACLKQILLLQLDLIEQQQQQLQAKEKEIEELKSERDTLLARIERMERRMQLVKKDNEKERHKLFQGYETEEREETELSEKIKLECQPELSETSQTLPPKPFSCGRSGKGHKRKSPFGSTERKTPVKKLAPEFSKVKTKTPKHSPIKEEPCGSLSETVCKRELRSQETPEKPRSSVDTPPRLSTPQKGPSTHPKEKAFSSEIEDLPYLSTTEMYLCRWHQPPPSPLPLRESSPKKEETVASKA

SEQ ID NO: 44492 - protein, 382 aa, Homo sapiens
MDVIRNFLREHICGKKAGSLYLSGAPGTGKTACLSRILQDLKKELKGFKTIMLNCMSLRTAQAVFPAIAQEICQEEVSRPAGKDMMRKLEKHMTAEKGPMIVLVLDEMDQLDSKGQDVLYTLFEWPWLSNSHLVLIGIANTLDLTDRILPRLQAREKCKPQLLNFPPYTRNQIVTILQDRLNQVSRDQVLDNAAVQFCARKVSAVSGDVRKALDVCRRAIEIVESDVKSQTILKPLSECKSPSEPLIPKRVGLIHISQVISEVDGNRMTLSQEGAQDSFPLQQKILVCSLMLLIRQLKIKEVTLGKLYEAYSKVCRKQQVAAVDQSECLSLSGLLEARGILGLKRNKETRLTKVFFKIEEKEIEHALKDKALIGNILATGLP

SEQ ID NO: 44493 - protein, 235 aa, Homo sapiens
MQIEGLKEELAYLRKNHEEEMLALRGQTGGDVNVEMDAAPGVDLSRILNEMRDQYEQMAEKNRRDAETWFLSKTEELNKEVASNSELVQSSRSEVTELRRVLQGLEIELQSQLSMKASLENSLEETKGRYCMQLSQIQGLIGSVEEQLAQLRCEMEQQSQEYQILLDVKTRLEQEIATYRRLLEGEDAHLSSQQASGQSYSSREVFTSSSSSSSRQTRPILKEQSSSSFSQGQSS

SEQ ID NO: 44494 - protein, 683 aa, Homo sapiens [sequence omitted]

SEQ ID NO: 44495 - protein, 667 aa, Homo sapiens [sequence omitted]

SEQ ID NO: 44496 - protein, 128 aa, Homo sapiens [sequence omitted]

SEQ ID NO: 44497 - protein, 747 aa, Homo sapiens
MQVLYGQHFPIEVRHYLAQWIESQPWDAIDLDNPQDRAQATQLLEGLVQELQKKAEHQVGEDGFLLKIKLGHYATQLQCSSPAGILVDAMSQKHLQINQTFEELRLVTQDTENELKKLQQTQEYFIIQYQESLRIQAQFAQLAQLSPQERLSRETALQQKQVSLEAWLQREAQTLQQYRVELAEKHQKTLQLLRKQQTIILDDELIQWKRRQQLAGNGGPPEGSLDVLQSWCEKLAEIIWQNRQQIRRAEHLCQQLPIPGPVEEMLAEVNATITDIISALVTSTFIIEKQPPQVLKTQTKFAATVRLLVGGKLNVHMNPPQVKATIISEQQAKSLLKNENTRNECSGEILNNCCVMEYHQATGTLSAHFRNMSLKRIKRADRRGAESVTEEKFTVLFESQFSVGSNELVFQVKTLSLPVVVIVHGSQDHNATATVLWDNAFAEPGRVPFAVPDKVLWPQLCEALNMKFKAEVQSNRGLTKENLVFLAQKLFNNSSSHLEDYSGLSVSWSQFNRENLPGWNYTFWQWFDGVMEVLKKHHKPHWNDGAILGFVNKQQAHDLLINKPDGTFLLRFSDSEIGGITIAWKFDSPERNLWNLKPFTTRDFSIRSLADRLGDLSYLIYVFPDRPKDEVFSKYYTPVLAKAVDGYVKPQIKQVVPEFVNASADAGGSSATYMDQAPSPAVCPQAPYNMYPQNPDHVLDQDGEFDLDETMDVARHVEELLRRPMDSLDSRLSPPAGLFTSARGSLS

SEQ ID NO: 44498 - protein, 274 aa, Homo sapiens
MSDVVVQPYNSLLTLKRLTQNADCVVVLDNTALNRIATDRLHIQNPSFSQINQLVSTIMSASTTTLRYPGYMNNDLIGLIASLIPTPRLHFLMTGYTPLTTDQSVASVRKTTVLDVMRRLLQPKNVMVSTGRDRQTNHCYIAILNIIQGEVDPTQVHKSLQRIRERKLANFIPWGPASIQVALSRKSPYLPSAHRVSGLMMANHTSISSLFESSCQQFDKLRKRDAFLEQFRKEDMFKDNFDEMDRSREVVQELIDEYHAATQPDYISWGTQEQ

SEQ ID NO: 44499 - protein, 1308 aa, Homo sapiens
MKKHRIRAVATQGSFNSWDWVTRYMLLYGDRVDSWTPFYQRGHNSTFFGNVNESAVVRHDLHFHFTARYIRIVPLAWNPRGKIGLRLGLYGCPYKADILYFDGDDAISYRFPRGVSRSLWDVFAFSFKTEEKDGLLLHAEGAQGDYVTLELEGAHLLLHMSLGSSPIQPRPGHTTVSAGGVLNDQHWHYVRVDRFGRDVNFTLDGYVQRFILNGDFERLNLDTEMFIGGLVGAARKNLAYRHNFRGCIENVIFNRVNIADLAVRRHSRITFEGKVAFRCLDPVPHPINFGGPHNFVQVPGFPRRGRLAVSFRFRTWDLTGLLLFSRLGDGLGHVELTLSEGQVNVSIAQSGRKKLQFAAGYRLNDGFWHEVNFVAQENHAVISIDDVEGAEVRVSYPLLIRTGTSYFFGGCPKPASRWDCHSNQTAFHGCMELLKVDGQLVNLTLVEGRRLGFYAEVLFDTCGITDRCSPNMCEHDGRCYQSWDDFICYCELTGYKGETCHTPLYKESCEAYRLSGKTSGNFTIDPDGSGPLKPFVVYCDIRENRAWTVVRHDRLWTTRVTGSSMERPFLGAIQYWNASWEEVSALANASQHCEQWIEFSCYNSRLLNTAGGYPYSFWIGRNEEQHFYWGGSQPGIQRCACGLDRSCVDPALYCNCDADQPQWRTDKGLLTFVDHLPVTQVVIGDTNRSTSEAQFFLRPLRCYGDRNSWNTISFHTGAALRFPPIRANHSLDVSFYFRTSAPSGVFLENMGGPYCQWRRPYVRVELNTSRDVVFAFDVGNGDENLTVHSDDFEFNDDEWHLVRAEINVKQARLRVDHRPWVLRPMPLQTYIWMEYDQPLYVGSAELKRRPFVGCLRAMRLNGVTLNLEGRANASEGTSPNCTGHCAHPRLPCFHGGRCVERYSYYTCDCDLTAFDGPYCNHDIGGFFEPGTWMRYNLQSALRSAAREFSHMLSRPVPGYEPGYIPGYDTPGYVPGYHGPGYRLPDYPRPGRPVPGYRGPVYNVTGEEVSFSFSTSSAPAVLLYVSSFVRDYMAVLIKDDGTLQLRYQLGTSPYVYQLTTRPVTDGQPHSINITRVYRNLFIQVDYFPLTEQKFSLLVDSQLDSPKALYLGRVMETGVIDPEIQRYNTPGFSGCLSGVRFNNVAPLKTHFRTPRPMTAELAEALRVQGELSESNCGAMPRLVSEVPPELDPWYLPPDFPYYHDEGWVAILLGFLVAFLLLGLVGMLVLFYLQNHRYKGSYHTNEPKAAHEYHPGSKPPLPTSGPAQVPTPTAAPNQAPASAPAPAPTPAPAPGPRDQNLPQILEESRSE

SEQ ID NO: 44500 - protein, 55 aa, Homo sapiens
MSDPNALPPQCTPNIDGPNAKSVQREQSLHSFHTLFCRRCFKYDCFLHREWGYSV

SEQ ID NO: 44501 - protein, 174 aa, Homo sapiens [sequence omitted]

SEQ ID NO: 44502 - protein, 69 aa, Homo sapiens [sequence omitted]

SEQ ID NO: 44503 - protein, 439 aa, Homo sapiens [sequence omitted]

SEQ ID NO: 44504 - protein, 268 aa, Homo sapiens
MQVSFVCQRCSQPLKLDTSFKILDRVTIQELTAPLLTTAQAKPGETQEEETNSGEEPFIETPRQDGVSRRFIPPARRCLEILEQMNEDDSEQLQMELKELALEEERLIQELEDVEKNRKIVAENLEKVQAEAERLDQEEAQYQREYSEFKRQQLELDDELKSVENQMRYAQTQLDKLKKTNVFNATFHIWHSGQFGTINNFRLGRLPSVPVEWNEINAAWGQTVLLLHALANKMGLKFQRYRLVPYGNHSYLESLTDKSKDGCGERQD

SEQ ID NO: 44505 - protein, 58 aa, Homo sapiens
MKPGKVVLVLAGRYSGRKAVIVKVSASRDSASLHAGTRLAAAGRAGLEFKACFWGSSQ

SEQ ID NO: 44506 - protein, 80 aa, Homo sapiens
MGKKKIAKRSKIKSFVKVYNYNHLMPTRYSVDIPLDKTVVNKDVFRDPALKRKARREAKVKFEERYKTGKNKWFFQKLRF

SEQ ID NO: 44507 - protein, 1867 aa, Homo sapiens
MQKILECPICLELIKEPVSTKCDHIFCKFCMLKLLNQKKGPSQCPLCKNDITKRSLQESTRFSQLVEELLKIICAFQLDTGLEYANSYNFAKKENNSPEHLKDEVSIIQSMGYRNRAKRLLQSEPENPSLQETSLSVQLSNLGTVRTLRTKQRIQPQKTSVYIELGSDSSEDTVNKATYCSVGDQELLQITPQGTRDEISLDSAKKAACEFSETDVTNTEHHQPSNNDLNTTEKRAAERHPEKYQGSSVSNLHVEPCGTNTHASSLQHENSSLLLTKDRMNVEKAEFCNKSKQPGLARSQHNRWAGSKETCNDRRTPSTEKKVDLNADPLCERKEWNKQKLPCSENPRDTEDVPWITLNSSIQKVNEWFSRSDELLGSDDSHDGESESNAKVADVLDVLNEVDEYSGSSEKIDLLASDPHEALICKSERVHSKSVESNIEDKIFGKTYRKKASLPNLSHVTENLIIGAFVTEPQIIQERPLTNKLKRKRRPTSGLHPEDFIKKADLAVQKTPEMINQGTNQTEQNGQVMNITNSGHENKTKGDSIQNEKNPNPIESLEKESAFKTKAEPISSSISNMELELNIHNSKAPKKNRLRRKSSTRHIHALELVVSRNLSPPNCTELQIDSCSSSEEIKKKKYNQMPVRHSRNLQLMEGKEPATGAKKSNKPNEQTSKRHDSDTFPELKLTNAPGSFTKCSNTSELKEFVNPSLPREEKEEKLETVKVSNNAEDPKDLMLSGERVLQTERSVESSSISLVPGTDYGTQESISLLEVSTLGKAKTEPNKCVSQCAAFENPKGLIHGCSKDNRNDTEGFKYPLGHEVNHSRETSIEMEESELDAQYLQNTFKVSKRQSFAPFSNPGNAEEECATFSAHSGSLKKQSPKVTFECEQKEENQGKNESNIKPVQTVNITAGFPVVGQKDKPVDNAKCSIKGGSRFCLSSQFRGNETGLITPNKHGLLQNPYRIPPLFPIKSFVKTKCKKNLLEENFEEHSMSPEREMGNENIPSTVSTISRNNIRENVFKEASSSNINEVGSSTNEVGSSINEIGSSDENIQAELGRNRGPKLNAMLRLGVLQPEVYKQSLPGSNCKHPEIKKQEYEEVVQTVNTDFSPYLISDNLEQPMGSSHASQVCSETPDDLLDDGEIKEDTSFAENDIKESSAVFSKSVQKGELSRSPSPFTHTHLAQGYRRGAKKLESSEENLSSEDEELPCFQHLLFGKVNNIPSQSTRHSTVATECLSKNTEENLLSLKNSLNDCSNQVILAKASQEHHLSEETKCSASLFSSQCSELEDLTANTNTQDPFLIGSSKQMRHQSESQGVGLSDKELVSDDEERGTGLEENNQEEQSMDSNLGEAASGCESETSVSEDCSGLSSQSDILTTQQRDTMQHNLIKLQQEMAELEAVLEQHGSQPSNSYPSIISDSSALEDLRNPEQSTSEKDSHIHGQRNNSMFSKRPREHISVLTSQKSSEYPISQNPEGLSADKFEVSADSSTSKNKEPGVERSSPSKCPSLDDRWYMHSCSGSLQNRNYPSQEELIKVVDVEEQQLEESGPHDLTETSYLPRQDLEGTPYLESGISLFSDDPESDPSEDRAPESARVGNIPSSTSALKVPQLKVAESAQSPAAAHTTDTAGYNAMEESVSREKPELTASTERVNKRMSMVVSGLTPEEFMLVYKFARKHHITLTNLITEETTHVVMKTDAEFVCERTLKYFLGIAGGKWVVSYFWVTQSIKERKMLNEHDFEVRGDVVNGRNHQGPKRARESQDRKIFRGLEICCYGPFTNMPTDQLEWMVQLCGASVVKELSSFTLGTGVHPIVVVQPDAWTEDNGFHAIGQMCEAPVVTREWVLDSVALYQCQELDTYLIPQIPHSHY

SEQ ID NO: 44508 - protein, 933 aa, Homo sapiens
MVKVSFDLNTIQIKYLDEENEEVSINSQGEYEEALKMAVKQGNQLQMQVHEGHHVVDEAPPPVVGAKRLAARAGKKPLAHYSSLVRVLGSDMKTPEDPAVQSFPLVPCDTDQPQDKPPDWFTSYLETFREQVVNETVEKLEQKLHEKLVLQNPSLGSCPSEVSMPTSEETLFLPENQFSWHIACNNCQRRIVGVRYQCSLCPSYNICEDCEAGPYGHDTNHVLLKLRRPVVGSSEPFCHSKYSTPRLPAALEQVRLQKQVDKNFLKAEKQRLRAEKKQRKAEVKELKKQLKLHRKIHLWNSIHGLQSPKSPLGRPESLLQSNTLMLPLQPCTSVMPMLSAAFVDENLPDGTHLQPGTKFIKHWRMKNTGNVKWSADTKLKFMWGNLTLASTEKKDVLVPCLKAGHVGVVSVEFIAPALEGTYTSHWRLSHKGQQFGPRVWCSIIVDPFPSEESPDNIEKGMISSSKTDDLTCQQEETFLLAKEERQLGEVTEQTEGTAACIPQKAKNVASERELYIPSVDLLTAQDLLSFELLDINIVQELERVPHNTPVDVTPCMSPLPHDSPLIEKPGLGQIEEENEGAGFKALPDSMVSVKRKAENIASVEEAEEDLSGTQFVCETVIRSLTLDAAPDHNPPCRQKSLQMTFALPEGPLGNEKEEIIHIAEEEAVMEEEEDEEDEEEEDELKDEVQSQSSASSEDYIIILPECFDTSRPLGDSMYSSALSQPGLERGAEGKPGVEAGQEPAEAGERLPGGENQPQEHSISDILTTSQTLETVPLIPEVVELPPSLPRSSPCVHHHGSPGVDLPVTIPEVSSVPDQIRGEPRGSSGLVNSRQKSYDHSRHHHGSSIAGGLVKGALSVAASAYKALFAGPPVTAQPIISEDQTAALMAHLFEMGFCDRQLNLRLLKKHNYNILQVVTELLQLNNNDWYSQRY

SEQ ID NO: 44509 - protein, 106 aa, Homo sapiens [sequence omitted]

SEQ ID NO: 44510 - protein, 247 aa, Homo sapiens [sequence omitted]

SEQ ID NO: 44511 - protein, 297 aa, Homo sapiens
MKDFEIVDQPGLDIFGQVFNQWKSKECVCPNCSRSIAASRFAPHLEKCLGMGRNSSRIANRRIANSNNMNKSESDQEDNDDINDNDWSYGSEKKAKKRKSDKLWYLPFQNPNSPRRSKSLKHKNGELSNSDPFKYNNSTGISYETLGPEELRSLLTTQCGVISEHTKKMCTRSLRCPQHTDEQRRTVRIYFLGPSAVLPEVESSLDNDSFDMTDSQALISRLQWDGSSDLSPSDSGSSKTSENQGWGLGTNSSESRKTKKKKSHLSLVGTASGLGSNKKKKPKPPAPPTPSIYDDIN

SEQ ID NO: 44512 - protein, 1424 aa, Homo sapiens
MGMGRMEMELDYAEDATERRRVLEVEKEDTEELRQKYKDYVDKEKAIAKALEDLRANFYCELCDKQYQKHQEFDNHINSYDHAHKQRLKDLKQREFARNVSSRSRKDEKKQEKALRRLHELAEQRKQAECAPGSGPMFKPTTVAVDEEGGEDDKDESATNSGTGATASCGLGSEFSTDKGGPFTAVQITNTTGLAQAPGLASQGISFGIKNNLGTPLQKLGVSFSFAKKAPVKLESIASVFKDHAEEGTSEDGTKPDEKSSDQGLQKVGDSDGSSNLDGKKEDEDPQDGGSLASTLSKLKRMKREEGAGATEPEYYHYIPPAHCKVKPNFPFLLFMRASEQMDGDNTTHPKNAPESKKGSSPKPKSCIKAAASQGAEKTVSEVSEQPKETSMTEPSEPGSKAEAKKALGGDVSDQSLESHSQKVSETQMCESNSSKETSLATPAGKESQEGPKHPTGPFFPVLSKDESTALQWPSELLIFTKAEPSISYSCNPLYFDFKLSRNKDARTKGTEKPKDIGSSSKDHLQGLDPGEPNKSKEVGGEKIVRSSGGRMDAPASGSACSGLNKQEPGGSHGSETEDTGRSLPSKKERSGKSHRHKKKKKHKKSSKHKRKHKADTEEKSSKAESGEKSKKRKKRKRKKNKSSAPADSERGPKPEPPGSGSPAPPRRRRRAQDDSQRRSLPAEEGSSGKKDEGGGGSSSQDHGGRKHKGELPPSSCQRRAGTKRSSRSSHRSQPSSGDEDSDDASSHRLHQKSPSQYSEEEEEEDSGSEHSRSRSRSGRRHSSHRSSRRSYSSSSDASSDQSCYSRQRSYSDDSYSDYSDRSRRHSKRSHDSDDSDYASSKHRSKRHKYSSSDDDYSLSCSQSRSRSRSHTRERSRSRGRSRSSSCSRSRSKRRSRSTTAHSWQRSRSYSRDRSRSTRSPSQRSGSRKRSWGHESPEERHSGRRDFIRSKIYRSQSPHYFRSGRGEGPGKKDDGRGDDSKATGPPSQNSNIGTGRGSEGDCSPEDKNSVTAKLLLEKIQSRKVERKPSVSEEVQATPNKAGPKLKDPPQGYFGPKLPPSLGNKPVLPLIGKLPATRKPNKKCEESGLERGEEQEQSETEEGPPGSSDALFGHQFPSEETTGPLLDPPPEESKSGEATADHPVAPLGTPAHSDCYPGDPTISHNYLPDPSDGDTLESLDSSSQPGPVESSLLPIAPDLEHFPSYAPPSGDPSIESTDGAEDASLAPLESQPITFTPEEMEKYSKLQQAAQQHIQQQLLAKQVKAFPASAALAPATPALQPIHIQQPATASATSITTVQHAILQHHAAAAAAAIGIHPHPHPQPLAQVHHIPQPHLTPISLSHLTHSIIPGHPATFLASHPIHIIPASAIHPGPFTFHPVPHAALYPTLLAPRPAAAAATALHLHPLLHPIFSGQDLQHPPSHGT

SEQ ID NO: 44513 - protein, 250 aa, Homo sapiens
MKLVAQKVIDTVPLGEVAEDMFGYFEPLYQVIPDMPRPPETFLRRVTGWKEQVVNGDVGAVSEPPCLPKEPAPPSPASLWAVTLPTPPQSPIHPGTWTPRFSVIPWSSWSLSWFGQSSGQHLEESVIPGTAPCPPQRKRGCGAARRGPRSWTCGCWGQFEHYRRACRRCRRGCRAWRACPGPLSRGRSPGPVLGHGPLGSRGPRCSSSSCGPSSSSGSSECFGPKRGDCQWRGLCSQLRLSCCALSLPRV

SEQ ID NO: 44514 - protein, 819 aa, Homo sapiens
MARVCWKGKRRSKARKKRKKKSSKSLAHAGVALAKPLPRTPEQESCTIPVQEDESPLGAPYVRNTPQFTKPLKEPGLGQLCFKQLGEGLRPALPRSELHKLISPLQCLNHVWKLHHPQDGGPLPLPTHPFPYSRLPHPFPFHPLQPWKPHPLESFLGKLACVDSQKPLPDPHLSKLACVDSPKPLPGPHLEPSCLSRGAHEKFSVEEYLVHALQGSVSSGQAHSLTSLAKTWAARGSRSREPSPKTEDNEGVLLTEKLKPVDYEYREEVHWATHQLRLGRGSFGEVHRMEDKQTGFQCAVKKVRLEVFRAEELMACAGLTSPRIVPLYGAVREGPWVNIFMELLEGGSLGQLVKEQGCLPEDRALYYLGQALEGLEYLHSRRILHGDVKADNVLLSSDGSHAALCDFGHAVCLQPDGLGKSLLTGDYIPGTETHMAPEVVLGRSCDAKVDVWSSCCMMLHMLNGCHPWTQFFRGPLCLKIASEPPPVREIPPSCAPLTAQAIQEGLRKEPIHRVSAAELGGKVNRALQQVGGLKSPWRGEYKEPRHPPPNQANYHQTLHAQPRELSPRAPGPRPAEETTGRAPKLQPPLPPEPPEPNKSPPLTLSKEESGMWEPLPLSSLEPAPARNPSSPERKATVPEQELQQLEIELFLNSLSQPFSLEEQEQILSCLSIDSLSLSDDSEKNPSKASQSSRDTLSSGVHSWSSQAEARSSSWNMVLARGRPTDTPSYFNGVKVQIQSLNGEHLHIREFHRVKVGDIATGISSQIPAAAFSLVTKDGQPVRYDMEVPDSGIDLQCTLAPDGSFAWSWRVKHGQLENRP

SEQ ID NO: 44515 - protein, 769 aa, Homo sapiens
MSCDSDLGTANAEDSDRSLQEVLLEFSKAQVNSVPTNGLSQETEIPTPQASLSLHGLNTSTYLHCEAPAEPLPAQAASGTQDGVHVQEPRPQAPSPLDLQQPVESTSGQQPSSTVSETAREVGQGNGLQKAQAHDGAGLKLVVSSPTSPKNKSWISEDDFYRPSREQPLESASDHPIASYRGTPGSRPGLHRHFSQEPRKNCSLGALDQACVPSPGRRQAQAAPSQGHKSFRVVHRRQMGLSNPFRGLMKLGTVERRGAMGIWKELFCELSPLEFRLYLSNEEHTCVENCSLLRCESVGPAHSDGRFELVFSGKKLALRASSQDEAEDWLDRVREALQKVRPQQEDEWVNVQYPDQPEEPPEAPQGCLSPSDLLSEPAALQGTQFDWSSAQVPEPDAIKESLLYLYMDRTWMPYIFSLSLEALKCFRIRNNEKMLSDSHGVETIRDILPDTSLGGPSFFKIITAKAVLKLQAGNAEEAALWRDLVRKVLASYLETAEEAVTLGGSLDENCQEVLKFATRENGFLLQYLVAIPMEKGLDSQGCFCAGCSRQIGFSFVRPKLCAFSGLYYCDICHQDDASVIPARIIHNWDLTKRPICRQALKFLTQIRAQPLINLQMVNASLYEHVERMHLIGRRREQLKLLGDYLGLCRSGALKELSKRLNHRNYLLESPHRFSVADLQQIADGVYEGFLKALIEFASQHVYHCDLCTQRGFICQICQHHDIIFPFEFDTTVRCAECKTVFHQSCQAVVKKGCPRCARRRKYQEQNIFA

SEQ ID NO: 44516 - protein, 94 aa, Homo sapiens
MPLKSVLWGGSKGPWSWPRPRHRERLDFLSLCAEWLRWRPLSLTQQLKHTISGSNWLPHPLPCPLAVPKITATPTSLLLPTEPKEKPLLQRIPA

SEQ ID NO: 44517 - protein, 131 aa, Homo sapiens
MVRQRRRPRGSARLRGGGPRGPGSGRHRGPWKRQGWGRGDACVEHGDPSPAPTCRPGPRAAGRVAGGPGCPGGGPGPRPGARSGVRVARPSRGGTDRRREEGKPPGLKILSLRSHSEASRVWLEQHRQGRV

SEQ ID NO: 44518 - protein, 763 aa, Homo sapiens
MASTKPLCLPRCGFPRRTPLCRRLAEGEQILSGGVFNKQKSHDDIVTEFGDSACFTLSLLGHVYCKTDRLAKGSECYQKSLSLNPFLWSPFESLCEIGEKPDPDQTFKFTSLQNFSNCLPNSCTTQVPNHSLSHRQPETVLTETPQDTIELNRLNLESSNSKYSLNTDSSVSYIDSAVISPDTVPLGTGTSILSKQVQNKPKTGRSLLGGPAALSPLTPSFGILPLETPSPGDGSYLQNYTNTPPVIDVPSTGAPSKKSVARIGQTGTKSVFSQSGNSREVTPILAQTQSSGPQTSTTPQVLSPTITSPPNALPRRSSRLFTSDSSTTKENSKKLKMKFPPKIPNRKTKSKTNKGGITQPNINDSLEITKLDSSIISEGKISTITPQIQAFNLQKAAAEGLMSLLREMGKGYLALCSYNCKEAINILSHLPSHHYNTGWVLCQIGRAYFELSEYMQAERIFSEVRRIENYRVEGMEIYSTTLWHLQKDVALSVLSKDLTDMDKNSPEAWCAAGNCFSLQREHDIAIKFFQRAIQVDPNYAYAYTLLGHEFVLTEELDKALACFRNAIRVNPRHYNAWYGLGMIYYKQEKFSLAEMHFQKALDINPQSSVLLCHIGVVQHALKKSEKALDTLNKAIVIDPKNPLCKFHRASVLFANEKYKSALQELEELKQIVPKESLVYFLIGKVYKKLGQTHLALMNFSWAMDLDPKGANNQIKEAIDKRYLPDDEEPITQEEQIMGTDESQESSMTDADDTQLHAAESDEF

SEQ ID NO: 44519 - protein, 254 aa, Homo sapiens [sequence omitted]

SEQ ID NO: 44520 - protein, 139 aa, Homo sapiens
MMGILRDKESGICMDSGGFRTTASMVSVLPQDPTQPCVHFLTATPDPSRSVFKPFIFGMGVAQAPQVLSPTFGAQDPVRTLPRFQTQDRGQQLQQKQQDLEQEGLEATQGLLAGEWAPPLWELGSLFQAFVKRESQAYA

SEQ ID NO: 44521 - protein, 53 aa, Homo sapiens
MLSPRLTRTWREDLGFSPVSINLKKWDLMEGRGGNAEDVLLSRCHNSSPVRLI

SEQ ID NO: 44522 - protein, 144 aa, Homo sapiens
MVTMVSVLEDLIGKLTSLQLQHLFMILASPRYVDRVTEFLQQKLKQSQLLALKKELMVQKQQEALEEQAALEPKLDLLLEKTKELQKLIEADISKRQKTRLTGRWKATGRKRHLMVILALSMFSTRSCGDWPCGLSGENHRFSF

SEQ ID NO: 44523 - protein, 114 aa, Homo sapiens
MKEQMVFEKNVFNKTSRTESEIAFFGGMTIVYKNSIDLFLYVVGSSYENELMLMSVLTCLFESLNHMLSVILESDPQQVIQKVNFRADDGGLTEQSVAQVLQSAKEQIKWSLLK

SEQ ID NO: 44524 - protein, 140 aa, Homo sapiens
MKEQMVFEKNVFNKTSRTESEIAFFGGMTIVYKNSIDLFLYVVGSSYENELMLMSVLTCLFESLNHMLRKNVEKRWLLENMDGAFLVLDEIVDGGVILESDPQQVIQKVNFRADDGGLTEQSVAQVLQSAKEQIKWSLLK

SEQ ID NO: 44525 - protein, 236 aa, Homo sapiens
MFVVPDTVDMTKIHALITGPFDTPYEGGFFLFVFRCPPDYPIHPPRVKLMTTGNNTVRFNPNFYRNGKVCLSILGTWTGPAWSPAQSISSVLISIQSLMTENPYHNEPGFEQERHPGDSKNYNECIRHETIRVAVCDMMEGKCPCPEPLRGVMEKSFLEYYDFYEVACKDRLHLQGQTMQDPFGEKRGHFDYQSLLMRLGLIRQKVLERLHNENAEMDSDSSSSGTETDLHGSLRV

SEQ ID NO: 44526 - protein, 418 aa, Homo sapiens
MDGPRLLLLLLLGVSLGGAKEACPTGLYTHSGECCKACNLGEGVAQPCGANQTVCEPCLDSVTFSDVVSATEPCKPCTECVGLQSMSAPCVEADDAVCRCAYGYYQDETTGRCEACRVCEAGSGLVFSCQDKQNTVCEECPDGTYSDEANHVDPCLPCTVCEDTERQLRECTRWADAECEEIPGRWITRSTPPEGSDSTAPSTQEPEAPPEQDLIASTVAGVVTTVMGSSQPVVTRGTTDNLIPVYCSILAAVVVGLVAYIAFKRWNSCKQNKQGANSRPVNQTPPPEGEKLHSDSGISVDSQSLHDQQPHTQTASGQALKGDGGLYSSLPPAKREEVEKLLNGSAGDTWRHLAGELGYQPEHIDSFTHEACPVRALLASWATQDSATLDALLAALRRIQRADLVESLCSESTATSPV

SEQ ID NO: 44527 - protein, 455 aa, Homo sapiens
MSLKDSGSDLSHRPKRRRFHESYNFNMKCPTPGCNSLGHLTGKHERHFSISGCPLYHNLSADECKVRAQSRDKQIEERMLSHRQDDNNRHATRHQAPTERQLRYKEKVAELRKKRNSGLSKEQKEKYMEHRQTYGNTREPLLENLTSEYDLDLFRRAQARASEDLEKLRLQGQITEGSNMIKTIAFGRYELDTWYHSPYPEEYARLGRLYMCEFCLKYMKSQTILRRHMAKCVWKHPPGDEIYRKGSISVFEVDGKKNKIYCQNLCLLAKLFLDHKTLYYDVEPFLFYVMTEADNTGCHLIGYFSKEKNSFLNYNVSCILTMPQYMRQGYGKMLIDFSYLLSKVEEKVGSPERPLSDLGLISYRSYWKEVLLRYLHNFQGKEISIKEISQETAVNPVDIVSTLQALQMLKYWKGKHLVLKRQDLIDEWIAKEAKRSNSNKTMDPSCLKWTPPKGT

SEQ ID NO: 44528 - protein, 1037 aa, Homo sapiens
MLCALALMVAAGGCVVSAFNLDTRFLVVKEAGNPGSLFGYSVALHRQTERQQRYLLLAGAPRELAVPDGYTNRTGAVYLCPLTAHKDDCERMNITVKNDPGHHIIEDMWLGVTVASQGPAGRVLVCAHRYTQVLWSGSEDQRRMVGKCYVRGNDLELDSSDDWQTYHNEMCNSNTDYLETGMCQLGTSGGFTQNTVYFGAPGAYNWKGNSYMIQRKEWDLSEYSYKDPEDQGNLYIGYTMQVGSFILHPKNITIVTGAPRHRHMGAVFLLSQEAGGDLRRRQVLEGSQVGAYFGSAIALADLNNDGWQDLLVGAPYYFERKEEVGGAIYVFMNQAGTSFPAHPSLLLHGPSGSAFGLSVASIGDINQDGFQDIAVGAPFEGLGKVYIYHSSSKGLLRQPQQVIHGEKLGLPGLATFGYSLSGQMDVDENFYPDLLVGSLSDHIVLLRARPVINIVHKTLVPRPAVLDPALCTATSCVQVELCFAYNQSAGNPNYRRNITLAYTLEADRDRRPPRLRFAGSESAVFHGFFSMPEMRCQKLELLLMDNLRDKLRPIIISMNYSLPLRMPDRPRLGLRSLDAYPILNQAQALENHTEVQFQKECGPDNKCESNLQMRAAFVSEQQQKLSRLQYSRDVRKLLLSINVTNTRTSERSGEDAHEALLTLVVPPALLLSSVRPPGACQANETIFCELGNPFKRNQRMELLIAFEVIGVTLHTRDLQVQLQLSTSSHQDNLWPMILTLLVDYTLQTSLSMVNHRLQSFFGGTVMGESGMKTVEDVGSPLKYEFQVGPMGEGLVGLGTLVLGLEWPYEVSNGKWLLYPTEITVHGNGSWPCRPPGDLINPLNLTLSDPGDRPSSPQRRRRQLDPGGGQGPPPVTLAAAKKAKSETVLTCATGRAHCVWLECPIPDAPVVTNVTVKARVWNSTFIEDYRDFDRVRVNGWATLFLRTSIPTINMENKTTWFSVDIDSELVEELPAEIELWLVLVAVGAGLLLLGLIILLLWKCGFFKRARTRALYEAKRQKAEMKSQPSETERLTDDY

SEQ ID NO: 44529 - protein, 135 aa, Homo sapiens
MKEINLLPDRVLSTPSVQLVQSWYVQSLLDIMEFLDKDPEDHRTLSQFTDALVTIRNRHNDVVPTMAQGVLEYKDTYGDDPVSNQNIQYFLDRFYLSRISIRMLINQHSGCRPQRRGAGGGGGGAGAQGRAAEGT

SEQ ID NO: 44530 - protein, 816 aa, Homo sapiens
MKTEPRGPGGPLRSASPHRSAYEAGIQALKPPDAPGPDEAPKGAHHKKYGSNVHRIKSMFLQMGTTAGPSGEAGGGAGLAEAPRASERGVRLSLPRASSLNENVDHSALLKLGTSVSERVSRFDSKPAPSAQPAPPPHPPSRLQETRKLFERSAPAAAGGDKEAAARRLLRQERAGLQDRKLDVVVRFNGSTEALDKLDADAVSPTVSQLSAVFEKADSRTGLHRGPGLPRAAGVPQVNSKLVSKRSRVFQPPPPPPPAPSGDAPAEKERCPAGQQPPQHRVAPARPPPKPREVRKIKPVEVEESGESEAESAPGEVIQAEVTVHAALENGSTVATAASPAPEEPKAQAAPEKEAAAVAPPERGVGNGRAPDVAPEEVDESKKEDFSEADLVDVSAYSGLGEDSAGSALEEDDEDDEEDGEPPYEPESGCVEIPGLSEEEDPAPSRKIHFSTAPIQVFSTYSNEDYDRRNEDVDPMAASAEYELEKRVERLELFPVELEKDSEGLGISIIGMGAGADMGLEKLGIFVKTVTEGGAAHRDGRIQVNDLLVEVDGTSLVGVTQSFAASVLRNTKGRVRFMIGRERPGEQSEVAQLIQQTLEQERWQREMMEQRYAQYGEDDEETGEYATDEDEELSPTFPGGEMAIEVFELAENEDALSPVDMEPEKLVHKFKELQIKHAVTEAEIQQLKRKLQSLEQEKGRWRVEKAQLEQSVEENKERMEKLEGYWGEAQSLCQAVDEHLRETQAQYQALERKYSKAKRLIKDYQQKEIEFLKKETAQRRVLEESELARKEEMDKLLDKISELEGNLQTLRNSNST

SEQ ID NO: 44531 - protein, 201 aa, Homo sapiens [sequence omitted]

SEQ ID NO: 44532 - protein, 668 aa, Homo sapiens
MPKAVPRHCQLTGKMSPGIQWDESQAQQPMDGPPVRIAYMLVVHGRAIRQLKRLLKAVYHEQHFFYIHVDKRSDYLHREVVELAQGYDNVRVTPWRMVTIWGGASLLRMYLRSMRDLLEVPGWAWDFFINLSATDYPTRTNEELVAFLSKNRDKNFLKSHGRDNSRFIKKQGLDRLFHECDSHMWRLGERQIPAGIVVDGGSDWFVLTRSFVEYVVYTDDPLVAQLRQFYTYTLLPAESFFHTVLENSLACETLVDNNLRVTNWNRKLGCKCQYKHIVDWCGCSPNDFKPQDFLRLQQVSRPTFFARKFESTVNQEVLEILDFHLYGSYPPGTPALKAYWENTYDAADGPSGLSDVMLTAYTAFARLSLHHAATAAPPMGTPLCRFEPRGLPSSVHLYFYDDHFQGYLVTQAVQPSAQGPAETLEMWLMPQGSLKLLGRSDQASRLQSLEVGTDWDPKERLFRNFGGLLGPLDEPVAVQRWARGPNLTATVVWIDPTYVVATSYDITVDTETEVTQYKPPLSRPLRPGPWTVRLLQFWEPLGETRFLVLPLTFNRKLPLRKDDASWLHAGPPHNEYMEQSFQGLSSILNLPQPELAEEAAQRHTQLTGPALEAWTDRELSSFWSVAGLCAIGPSPCPSLEPCRLTSWSSLSPDPKSELGPVKADGRLR

SEQ ID NO: 44533 - protein, 609 aa, Homo sapiens
MLRLGRLCAGSSGVLGARAALSRSWQEARLQGVRFLSSREVDRMVSTPIGGLSYVQGCTKKHLNSKTVGQCLETTAQRVPEREALVVLHEDVRLTFAQLKEEVDKAASGLLSIGLCKGDRLGMWGPNSYAWVLMQLATAQAGIILVSVNPAYQAMELEYVLKKVGCKALVFPKQFKTQQYYNVLKQICPEVENAQPGALKSQRLPDLTTVISVDAPLPGTLLLDEVVAAGSTRQHLDQLQYNQQFLSCHDPINIQFTSGTTGSPKGATLSHYNIVNNSNILGERLKLHEKTPEQLRMILPNPLYHCLGSVAGTMMCLMYGATLILASPIFNGKKALEAISRERGTFLYGTPTMFVDILNQPDFSSYDISTMCGGVIAGSPAPPELIRAIINKINMKDLVVAYGTTENSPVTFAHFPEDTVEQKAESVGRIMPHTEARIMNMEAGTLAKLNTPGELCIRGYCVMLGYWGEPQKTEEAVDQDKWYWTGDVATMNEQGFCKIVGRSKDMIIRGGENIYPAELEDFFHTHPKVQEVQVVGVKDDRMGEEICACIRLKDGEETTVEEIKAFCKGKISHFKIPKYIVFVTNYPLTISGKIQKFKLREQMERHLNL

SEQ ID NO: 44534 - protein, 671 aa, Homo sapiens [sequence omitted]

SEQ ID NO: 44535 - protein, 421 aa, Homo sapiens [sequence omitted]

SEQ ID NO: 44536 - protein, 206 aa, Homo sapiens
MPISDPASSVSSSPSPPFGHSAAVSPTFMPRSTQPLTFTTATFAATKFGSTKMKNSGRSNKVARTSPINLGLNVNDLLKQKAISSSMHSLYGLGLGSQQQPQQQQQPAQPPPPPPPPQQQQQQKTSALSPNAKEFIFPNMQGQGSSTNGMFPGDSPLNLSPLQYSNAFDVFAAYGGLNEKSFVDGLNFSLNNMQYSNQQFQPVMAN

SEQ ID NO: 44537 - protein, 570 aa, Homo sapiens
MVGVRDAFYSKTKRFCSVSCSRSYSSNSKKASILARLQGKPPTKKAKVLQKQPLVAKLAAYAQYQATLQNQAKTKAAVSMEGFSWGNYINSNSFIAAPVTCFKHAPMGTCWGDISENVRVEVPNTDCSLPTKVFWIAGIVKLAGYNALLRYEGFENDSGLDFWCNICGSDIHPVGWCAASGKPLVPPRTIQHKYTNWKAFLVKRLTGAKTLPPDFSQKVSESMQYPFKPCMRVEVVDKRHLCRTRVAVVESVIGGRLRLVYEESEDRTDDFWCHMHSPLIHHIGWSRSIGHRFKRSDITKKQDGHFDTPPHLFAKVKEVDQSGEWFKEGMKLEAIDPLNLSTICVATIRKVLADGFLMIGIDGSEAADGSDWFCYHATSPSIFPVGFCEINMIELTPPRGYTKLPFKWFDYLRETGSIAAPVKLFNKDVPNHGFRVGMKLEAVDLMEPRLICVATVTRIIHRLLRIHFDGWEEEYDQWVDCESPDLYPVGWCQLTGYQLQPPASQSSRENQSASSKQKKKAKSQQYKGHKKMTTLQLKEELLDGEDYNFLQGASDQESNGSANFYIKQEP

SEQ ID NO: 44538 - protein, 548 aa, Homo sapiens [sequence omitted]

SEQ ID NO: 44539 - protein, 89 aa, Homo sapiens
MVPVKDRIIKISFNADVHASLQWNFRPQQTEIYVVPGETALAFYRAKNPTDKPVIGISTYNIVPFEAGQYFNKIQVHQSVNFTEYDKDT

SEQ ID NO: 44540 - protein, 248 aa, Homo sapiens
MSSSTPECAAGFLKTVGLFAGRGRPGPGLSSQTAGAAGWRRSGSNGGGQAPGASPSVSLPASLGRGWGREENLFSWKGAKGRGMRGRGRGRGHPVSCVVNRSTDNQRQQQLNDVVKNSSTIIQNPVETPKKDYSLLPLLAAAPQVGEKIAFKLLELTSSYSPDVSDYKEGRILSHNPETQQVDIEILSSLPALREPGKFDLVYHNENGAEVVEYAVTQESKITVFWKELIDPRLIIESPSNTSSTEPA

SEQ ID NO: 44541 - protein, 402 aa, Homo sapiens
MFWWLYYATNSCKNFSELPLVMWLQGGPGGSSTGFGNFEEIGPLDSDLKPRKTTWLQAASLLFVDNPVGTGFSYVNGSGAYAKDLAMVASDMMVLLKTFFSCHKEFQTVPFYIFSESYGGKMAAGIGLELYKAIQRGTIKCNFAGVALGDSWISPVDSVLSWGPYLYSMSLLEDKGLAEVSKVAEQVLNAVNKGLYREATELWGKAEMIIEQNTDGVNFYNILTKSTPTSTMESSLEFTQSHLVCLCQRHVRHLQRDALSQLMNGPIRKKLKIIPEDQSWGGQATNVFVNMEEDFMKPVISIVDELLEAGINVTVYNGQLDLIVDTMGQEAWVRKLKWPELPKFSQLKWKALYSDPKSLETSAFVKSYKNLAFYWILKAGHMVPSDQGDMALKMMRLVTQQE

SEQ ID NO: 44542 - protein, 787 aa, Homo sapiens
MRLRPGTRRDDSTKLELALTGGEAKSIPLECPLSSPKGVLFSSKSAEVCKQDSPFSRVPRKVQPGYPVVPAEKRSSGERARETGGAEGTGDAVLGEKVLEEALLSREHVLELENSKGPSLASLEGEEDKGKSSSSQVVGPVQEEEYVAEKLPSRFIESAHTELAKDDAAPAPPVADAKAQDRGVEGELGNEESLDRNEEGLDRNEEGLDRNEESLDRNEEGLDRNEEIKRAAFQIISQVISEATEQVLATTVGKVAGRVCQASQLQGQKEESCVPVHQKTVLGPDTAEPATAEAAVAPPDAGLPLPGLPAEGSPPPKTYVSCLKSLLSSPTKDSKPNISAHHISLASCLALTTPSEELPDRAGILVEDATCVTCMSDSSQSVPLVASPGHCSDSFSTSGLEDSCTETSSSPRDKAITPPLPESTVPFSNGVLKGELSDLGAEDGWTMDAEADHSGGSDRNSMDSVDSCCSLKKTESFQNAQAGSNPKKVDLIIWEIEVPKHLVGRLIGKQGRYVSFLKQTSGAKIYISTLPYTQSVQICHIEGSQHHVDKALNLIGKKFKELNLTNIYAPPLPSLALPSLPMTSWLMLPDGITVEVIVVNQVNAGHLFVQQHTHPTFHALRSLDQQMYLCYSQPGIPTLPTPVEITVICAAPGADGAWWRAQVVASYEETNEVEIRYVDYGGYKRVKVDVLRQIRSDFVTLPFQGAEVLLDSVMPLSDDDQFSPEADAAMSEMTGNTALLAQVTSYSPTGLPLIQLWSVVGDEVVLINRSLVERGLAQWVDSYYTSL

SEQ ID NO: 44543 - protein, 187 aa, Homo sapiens
MFDKTTNRHRGFGFVTFENEDVVEKVCEIHFHEINNKMVECKKAQPKEVMFPPGTRGRARGLPYTMDAFMLGMGMLGYPNFVATYGRGYPGFAPSYGYQFPGFPAAAYGPVAAAAVAAARGSGSNPARPGGFPGANSPGPVADLYGPASQDSGVGNYISAASPQPGSGFGHGIAGPLIATAFTNGYH

SEQ ID NO: 44544 - protein, 336 aa, Homo sapiens [sequence omitted]

SEQ ID NO: 44545 - protein, 81 aa, Homo sapiens
MTYAVRKLDNTKFRSHEGETAYIRVKVDGPRSPSYGRSRSRSRSRSRSRSRSNSRSRSYSPRRSRGSPRYSPRHSRSRSRT

SEQ ID NO: 44546 - protein, 259 aa, Homo sapiens
MKTTEICGAPGVGKTQLCMQLAVDVQIPECFGGVAGEAVFIDTEGSFMVDRVVDLATACIQHLQLIAEKHKGEEHRKALEDFTLDNILSHIYYFRCRDYTELLAQVYLLPDFLSEHSKVRLVIVDGIAFPFRHDLDDLSLRTRLLNGLAQQMISLANNHRLAVILTNQMTTKIDRNQALLVPALGESWGHAATIRLIFHWDRKQRLATLYKSPSQKECTVLFQIKPQGFRDTVVTSACSLQTEGSLSTRKRSRDPEEEL

SEQ ID NO: 44547 - protein, 771 aa, Homo sapiens
MELISLVQEVERNVEAVRNAKDERVREIRNAVEMMIARLDTQLKNKLITLMGQKTSLTQETELLESLLQEVEHQLRSCSKSELISKSSEILMMFQQVHRKPMASFVTTPVPPDFTSELVPSYDSATFVLENFSTLRQRADPVYSPPLQVSGLCWRLKVYPDGNGVVRGYYLSVFLELSAGLPETSKYEYRVEMVHQSCNDPTKNIIREFASDFEVGECWGYNRFFRLDLLANEGYLNPQNDTVILRFQVRSPTFFQKSRDQHWYITQLEAAQTSYIQQINNLKERLTIELSRTQKSRDLSPPDNHLSPQNDDALETRAKKSACSDMLLEGGPTTASVREAKEDEEDEEKIQNEDYHHELSDGDLDLDLVYEDEVNQLDGSSSSASSTATSNTEENDIDEETMSGENDVEYNNMELEEGELMEDAAAAGPAGSSHGYVGSSSRISRRTHLCSAATSSLLDIDPLILIHLLDLKDRSSIENLWGLQPRPPASLLQPTASYSRKDKDQRKQQAMWRVPSDLKMLKRLKTQMAEVRCMKTDVKNTLSEIKSSSAASGDMQTSLFSADQAALAACGTENSGRLQDLGMELLAKSSVANCYIRNSTNKKSNSPKPARSSVAGSLSLRRAVDPGENSRSKGDCQTLSEGSPGSSQSGSRHSSPRALIHGSIGDILPKTEDRQCKALDSDAVVVAVFSGLPAVEKRRKMVTLGANAKGGHLEGLQMTDLENNSETGELQPVLPEGASAAPEEDTHSSFPDGEQIGPEDLSFNTDENSGR

SEQ ID NO: 44548 - protein, 116 aa, Homo sapiens
MTRSKTFQAYLPSCHRTYSCIHCRAHLANHDELISKSFQGSQGRAYLFNSVVNVGCGPAEERVLLTGLHAVADIYCENCKTTLGWKYEHAFESSQKYKEGKYIIELAHMIKDNGWD

SEQ ID NO: 44549 - protein, 502 aa, Homo sapiens
MAGVFDIDLDQPEDAGSEDELEEGGQLNESMDHGGVGPYELGMEHCEKFEISETSVNRGPEKIRPECFELLRVLGKGGYGKVFQVRKVTGANTGKIFAMKVLKKAMIVRNAKDTAHTKAERNILEEVKHPFIVDLIYAFQTGGKLYLILEYLSGGELFMQLEREGIFMEDTACFYLAEISMALGHLHQKGIIYRDLKPENIMLNHQGHVKLTDFGLCKESIHDGTVTHTFCGTIEYMAPEILMRSGHNRAVDWWSLGALMYDMLTGAPPFTGENRKKTIDKILKCKLNLPPYLTQEARDLLKKLLKRNAASRLGAGPGDAGEVQAHPFFRHINWEELLARKVEPPFKPLLQSEEDVSQFDSKFTRQTPVDSPDDSTLSESANQVFLGFTYVAPSVLESVKEKFSFEPKIRSPRRFIGSPRTPVSPVKFSPGDFWGRGASASTANPQTPVEYPMETSGIEQMDVTMSGEASAPLPIRQPNSGPYKKQAFPMISKRPEHLRMNL

SEQ ID NO: 44550 - protein, 159 aa, Homo sapiens
MPFKSKGYWYMLLEELCQYYRTFVPIPVWFRYLISYGEFGNVTRWSLGILLALLYLILKLLEFFGHLRTFRQVLRIFFTQPSYGVAASKRQCSDVDDICSICQAEFQKPILLICQHIFCEECMTLWFNREKTCPLCRTVISDHINKWKDGATSSHLQIY

SEQ ID NO: 44551 - protein, 1292 aa, Homo sapiens
MDLSDIVEGILNAHDTTKMGHLTLEDYQIWSVKNVLANEFLNLLFQVCHIVLGLRPATPEEEGQIIRGWLERESRYGLQAGHNWFIISMQWWQQWKEYVKYDANPVVIEPSSVLNGGKYSFGTAAHPMEQVEDRIGSSLSYVNTTEEKFSDNISTASEASETAGSGFLYSATPGADVCFARQHNTSDNNNQCLLGANGNILLHLNPQKPGAIDNQPLVTQEPVKATSLTLEGGRLKRTPQLIHGRDYEMVPEPVWRALYHWYGANLALPRPVIKNSKTDIPELELFPRYLLFLRQQPATRTQQSNIWVNMGNVPSPNAPLKRVLAYTGCFSRMQTIKEIHEYLSQRLRIKEEDMRLWLYNSENYLTLLDDEDHKLEYLKIQDEQHLVIEVRNKDMSWPEEMSFIANSSKIDRHKVPTEKGATGLSNLGNTCFMNSSIQCVSNTQPLTQYFISGRHLYELNRTNPIGMKGHMAKCYGDLVQELWSGTQKNVAPLKLRWTIAKYAPRFNGFQQQDSQELLAFLLDGLHEDLNRVHEKPYVELKDSDGRPDWEVAAEAWDNHLRRNRSIVVDLFHGQLRSQVKCKTCGHISVRFDPFNFLSLPLPMDSYMHLEITVIKLDGTTPVRYGLRLNMDEKYTGLKKQLSDLCGLNSEQILLAEVHGSNIKNFPQDNQKVRLSVSGFLCAFEIPVPVSPISASSPTQTDFSSSPSTNEMFTLTTNGDLPRPIFIPNGMPNTVVPCGTEKNFTNGMVNGHMPSLPDSPFTGYIIAVHRKMMRTELYFLSSQKNRPSLFGMPLIVPCTVHTRKKDLYDAVWIQVSRLASPLPPQEASNHAQDCDDSMGYQYPFTLRVVQKDGNSCAWCPWYRFCRGCKIDCGEDRAFIGNAYIAVDWDPTALHLRYQTSQERVVDEHESVEQSRRAQAEPINLDSCLRAFTSEEELGENEMYYCSKCKTHCLATKKLDLWRLPPILIIHLKRFQFVNGRWIKSQKIVKFPRESFDPSAFLVPRDPALCQHKPLTPQGDELSEPRILAREVKKVDAQSSAGEEDVLLSKSPSSLSANIISSPKGSPSSSRKSGTSCPSSKNSSPNSSPRTLGRSKGRLRLPQIGSKNKLSSSKENLDASKENGAGQICELADALSRGHVLGGSQPELVTPQDHEVALANGFLYEHEACGNGYSNGQLGNHSEEDSTDDQREDTRIKPIYNLYAISCHSGILGGGHYVTYAKNPNCKWYCYNDSSCKELHPDEIDTDSAYILFYEQQGIDYAQFLPKTDGKKMADTSSMDEDFESDYKKYCVLQ

SEQ ID NO: 44552 - protein, 499 aa, Homo sapiens
MDHGVKVASVLAYSFSRRCSYIAESDAAVKEKAIQVGFVLGGFLSDAGWYSDAEKVFLSCLQLCTLHDEMLHWFRAVECCVRLLHVRNGNCKYHLGEETFKLAQTYMDKLSKHGQQANKAALYGELCALLFAKSHYDEAYKWCIEAMKEITAGLPVKVVVDVLRQASKACVVKREFKKAEQLIKHAVYLARDHFGSKHPKYSDTLLDYGFYLLNVDNICQSVAIYQAALDIRQSVFGGKNIHVATAHEDLAYSSYVHQYSSGKFDNALFHAERAIGIITHILPEDHLLLASSKRVKALILEEIAIDCHNKETEQRLLQEAHDLHLSSLQLAKKAFGEFNVQTAKHYGNLGRLYQSMRKFKEAEEMHIKAIQIKEQLLGQEDYEVALSVGHLASLYNYDMNQYENAEKLYLRSIAIGKKLFGEGYSGLEYDYRGLIKLYNSIGNYEKVFEYHNVLSNWNRLRDRQYSVTDALEDVSTSPQSTEEVVQSFLISQNVEGPSC

SEQ ID NO: 44553 - protein, 585 aa, Homo sapiens [sequence omitted]

SEQ ID NO: 44554 - protein, 881 aa, Homo sapiens
MESVVTFLQDVVPQAYSGTPLTEEKEKIVWVRFENADLNDTSRNLEFHEIHSTGNEPPLLIMIGYSDGMQVWSIPISGEAQELFSVRHGPIRAARILPAPQFGAQKCDNFAEKRPLLGVCKSIGSSGTSPPYCCVDLYSLRTGEMVKSIQFKTPIYDLHCNKRILVVVLQEKIAAFDSCTFTKKFFVTSCYPCPGPNMNPIALGSRWLAYAENKLIRCHQSRGGACGDNIQSYTATVISAAKTLKSGLTMVGKVVTQLTGTLPSGVTEDDVAIHSNSRRSPLVPGIITVIDTETVGEGQVLVSEDSDSDGIVAHFPAHEKPVCCMAFNTSGMLLVTTDTLGHDFHVFQILTHPWSSSQCAVHHLYTLHRGETEAKVQDICFSHDCRWVVVSTLRGTSHVFPINPYGGQPCVRTHMSPRVVNRMSRFQKSAGLEEIEQELTSKQGGRCSPVPGLSSSPSGSPLHGKLNSQDSYNNFTNNNPGNPRLSPLPSLMVVMPLAQIKQPMTLGTITKRTGKVKPPPQISPSKSMGGEFCVAAIFGTSRSWFANNAGLKREKDQSKQVVVESLYIISCYGTLVEHMMEPRPLSTAPKISDDTPLEMMTSPRASWTLVRTPQWNELQPPFNANHPLLLAADAVQYYQFLLAGLVPPGSPGPITRHGSYDSLASDHSGQEDEEWLSQVEIVTHTGPHRRLWMGPQFQFKTIHPSGQTTVISSSSSVLQSHGPSDTPQPLLDFDTDDLDLNSLRIQPVRSDPVSMPGSSRPVSDRRGVSTVIDAASGTFDRSVTLLEVCGSWPEGFGLRHMSSMEHTEEGLRERLADAMAESPSRDVVGSGTELQREGSIETLSNSSGSTSGSIPRNFDGYRSPLPTNESQPLSLFPTGFP

SEQ ID NO: 44555 - protein, 687 aa, Homo sapiens
MSAFLAAAQPSFFPALALPPGALAKPLPDPGLAGAAAAAAAAAAAAEAGLHVSALGPHPPAAHLRSLKSLEPEDEVEDDPKVTLEAKELWDQFHKLGTEMVITKSGRRMFPPFKVRVSGLDKKAKYILLMDIVAADDCRYKFHNSRWMVAGKADPEMPKRMYIHPDSPATGEQWMAKPVAFHKLKLTNNISDKHGFTILNSMHKYQPRFHIVRANDILKLPYSTFRTYVFPETDFIAVTAYQNDKITQLKIDNNPFAKGFRDTGNGRREKRKQLTLPSLRLYEEHCKPERDGAESDASSCDPPPAREPPTSPGAAPSPLRLHRARAEEKSCAADSDPEPERLSEERAGAPLGRSPAPDSASPTRLTEPERARERRSPERGKEPAESGGDGPFGLRSLEKERAEARRKDEGRKEAAEGKEQGLAPLVVQTDSASPLGAGHLPGLAFSSHLHGQQFFGPLGAGQPLFLHPGQFTMGPGAFSAMGMGHLLASVAGGGNGGGGGPGTAAGLDAGGLGPAASAASTAAPFPFHLSQHMLASQGIPMPTFGGLFPYPYTYMAAAAAAASALPATSAAAAAAAAAGSLSRSPFLGSARPRLRFSPYQIPVTIPPSTSLLTTGLASEGSKAAGGNSREPSPLPELALRKVGAPSRGALSPSGSAKEAANELQSIQRLVSGLESQRALSPGRESPK

SEQ ID NO: 44556 - protein, 1918 aa, Homo sapiens
MDWEDDSLAAVEVLVAGVRMIYPACFVLVPQSDIPTPSPVGSTHCSSSCLGVHQVPASTRDPAMSSVTLTPPTSPEEVQTVDPQSVQKWVKFSSVSDGFNSDSTSHHGGKIPRKLANHVVDRVWQECNMNRAQNKRKYSASSGGLCEEATAAKVASWDFVEATQRTNCSCLRHKNLKSRNAGQQGQAPSLGQQQQILPKHKTNEKQEKSEKPQKRPLTPFHHRVSVSDDVGMDADSASQRLVISAPDSQVRFSNIRTNDVAKTPQMHGTEMANSPQPPPLSPHPCDVVDEGVTKTPSTPQSQHFYQMPTPDPLVPSKPMEDRIDSLSQSFPPQYQEAVEPTVYVGTAVNLEEDEANIAWKYYKFPKKKDVEFLPPQLPSDKFKDDPVGPFGQESVTSVTELMVQCKKPLKVSDELVQQYQIKNQCLSAIASDAEQEPKIDPYAFVEGDEEFLFPDKKDRQNSEREAGKKHKVEDGTSSVTVLSHEEDAMSLFSPSIKQDAPRPTSHARPPSTSLIYDSDLAVSYTDLDNLFNSDEDELTPGSKKSANGSDDKASCKESKTGNLDPLSCISTADLHKMYPTPPSLEQHIMGFSPMNMNNKEYGSMDTTPGGTVLEGNSSSIGAQFKIEVDEGFCSPKPSEIKDFSYVYKPENCQILVGCSMFAPLKTLPSQYLPPIKLPEECIYRQSWTVGKLELLSSGPSMPFIKEGDGSNMDQEYGTAYTPQTHTSFGMPPSSAPPSNSGAGILPSPSTPRFPTPRTPRTPRTPRGAGGPASAQGSVKYENSDLYSPASTPSTCRPLNSVEPATVPSIPEAHSLYVNLILSESVMNLFKDCNFDSCCICVCNMNIKGADVGVYIPDPTQEAQYRCTCGFSAVMNRKFGNNSGLFLEDELDIIGRNTDCGKEAEKRFEALRATSAEHVNGGLKESEKLSDDLILLLQDQCTNLFSPFGAADQDPFPKSGVISNWVRVEERDCCNDCYLALEHGRQFMDNMSGGKVDEALVKSSCLHPWSKRNDVSMQCSQDILRMLLSLQPVLQDAIQKKRTVRPWGVQGPLTWQQFHKMAGRGSYGTDESPEPLPIPTFLLGYDYDYLVLSPFALPYWERLMLEPYGSQRDIAYVVLCPENEALLNGAKSFFRDLTAIYESCRLGQHRPVSRLLTDGIMRVGSTASKKLSEKLVAEWFSQAADGNNEAFSKLKLYAQVCRYDLGPYLASLPLDSSLLSQPNLVAPTSQSLITPPQMTNTGNANTPSATLASAASSTMTVTSGVAISTSVATANSTLTTASTSSSSSSNLNSGVSSNKLPSFPPFGSMNSNAAGSMSTQANTVQSGQLGGQQTSALQTAGISGESSSLPTQPHPDVSESTMDRDKVGIPTDGDSHAVTYPPAIVVYIIDPFTYENTDESTNSSSVWTLGLLRCFLEMVQTLPPHIKSTVSVQIIPCQYLLQPVKHEDREIYPQHLKSLAFSAFTQCRRPLPTSTNVKTLTGFGPGLAMETALRSPDRPECIRLYAPPFILAPVKDKQTELGETFGEAGQKYNVLFVGYCLSHDQRWILASCTDLYGELLETCIINIDVPNRARRKKSSARKFGLQKLWEWCLGLVQMSSLPWRVVIGRLGRIGHGELKDWSCLLSRRNLQSLSKRLKDMCRMCGISAADSPSILSACLVAMEPQGSFVIMPDSVSTGSVFGRSTTLNMQTSQLNTPQDTSCTHILVFPTSASVQVASATYTTENLDLAFNPNNDGADGMGIFDLLDTGDDLDPDIINILPASPTGSPVHSPGSHYPHGGDAGKGQSTDRLLSTEPHEEVPNILQQPLALGYFVSTAKAGPLPDWFWSACPQAQYQCPLFLKASLHLHVPSVQSDELLHSKHSHPLDSNQTSDVLRFVLEQYNALSWLTCDPATQDRRSCLPIHFVVLNQLYNFIMNML

SEQ ID NO: 44557 - protein, 771 aa, Homo sapiens
MEELHSLDPRRQELLEARFTGVGVSKGPLNSESSNQSLCSVGSLSDKEVETPEKKQNDQRNRKRKAEPYETSQGKGTPRGHKISDYFEFAGGSAPGTSPGRSVPPVARSSPQHSLSNPLPRRVEQPLYGLDGSAAKEATEEQSALPTLMSVMLAKPRLDTEQLAQRGAGLCFTFVSAQQNSPSSTGSGNTEHSCSSQKQISIQHRQTQSDLTIEKISALENSKNSDLEKKEGRIDDLLRANCDLRRQIDEQQKMLEKYKERLNRCVTMSKKLLIEKSKQEKMACRDKSMQDRLRLGHFTTVRHGASFTEQWTDGYAFQNLIKQQERINSQREEIERQRKMLAKRKPPAMGQAPPATNEQKQRKSKTNGAENETPSSGNTELKDTAPALGAHSLLRLTLAEYHEQEEIFKLRLGHLKKEEAEIQAELERLERVRNLHIRELKRIHNEDNSQFKDHPTLNDRYLLLHLLGRGGFSEVYKAFDLTEQRYVAVKIHQLNKNWRDEKKENYHKHACREYRIHKELDHPRIVKLYDYFSLDTDSFCTVLEYCEGNDLDFYLKQHKLMSEKEARSIIMQIVNALKYLNEIKPPIIHYDLKPGNILLVNGTACGEIKITDFGLSKIMDDDSYNSVDGMELTSQGAGTYWYLPPECFVVGKEPPKISNKVDVWSVGVIFYQCLYGRKPFGHNQSQQDILQENTILKATEVQFPPKPVVTPEAKAFIRRCLAYRKEDRIDVQQLACDPYLLPHIRKSVSTSSPAGAAIASTSGASNNSSSN

SEQ ID NO: 44558 - protein, 717 aa, Homo sapiens [sequence omitted]

SEQ ID NO: 44559 - protein, 647 aa, Homo sapiens
MNDLVALQMNRRHRMPGYETMKNKDTGHSNRQKKHNSSSSALLNSPTVTTSSCAGASEKKKFLSDVRIKFEHNGERRIIAFSRPVKYEDVEHKVTTVFGQPLDLHYMNNELSILLKNQDDLDKAIDILDRSSSMKSLRILLLSQDRNHNSSSPHSGVSRQVRIKASQSAGDINTIYQPPEPRSRHLSVSSQNPGRSSPPPGYVPERQQHIARQGSYTSINSEGEFIPETSEQCMLDPLSSAENSLSGSCQSLDRSADSPSFRKSRMSRAQSFPDNRQEYSDRETQLYDKGVKGGTYPRRYHVSVHHKDYSDGRRTFPRIRRHQGNLFTLVPSSRSLSTNGENMGLAVQYLDPRGRLRSADSENALSVQERNVPTKSPSAPINWRRGKLLGQGAFGRVYLCYDVDTGRELASKQVQFDPDSPETSKEVSALECEIQLLKNLQHERIVQYYGCLRDRAEKTLTIFMEYMPGGSVKDQLKAYGALTESVTRKYTRQILEGMSYLHSNMIVHRDIKGANILRDSAGNVKLGDFGASKRLQTICMSGTGMRSVTGTPYWMSPEVISGEGYGRKADVWSLGCTVVEMLTEKPPWAEYEAMAAIFKIATQPTNPQLPSHISEHGRDFLRRIFVEARQRPSAEELLTHHFAQLMY

SEQ ID NO: 44560 - protein, 616 aa, Homo sapiens
MNDLVALQMNRRHRMPGYETMKNKDTGHSNRQSDVRIKFEHNGERRIIAFSRPVKYEDVEHKVTTVFGQPLDLHYMNNELSILLKNQDDLDKAIDILDRSSSMKSLRILLLSQDRNHNSSSPHSGVSRQVRIKASQSAGDINTIYQPPEPRSRHLSVSSQNPGRSSPPPGYVPERQQHIARQGSYTSINSEGEFIPETSEQCMLDPLSSAENSLSGSCQSLDRSADSPSFRKSRMSRAQSFPDNRQEYSDRETQLYDKGVKGGTYPRRYHVSVHHKDYSDGRRTFPRIRRHQGNLFTLVPSSRSLSTNGENMGLAVQYLDPRGRLRSADSENALSVQERNVPTKSPSAPINWRRGKLLGQGAFGRVYLCYDVDTGRELASKQVQFDPDSPETSKEVSALECEIQLLKNLQHERIVQYYGCLRDRAEKTLTIFMEYMPGGSVKDQLKAYGALTESVTRKYTRQILEGMSYLHSNMIVHRDIKGANILRDSAGNVKLGDFGASKRLQTICMSGTGMRSVTGTPYWMSPEVISGEGYGRKADVWSLGCTVVEMLTEKPPWAEYEAMAAIFKIATQPTNPQLPSHISEHGRDFLRRIFVEARQRPSAEELLTHHFAQLMY

SEQ ID NO: 44561 - protein, 612 aa, Homo sapiens
MNDLVALQMNRRHRMPGYETMKNKDTGHSNRQSDVRIKFEHNGERRIIAFSRPVKYEDVEHKVTTVFGQPLDLHYMNNELSILLKNQDDLDKAIDILDRSSSMKSLRILLLSQDRNHNSSSPHSGVSRQVRIKASQSAGDINTIYQPPEPRSRHLSVSSQNPGRSSPPPGYVPERQQHIARQGSYTSINSEGEFIPETSEQCMLDPLSSAENSLSGSCQSLDSPSFRKSRMSRAQSFPDNRQEYSDRETQLYDKGVKGGTYPRRYHVSVHHKDYSDGRRTFPRIRRHQGNLFTLVPSSRSLSTNGENMGLAVQYLDPRGRLRSADSENALSVQERNVPTKSPSAPINWRRGKLLGQGAFGRVYLCYDVDTGRELASKQVQFDPDSPETSKEVSALECEIQLLKNLQHERIVQYYGCLRDRAEKTLTIFMEYMPGGSVKDQLKAYGALTESVTRKYTRQILEGMSYLHSNMIVHRDIKGANILRDSAGNVKLGDFGASKRLQTICMSGTGMRSVTGTPYWMSPEVISGEGYGRKADVWSLGCTVVEMLTEKPPWAEYEAMAAIFKIATQPTNPQLPSHISEHGRDFLRRIFVEARQRPSAEELLTHHFAQLMY

SEQ ID NO: 44562 - protein, 643 aa, Homo sapiens
MNDLVALQMNRRHRMPGYETMKNKDTGHSNRQKKHNSSSSALLNSPTVTTSSCAGASEKKKFLSDVRIKFEHNGERRIIAFSRPVKYEDVEHKVTTVFGQPLDLHYMNNELSILLKNQDDLDKAIDILDRSSSMKSLRILLLSQDRNHNSSSPHSGVSRQVRIKASQSAGDINTIYQPPEPRSRHLSVSSQNPGRSSPPPGYVPERQQHIARQGSYTSINSEGEFIPETSEQCMLDPLSSAENSLSGSCQSLDSPSFRKSRMSRAQSFPDNRQEYSDRETQLYDKGVKGGTYPRRYHVSVHHKDYSDGRRTFPRIRRHQGNLFTLVPSSRSLSTNGENMGLAVQYLDPRGRLRSADSENALSVQERNVPTKSPSAPINWRRGKLLGQGAFGRVYLCYDVDTGRELASKQVQFDPDSPETSKEVSALECEIQLLKNLQHERIVQYYGCLRDRAEKTLTIFMEYMPGGSVKDQLKAYGALTESVTRKYTRQILEGMSYLHSNMIVHRDIKGANILRDSAGNVKLGDFGASKRLQTICMSGTGMRSVTGTPYWMSPEVISGEGYGRKADVWSLGCTVVEMLTEKPPWAEYEAMAAIFKIATQPTNPQLPSHISEHGRDFLRRIFVEARQRPSAEELLTHHFAQLMY

SEQ ID NO: 44563 - protein, 342 aa, Homo sapiens [sequence omitted]

SEQ ID NO: 44564 - protein, 327 aa, Homo sapiens
MDKKKVLVKVHPEGKFVVDVDKNIDINDVTPNCRVALRNDSYTLHKILPNKVDPLVSLMMVEKVPDSTYEMIGGLDKQIKEIKEVIELPVKHPELFEALGIAQPKGVLLYGPPGTGKTLLARAVAHHTDCTFIRVSGSELVQKFIGEGARMVRELFVMAREHAPSIIFMDEIDSIGSSRLEGGSGGDSEVQRTMLELLNQLDGFEATKNIKVIMATNRIDILDSALLRPGRIDRKIEFPPPNEEARLDILKIHSRKMNLTRGINLRKIAELMPGASGAEVKGVCTEAGMYALRERRVHVTQEDFEMAVAKVMQKDSEKNMSIKKLWK

SEQ ID NO: 44565 - protein, 496 aa, Homo sapiens
MLPGPALRGPGPAGGVGGPGAAAFRPMGPAGPAAQYQRPGMSPGNRMPMAGLQVGPPAGSPFGAAAPLRPGMPPTMMDPFRKRLLVPQAQPPMPAQRRGLKRRKMADKVLPQRIRELVPESQAYMDLLAFERKLDQTIARKRMEIQEAIKKPLTQKRKLRIYISNTFSPSKAEGDSAGTAGTPGGTPAGDKVASWELRVEGKLLDDPSKQKRKFSSFFKSLVIELDKELYGPDNHLVEWHRMPTTQETDGFQVKRPGDLNVKCTLLLMLDHQPPQYKLDPRLARLLGVHTQTRAAIMQALWLYIKHNQLQDGHEREYINCNRYFRQIFSCGRLRFSEIPMKLAGLLQHPDPIVINHVISVDPNDQKKTACYDIDVEVDDPLKAQMSNFLASTTNQQEIASLDVKIHETIESINQLKTQRDFMLSFSTDPQDFIQEWLRSQRRDLKIITDVIGNPEEERRAAFYHQPWAQEAVGRHIFAKVQQRRQELEQVLGIRLT

SEQ ID NO: 44566 - protein, 383 aa, Homo sapiens
MRRKPPYRSHSLSPSPVNKHKQFHLERKRQRKPRETDVRQFQAQAFTEAFERELRRHKVQENIGPLRIHEKEEETEKIYRGEAVRKGTPECSQPWKIYSRKTTTQSLRGGLPKPNKAVPMKVSEHSLLPLMLEQFPFLYVSGPTLSKMWKQQIAQVEQLKKEACRENRSKKKLQDEIEEALRRHDLLTTLVKKEYEHNKRLQDFKDCIRRQRLTQSKIKENRQQIVRARKYYDDYRVQLCAKMMRMRTREEMIFKKLFEEGLNIQKQRLRDLRNYAKEKRDEQRRRHQDELDSMENYYKDQFSLLAEAISQEHQELKAREKSQAQTLHKVKRELRSKMEKEIQQLQDMITQNDDDVFFRELEAERFRSRLQLASFQYSKSPSL

SEQ ID NO: 44567 - protein, 543 aa, Homo sapiens
MKCDTCDMNVHKQCVINVPSLCGMDHTEKRGRIYLKAEVADEKLHVTVRDAKNLIPMDPNGLSDPYVKLKLIPDPKNESKQKTKTIRSTLNPQWNESFTFKLKPSDKDRRLSVEIWDWDRTTRNDFMGSLSFGVSELMKMPASGWYKLLNQEEGEYYNVPIPEGDEEGNMELRQKFEKAKLGPAGNKVISPSEDRKQPSNNLDRVKLTDFNFLMVLGKGSFGKVMLADRKGTEELYAIKILKKDVVIQDDDVECTMVEKRVLALLDKPPFLTQLHSCFQTVDRLYFVMEYVNGGDLMYHIQQVGKFKEPQAVFYAAEISIGLFFLHKRGIIYRDLKLDNVMLDSEGHIKIADFGMCKEHMMDGVTTRTFCGTPDYIAPEIIAYQPYGKSVDWWAYGVLLYEMLAGQPPFDGEDEDELFQSIMEHNVSYPKSLSKEAVSVCKGLMTKHPAKRLGCGPEGERDVREHAFFRRIDWEKLENREIQPPFKPKVCGKGAENFDKFFTRGQPVLTPPDQLVIANIDQSDFEGFSYVNPQFVHPILQSAV

SEQ ID NO: 44568 - protein, 1902 aa, Homo sapiens
MADFTGPCPLEIERIKIESLLYRIASFLQLKNYVQADEDCRHVLGEGLAKGEDAFRAVLCCMQLKGKLQPVSTILAKSLTGESLNGMVTKDLTRLKTLLSETETATSNALSGYHVEDLDEGSCNGWHFRPPPRGITSSEEYTLCKRFLEQGICRYGAQCTSAHSQEELAEWQKRYASRLIKLKQQNENKQLSGSYMETLIEKWMNSLSPEKVLSECIEGVKVEHNPDLSVTVSTKKSHQTWTFALTCKPARMLYRVALLYDAHRPHFSIIAISAGDSTTQVSQEVPENCQEWIGGKMAQNGLDHYVYKVGIAFNTEIFGTFRQTIVFDFGLEPVLMQRVMIDAASTEDLEYLMHAKQQLVTTAKRWDSSSKTIIDFEPNETTDLEKSLLIRYQIPLSADQLFTQSVLDKSLTKSNYQSRLHDLLYIEEIAQYKEISKFNLKVQLQILASFMLTGVSGGAKYAQNGQLFGRFKLTETLSEDTLAGRLVMTKVNAVYLLPVPKQKLVQTQGTKEKVYEATIEEKTKEYIFLRLSRECCEELNLRPDCDTQVELQFQLNRLPLCEMHYALDRIKDNGVLFPDISMTPTIPWSPNRQWDEQLDPRLNAKQKEAVLAITTPLAIQLPPVLIIGPYGTGKTFTLAQAVKHILQQQETRILICTHSNSAADLYIKDYLHPYVEAGNPQARPLRVYFRNRWVKTVHPVVHQYCLISSAHSTFQMPQKEDILKHRVVVVTLNTSQYLCQLDLEPGFFTHILLDEAAQAMECETIMPLALATQNTRIVLAGDHMQLSPFVYSEFARERNLHVSLLDRLYEHYPAEFPCRILLCENYRSHEAIINYTSELFYEGKLMASGKQPAHKDFYPLTFFTARGEDVQEKNSTAFYNNAEVFEVVERVEELRRKWPVAWGKLDDGSIGVVTPYADQVFRIRAELRKKRLSDVNVERVLNVQGKQFRVLFLSTVRTRHTCKHKQTPIKKKEQLLEDSTEDLDYGFLSNYKLLNTAITRAQSLVAVVGDPIALCSIGRCRKFWERFIALCHENSSLHGITFEQIKAQLEALELKKTYVLNPLAPEFIPRALRLQHSGSTNKQQQSPPKGKSLHHTQNDHFQNDGIVQPNPSVLIGNPIRAYTPPPPLGPHPNLGKSPSPVQRIDPHTGTSILYVPAVYGGNVVMSVPLPVPWTGYQGRFAVDPRIITHQAAMAYNMNLLQTHGRGSPIPYGLGHHPPVTIGQPQNQHQEKDQHEQNRNGKSDTNNSGPEINKIRTPEKKPTEPKQVDLESNPQNRSPESRPSVVYPSTKFPRKDNLNPRHINLPLPAPHAQYAIPNRHFHPLPQLPRPPFPIPQQHTLLNQQQNNLPEQPNQIPPQPNQVVQQQSQLNQQPQQPPPQLSPAYQAGPNNAFFNSAVAHRPQSPPAEAVIPEQQPPPMLQEGHSPLRAIAQPGPILPSHLNSFIDENPSGLPIGEALDRIHGSVALETLRQQQARFQQWSEHHAFLSQGSAPYPHHHHPHLQHLPQPPLGLHQPPVRADWKLTSSAEDEVETTYSRFQDLIRELSHRDQSETRELAEMPPPQSRLLQYRQVQSRSPPAVPSPPSSTDHSSHFSNFNDNSRDIEVASNPAFPQRLPPQIFNSPFSLPSEHLAPPPLKYLAPDGAWTFANLQQNHLMGPGFPYGLPPLPHRPPQNPFVQIQNHQHAIGQEPFHPLSSRTVSSSSLPSLEEYEPRGPGRPLYQRRISSSSVQPCSEEVSTPQDSLAQCKELQDHSNQSSFNFSSPESWVNTTSSTPYQNIPCNGSSRTAQPRELIAPPKTVKPPEDQLKSENLEVSSSFNYSVLQHLGQFPPLMPNKQIAESANSSSPQSSAGGKPAMSYASALRAPPKPRPPPEQAKKSSDPLSLFQELSLGSSSGSNGFYSYFK

SEQ ID NO: 44569 - protein, 441 aa, Homo sapiens [sequence omitted]

SEQ ID NO: 44570 - protein, 324 aa, Homo sapiens [sequence omitted]

SEQ ID NO: 44571 - protein, 196 aa, Homo sapiens
MDSQFLCASSNTETVHIFKLEQVTNSRPEEPSTWSGYMGKMFMAATNYLPTQVSDMMHQDRAFATARLNFSGQRNICTLSTIQKLPRLLVASSSGHLYMYNLDPQDGGECVLIKTHSLLGSGTTEENKENDLRPSLPQSYAATVARPSASSASTVPGYSEDGGALRGEVIPEHEFATGPVCLDDENEFPPVSIRNP

SEQ ID NO: 44572 - protein, 1562 aa, Homo sapiens
MDLGRVDSFNDTNYVIAFAPESKTTQEIMNKVASAPFLKGRTIMGWPDEKSMDELDLNYSIDAVRVIFTDTFSYHLKFSWGHRIPMMKEHRDHSAHCQAVNEKMKCEGSEFWEKGFVAFQAAINAAIIEIATNHSVMEQLMSVTGVHMKILPFVAQGGVATDFFIFFCIISFSTFIYYVSVNVTQERQYITSLMTMMGLRESAFWLSWGLMYAGFILIMATLMALIVKSAQIVVLTGFVMVFTLFLLYGLSLITLAFLMSVLIKKPFLTGLVVFLLIVFWGILGFPALYTRLPAFLEWTLCLLSPFAFTVGMAQLIHLDYDVNSNAHLDSSQNPYLIIATLFMLVFDTLLYLVLTLYFDKILPAEYGHRCSPLFFLKSCFWFQHGRANHVVLENETDSDPTPNDCFEPVSPEFCGKEAIRIKNLKKEYAGKCERVEALKGVVFDIYEGQITALLGHSGAGKTTLLNILSGLSVPTSGSVTVYNHTLSRMADIENISKFTGFCPQSNVQFGFLTVKENLRLFAKIKGILPHEVEKEVQRVVQELEMENIQDILAQNLSGGQNRKLTFGIAILGDPQVLLLDEPTAGLDPLSRHRIWNLLKEGKSDRVILFSTQFIDEADILADRKVFISNGKLKCAGSSLFLKKKWGIGYHLSLHLNERCDPESITSLVKQHISDAKLTAQSEEKLVYILPLERTNKFPELYRDLDRCSNQGIEDYGVSITTLNEVFLKLEGKSTIDESDIGIWGQLQTDGAKDIGSLVELEQVLSSFHETRKTISGVALWRQQVCAIAKVRFLKLKKERKSLWTILLLFGISFIPQLLEHLFYESYQKSYPWELSPNTYFLSPGQQPQDPLTHLLVINKTGSTIDNFLHSLRRQNIAIEVDAFGTRNGTDDPSYNGAIIVSGDEKDHRFSIACNTKRLNCFPVLLDVISNGLLGIFNSSEHIQTDRSTFFEEHMDYEYGYRSNTFFWIPMAASFTPYIAMSSIGDYKKKAHSQLRISGLYPSAYWFGQALVDVSLYFLILLLMQIMDYIFSPEEIIFIIQNLLIQILCSIGYVSSLVFLTYVISFIFRNGRKNSGIWSFFFLIVVIFSIVATDLNEYGFLGLFFGTMLIPPFTLIGSLFIFSEISPDSMDYLGASESEIVYLALLIPYLHFLIFLFILRCLEMNCRKKLMRKDPVFRISPRSNAIFPNPEEPEGEEEDIQMERMRTVNAMAVRDFDETPVIIASCLRKEYAGKKKNCFSKRKKKIATRNVSFCVKKGEVIGLLGHNGAGKSTTIKMITGDTKPTAGQVILKGSGGGEPLGFLGYCPQENALWPNLTVRQHLEVYAAVKGLRKGDAMIAITRLVDALKLQDQLKAPVKTLSEGIKRKLCFVLSILGNPSVVLLDEPSTGMDPEGQQQMWQVIRATFRNTERGALLTTHYMAEAEAVCDRVAIMVSGRLRCIGSIQHLKSKFGKDYLLEMKLKNLAQMEPLHAEILRLFPQAAQQERFSSLMVYKLPVEDVRPLSQAFFKLEIVKQSFDLEEYSLSQSTLEQVFLELSKEQELGDLEEDFDPSVKWKLLLQEEP

SEQ ID NO: 44573 - protein, 1524 aa, Homo sapiens
MDLGRVDSFNDTNYVIAFAPESKTTQEIMNKVASAPFLKGRTIMGWPDEKSMDELDLNYSIDAVRVIFTDTFSYHLKFSWGHRIPMMKEHRDHSAHCQAVNEKMKCEGSEFWEKGFVAFQAAINAAIIEIATNHSVMEQLMSVTGVHMKILPFVAQGGVATDFFIFFCIISFSTFIYYVSVNVTQERQYITSLMTMMGLRESAFWLSWGLMYAGFILIMATLMALIVKSAQIVVLTGFVMVFTLFLLYGLSLITLAFLMSVLIKKPFLTGLVVFLLIVFWGILGFPALYTRLPAFLEWTLCLLSPFAFTVGMAQLIHLDYDVNSNAHLDSSQNPYLIIATLFMLVFDTLLYLVLTLYFDKILPAEYGHRCSPLFFLKSCFWFQHGRANHVVLENETDSDPTPNDCFEPVSPEFCGKEAIRIKNLKKEYAGKCERVEALKGVVFDIYEGQITALLGHSGAGKTTLLNILSGLSVPTSGSVTVYNHTLSRMADIENISKFTGFCPQSNVQFGFLTVKENLRLFAKIKGILPHEVEKEVQRVVQELEMENIQDILAQNLSGGQNRKLTFGIAILGDPQVLLLDEPTAGLDPLSRHRIWNLLKEGKSDRVILFSTQFIDEADILADRKVFISNGKLKCAGSSLFLKKKWGIGYHLSLHLNERCDPESITSLVKQHISDAKLTAQSEEKLVYILPLERTNKFPELYRDLDRCSNQGIEDYGVSITTLNEVFLKLEGKSTIDESDIGIWGQLQTDGAKDIGSLVELEQVLSSFHETRKTISGVALWRQQVCAIAKVRFLKLKKERKSLWTILLLFGISFIPQLLEHLFYESYQKSYPWELSPNTYFLSPGQQPQDPLTHLLVINKTGSTIDNFLHSLRRQNIAIEVDAFGTRNGTDDPSYNGAIIVSGDEKDHRFSIACNTKRLNCFPVLLDVISNGLLGIFNSSEHIQTDRSTFFEEHMDYEYGYRSNTFFWIPMAASFTPYIAMSSIGDYKKKAHSQLRISGLYPSAYWFGQALVDVSLYFLILLLMQIMDYIFSPEEIIFIIQNLLIQVVIFSIVATDLNEYGFLGLFFGTMLIPPFTLIGSLFIFSEISPDSMDYLGASESEIVYLALLIPYLHFLIFLFILRCLEMNCRKKLMRKDPVFRISPRSNAIFPNPEEPEGEEEDIQMERMRTVNAMAVRDFDETPVIIASCLRKEYAGKKKNCFSKRKKKIATRNVSFCVKKGEVIGLLGHNGAGKSTTIKMITGDTKPTAGQVILKGSGGGEPLGFLGYCPQENALWPNLTVRQHLEVYAAVKGLRKGDAMIAITRLVDALKLQDQLKAPVKTLSEGIKRKLCFVLSILGNPSVVLLDEPSTGMDPEGQQQMWQVIRATFRNTERGALLTTHYMAEAEAVCDRVAIMVSGRLRCIGSIQHLKSKFGKDYLLEMKLKNLAQMEPLHAEILRLFPQAAQQERFSSLMVYKLPVEDVRPLSQAFFKLEIVKQSFDLEEYSLSQSTLEQVFLELSKEQELGDLEEDFDPSVKWKLLLQEEP

SEQ ID NO: 44574 - protein, 1615 aa, Homo sapiens
MKQKSVYQQTKALLCKNFLKKWRMKRESLLEWGLSILLGLCIALFSSSMRNVQFPGMAPQNLGRVDKFNSSSLMVVYTPISNLTQQIMNKTALAPLLKGTSVIGAPNKTHMDEILLENLPYAMGIIFNETFSYKLIFFQGYNSPLWKEDFSAHCWDGYGEFSCTLTKYWNRGFVALQTAINTAIIEITTNHPVMEELMSVTAITMKTLPFITKNLLHNEMFILFFLLHFSPLVYFISLNVTKERKKSKNLMKMMGLQDSAFWLSWGLIYAGFIFIISIFVTIIITFTQIIVMTGFMVIFILFFLYGLSLVALVFLMSVLLKKAVLTNLVVFLLTLFWGCLGFTVFYEQLPSSLEWILNICSPFAFTTGMIQIIKLDYNLNGVIFPDPSGDSYTMIATFSMLLLDGLIYLLLALYFDKILPYGDERHYSPLFFLNSSSCFQHQRTNAKVIEKEIDAEHPSDDYFEPVAPEFQGKEAIRIRNVKKEYKGKSGKVEALKGLLFDIYEGQITAILGHSGAGKSSLLNILNGLSVPTEGSVTIYNKNLSEMQDLEEIRKITGVCPQFNVQFDILTVKENLSLFAKIKGIHLKEVEQEVQRILLELDMQNIQDNLAKHLSEGQKRKLTFGITILGDPQILLLDEPTTGLDPFSRDQVWSLLRERRADHVILFSTQSMDEADILADRKVIMSNGRLKCAGSSMFLKRRWGLGYHLSLHRNEICNPEQITSFITHHIPDAKLKTENKEKLVYTLPLERTNTFPDLFSDLDKCSDQGVTGYDISMSTLNEVFMKLEGQSTIEQDFEQVEMIRDSESLNEMELAHSSFSEMQTAVSDMGLWRMQVFAMARLRFLKLKRQTKVLLTLLLVFGIAIFPLIVENIMYAMLNEKIDWEFKNELYFLSPGQLPQEPRTSLLIINNTESNIEDFIKSLKHQNILLEVDDFENRNGTDGLSYNGAIIVSGKQKDYRFSVVCNTKRLHCFPILMNIISNGLLQMFNHTQHIRIESSPFPLSHIGLWTGLPDGSFFLFLVLCSISPYITMGSISDYKKNAKSQLWISGLYTSAYWCGQALVDVSFFILILLLMYLIFYIENMQYLLITSQIVFALVIVTPGYAASLVFFIYMISFIFRKRRKNSGLWSFYFFFASTIMFSITLINHFDLSILITTMVLVPSYTLLGFKTFLEVRDQEHYREFPEANFELSATDFLVCFIPYFQTLLFVFVLRCMELKCGKKRMRKDPVFRISPQSRDAKPNPEEPIDEDEDIQTERIRTATALTTSILDEKPVIIASCLHKEYAGQKKSCFSKRKKKIAARNISFCVQEGEILGLLGPNGAGKSSSIRMISGITKPTAGEVELKGCSSVLGHLGYCPQENVLWPMLTLREHLEVYAAVKGLRKADARLAIARLVSAFKLHEQLNVPVQKLTAGITRKLCFVLSLLGNSPVLLLDEPSTGIDPTGQQQMWQAIQAVVKNTERGVLLTTHNLAEAEALCDRVAIMVSGRLRCIGSIQHLKNKLGKDYILELKVKETSQVTLVHTEILKLFPQAAGQERYSSLLTYKLPVADVYPLSQTFHKLEAVKHNFNLEEYSLSQCTLEKVFLELSKEQEVGNFDEEIDTTMRWKLLPHSDEP

SEQ ID NO: 44575 - protein, 183 aa, Homo sapiens [sequence omitted]

SEQ ID NO: 44576 - protein, 1592 aa, Homo sapiens [sequence omitted]

SEQ ID NO: 44577 - protein, 256 aa, Homo sapiens
MAVKRIRATVNSQEQKRLLMDLDISMRTVDCPFTVTFYGALFREGDVWICMELMDTSLDKFYKQVIDKGQTIPEDILGKIAVSIVKALEHLHSKLSVIHRDVKPSNVLINALGQVKMCDFGISGYLVDSVAKTIDAGCKPYMAPERINPELNQKGYSVKSDIWSLGITMIELAILRFPYDSWGTPFQQLKQVVEEPSPQLPADKFSAEFVDFTSQCLKKNSKERPTYPELMQHPFFTLHESKGTDVASFVKLILGD

SEQ ID NO: 44578 - protein, 344 aa, Homo sapiens [sequence omitted]

SEQ ID NO: 44579 - protein, 930 aa, Homo sapiens [sequence omitted]

SEQ ID NO: 44580 - protein, 890 aa, Homo sapiens
MVGERYRDLIEAADTIGQMRRCAVGLVDAVKATDQYCARLRQAGSAAPRPPRAQQPQQPSQEKFYSMAAQIKLLLEIPEKIWSSMEASQCLHATQLYLLCCHLHSLLQLDSSSSRYSPVLSRFPILIRQVAAASHFRSTILHESKMLLKCQGVSDQAVAEALCSIMLLEESSPRQALTDFLLARKATIQKLLNQPHHGAGIKAQICSLVELLATTLKQAHALFYTLPEGLLPDPALPCGLLFSTLETITGQHPAGKGTGVLQEEMKLCSWFKHLPASIVEFQPTLRTLAHPISQEYLKDTLQKWIHMCNEDIKNGITNLLMYVKSMKGLAGIRDAMWELLTNESTNHSWDVLCRRLLEKPLLFWEDMMQQLFLDRLQTLTKEGFDSISSSSKELLVSALQELESSTSNSPSNKHIHFEYNMSLFLWSESPNDLPSDAAWVSVANRGQFASSGLSMKAQAISPCVQNFCSALDSKLKVKLDDLLAYLPSDDSSLPKDVSPTQAKSSAFDRYADAGTVQEMLRTQSVACIKHIVDCIRAELQSIEEGVQGQQDALNSAKLHSVLFMARLCQSLGELCPHLKQCILGKSESSEKPAREFRALRKQGKVKTQEIIPTQAKWQEVKEVLLQQSVMGYQVWSSAVVKVLIHGFTQSLLLDDAGSVLATATSWDELEIQEEAESGSSVTSKIRLPAQPSWYVQSFLFSLCQEINRVGGHALPKVTLQEMLKSCMVQVVAAYEKLSEEKQIKKEGAFPVTQNRALQLLYDLRYLNIVLTAKGDEVKSGRSKPDSRIEKVTDHLEALIDPFDLDVFTPHLNSNLHRLVQRTSVLFGLVTGTENQLAPRSSTFNSQEPHNILPLASSQIRFGLLPLSMTSTRKAKSTRNIETKAQYDANC

SEQ ID NO: 44581 - protein, 555 aa, Homo sapiens
MKGPIKDLIKAKGKELETENEERNSKLVVDKPEQTVKTFPLPAVGLERAATTKADKDIKNPIQPSFKMLKNTKPMTTFQEETKAQFYASEKTSPKRELAKDLPKSGESRCNPSEAGASLLVGSIEPSLSNQDRKYSSTLPNDVQTTSGDLKLDKIDPQRQELLVKLLDVPTGDCHISPKNVSDGVKRVRTLLSNERDSKGRDHLSGVPTDVTVTETPEKNTESLILSLKMSSLGKIQVMEKQEKGLTLGVETCGSKGNAEKSMSATEKQERTVMSHGCENFNTRDSVTGKESQGERPHLSLFIPRETTYQFHSVSQSSSQSLASLATTFLQEKKAEAQNHHCVPDVKALMESPEGQLSLEPKSDSQFQASHTGCQSPLCSAQRHTPQSPFTNHAAAAGRKTLRSCMGLEWFPELYPGYLGLGVLPGKPQCWNAMTQKPQLISPQGERLSQVSLLERSSTHIRSLEPPAGLTTSNFSLMRLLGAVQKGWIRCNTTIRKSGFGGITMLFTGYFVLCCSWSFRRLKKLCRPLPWKSTVPPCIGVAKTTGDCRSKTCLD

SEQ ID NO: 44582 - protein, 339 aa, Homo sapiens [sequence omitted]

SEQ ID NO: 44583 - protein, 171 aa, Homo sapiens
MKSEELQRLTASEPLTLEQEYAMQCSWQEDADKCTFIVLDAEKWQAQPGATEESCMVGDVNLFLTDLEDLTLGEIEVMIAEPSCRGKGLGTEAVLAMLSYGLTKFEAKIGQGNEPSIRMFQKLHFEQVATSSVFQEVTLRLTVSESEHQWLLEQTSHVEEKPYRDGSAEPC

SEQ ID NO: 44584 - protein, 104 aa, Homo sapiens
MKSEELQRLTASEPLTLEQEYAMQCSWQEDADKCTFIVLDAEKWQAQPGATEESCMVGDVNLFLTDLEDLTLGEIEVMIAEPSCRGKGLGTEAVLAMLSYETSL

SEQ ID NO: 44585 - protein, 60 aa, Homo sapiens
MSDGWKFEQLISIGSSYNYGNEDQAEFLCVVSRELNNSTNGIVIEPSEKAKILQERGSRM

SEQ ID NO: 44586 - protein, 441 aa, Homo sapiens
MAGPLCSILVGRFGCRVTVMLGGVLASLGMVASSFSHNLSQLYFTAGFITGLGMCFSFQSSITVLGFYFVRRRVLANALASMGVSLGITLWPLLSRYLLENLGWRGTFLVFGGIFLHCCICGAIIRPVATSVAPETKECPPPPPETPALGCLAACGRTIQRHLAFDILRHNTGYCVYILGVMWSVLGFPLPQVFLVPYAMWHSVDEQQAALLISIIGFSNIFLRPLAGLMAGRPAFASHRKYLFSLALLLNGLTNLVCAASGDFWVLVGYCLAYSVSMSGIGALIFQVLMDIVPMDQFPRALGLFTVLDGLAFLISPPLAGLLLDATNNFSYVFYMSSFFLISAALFMGGSFYALQKKEQGKQAVAADALERDLFLEAKDGPGKQRSPEIMCQSSRQPRPAGVNKHLWGCPASSRTSHEWLLWPKAVLQAKQTALGWNSPT

SEQ ID NO: 44587 - protein, 191 aa, Homo sapiens
MDGVLADFEAGLLRGFRRRFPEEPHVPLEQRRGFLAREQYRALRPDLADKVASVYEAPGFFLDLEPIPGALDAVREMNDLPDTQVFICTSPLLKYHHCVGEKYRWVEQHLGPQFVERIILTRDKTVVLGDLLIDDKDTVRGQEETPSWEHILFTCCHNRHLVLPPTRRRLLSWSDNWREILDSKRGAAQRE

SEQ ID NO: 44588 - protein, 731 aa, Homo sapiens [sequence omitted]

SEQ ID NO: 44589 - protein, 940 aa, Homo sapiens
MPTGAGKSLCYQLPALLAKGITIVVSPLIALIQDQVDHLLTLKVRVSSLNSKLSAQERKELLADLEREKPQTKILYITPEMAASSSFQPTLNSLVSRHLLSYLVVDEAHCVSQWGHDFRPDYLRLGALRSRLGHAPCVALTATATPQVQEDVFAALHLKKPVAIFKTPCFRANLFYDVQFKELISDPYGNLKDFCLKALGQEADKGLSGCGIVYCRTREACEQLAIELSCRGVNAKAYHAGLKASERTLVQNDWMEEKVPVIVATISFGMGVDKANVRFVAHWNIAKSMAGYYQESGRAGRDGKPSWCRLYYSRNDRDQVSFLIRKEVAKLQEKRGNKASDKATIMAFDALVTFCEELGCRHAAIAKYFGDALPACAKGCDHCQNPTAVRRRLEALERSSSWSKTCIGPSQGNGFDPELYEGGRKGYGDFSRYDEGSGGSGDEGRDEAHKREWNLFYQKQMQLRKGKDPKIEEFVPPDENCPLKEASSRRIPRLTVKAREHCLRLLEEALSSNRQSTRTADEADLRAKAVELEHETFRNAKVANLYKASVLKKVADIHRASKDGQPYDMGGSAKSCSAQAEPPEPNEYDIPPASHVYSLKPKRVGAGFPKGSCPFQTATELMETTRIREQAPQPERGGEHEPPSRPCGLLDEDGSEPLPGPRGEVPGGSAHYGGPSPEKKAKSSSGGSSLAKGRASKKQQLLATAAHKDSQSIARFFCRRVESPALLASAPEAEGACPSCEGVQGPPMAPEKYTGEEDGAGGHSPAPPQTEECLRERPSTCPPRDQGTPEVQPTPAKDTWKGKRPRSQQENPESQPQKRPRPSAKPSVVAEVKGSVSASEQGTLNPTAQDPFQLSAPGVSLKEAANVVVKCLTPFYKEGKFASKELFKGFARHLSHLLTQKTSPGRSVKEEAQNLIRHFFHGRARCESEADWHGLCGPQR

SEQ ID NO: 44590 - protein, 384 aa, Homo sapiens
MPTGAGKSLCYQLPALLAKGITIVVSPLIALIQDQVDHLLTLKVRVSSLNSKLSAQERKELLADLEREKPQTKILYITPEMAASSSFQPTLNSLVSRHLLSYLVVDEAHCVSQWGHDFRPDYLRLGALRSRLGHAPCVALTATATPQVQEDVFAALHLKKPVAIFKTPCFRANLFYDVQFKELISDPYGNLKDFCLKALGQEADKGLSGCGIVYCRTREACEQLAIELSCRGVNAKAYHAGLKASERTLVQNDWMEEKVPVIVATISFGMGVDKANVRFVAHWNIAKSMAGYYQESGRAGRDGKPSWCRLYYSRNDRDQVSFLIRKEVAKLQEKRGNKASDKATIMAFDALVTFCEELGRWGRGHGKSLRAAWCSQVVSRHAEL

SEQ ID NO: 44591 - protein, 137 aa, Homo sapiens
MSPDEIKIPPEPPGRCSNHLQDKIQKLYERKIKEGMDMNYIIQRKKEFRNPSIYEKLIQFCAIDELGTNYPKDMFDPHGWSEDSYYEALAKAQKIEMDKLEKAKKERTKACCRDVSAAPGDRSCPSPVRAGTASSWV

SEQ ID NO: 44592 - protein, 197 aa, Homo sapiens
MSPDEIKIPPEPPGRCSNHLQDKIQKLYERKIKEGMDMNYIIQRKKEFRNPSIYEKLIQFCAIDELGTNYPKDMFDPHGWSEDSYYEALAKAQKIEMDKLEKAKKERTKIEFVTGTKKGTTTNATSTTTTTASTAVADAQKRKSKWDSAIPVTTIAQPTILTTTATLPAVVTVTTSASGSKTTVISAVGTIVKKAKQ

SEQ ID NO: 44593 - protein, 178 aa, Homo sapiens
MDQFISLMGQKGHALLIDCSEYPVRRRQCEEVARALGKESLREVQLEELEAARDLVSKEGFRRARHVVGEIRRTAQAAAALRRGDYRAFGRLMVESHRSLRDDYEVSCPELDQLVEAALAVPGVYGSRMTGGGFGGCTVTLLEASAAPHAMRHIQEHYGGTATFYLSQAADGAKVLCL

SEQ ID NO: 44594 - protein, 152 aa, Homo sapiens
MINQFVLAAGCAADQAKQLLQAAHWQFETALSTFFQETNIPNSHHHHQMMCTPSNTPATPPNFPDALAMFSKLRASEGLQSSNSPMTAAACSPPANFSPFWASSPPSHQAPWIPPSSPTTFHHLHRPQPTWPPGAQQGGAQQKAMAAMDGQR

SEQ ID NO: 44595 - protein, 356 aa, Homo sapiens
MNAARTGYRVFSANSTAACTELAKRITERLGAELGKSVVYQETNGETRVEIKESVRGQDIFIIQTIPRDVNTAVMELLIMAYALKTACARNIIGVIPYFPYSKQSKMRKRGSIVCKLLASMLAKAGLTHIITMDLHQKEIQGFFSFPVDNLRASPFLLQYIQEEIPNYRNAVIVAKSPDAAKRAQSYAERLRLGLAVIHGEAQCTELDMDDGRHSPPMVKNATVHPGLELPLMMAKEKPPITVVGDVGGRIAIIVDDIIDDVESFVAAAEILKERGAYKIYVMATHGILSAEAPRLIEESSVDEVVVTNTVPHEVQKLQCPKIKTVDISLILSEAIRRIHNGESMAYLFRNITVDD

SEQ ID NO: 44596 - protein, 290 aa, Homo sapiens
MKYYIEYMESTRDDSPLYIFDSSYGEHPKRRKLLEDYKVPKFFTDDLFQYAGEKRRPPYRWFVMGPPRSGTGIHIDPLGTSAWNALVQGHKRWCLFPTSTPRELIKVTRDEGGNQQDEAITWFNVIYPRTQLPTWPPEFKPLEILQKPGETVFVPGGWWHVVLNLDTTIAITQNFASSTNFPVVWHKTVRGRPKLSRKWYRILKQEHPELAVLADSVDLQESTGIASDSSSDSSSSSSSSSSDSDSECESGSEGDGTVHRRKKRRTCSMVGNGDTTSQDDCVSKERSSSR

SEQ ID NO: 44597 - protein, 209 aa, Homo sapiens
MTSLKVDNLTYRTSPDTLRRVFEKYGRVGDVYIPRDRYTKESRGFAFVRFHDKRDAEDAMDAMDGAVLDGRELRVQMARYGRPPDSHHSRRGPPPRRYGGGGYGRRSRSPRRRRRSRSRSRSRSRSRSRSRYSRSKSRSRTRSRSRSTSKSRSARRSKSKSSSVSRSRSRSRSRSRSRSPPPVSKRESKSRSRSKSPPKSPEEEGAVSS

SEQ ID NO: 44598 - protein, 685 aa, Homo sapiens
MFVGSDTVNEFKSEDGAIHVIERRCKLDVDAPRLLKKIAGVDYVYFVQKNSLNSRERTLHIEAYNETFSNRVIINEHCCYTVHPENEDWTCFEQSASLDIKSFFGFESTVEKIAMKQYTSNIKKGKEIIEYYLRQLEEEGITFVPRWSPPSITTSSETSSSSSKKQAASMAVVIPEAALKEGLSGDALSSPSAPEPVVGTPDDKLDADYIKRYLGDLTPLQESCLIRLRQWLQETHKGKIPKDEHILRFLRARDFNIDKAREIMCQSLTWRKQHQVDYILETWTPPQVLQDYYAGGWHHHDKDGRPLYVLRLGQMDTKGLVRALGEEALLRYVLSINEEGLRRCEENTKVFGRPISSWTCLVDLEGLNMRHLWRPGVKALLRIIEVVEANYPETLGRLLILRAPRVFPVLWTLVSPFIDDNTRRKFLIYAGNDYQGPGGLLDYIDKEIIPDFLSGECMCEVPEGGLVPKSLYRTAEELENEDLKLWTETIYQSASVFKGAPHEILIQIVDASSVITWDFDVCKGDIVFNIYHSKRSPQPPKKDSLGAHSITSPGGNNVQLIDKVWQLGRDYSMVESPLICKEGESVQGSHVTRWPGFYILQWKFHSMPACAASSLPRVDDVLASLQVSSHKCKVMYYTEVIGSEDFRGSMTSLESSHSGFSQLSAATTSSSQSHSSSMISRWRFC

SEQ ID NO: 44599 - protein, 1658 aa, Homo sapiens
MIGDGRSQNCWGASNSNAGINLNLNPNANPAAWPVLGHEGTVATGNPSSICSPVSAIGQNMGNQNGNPTGTLGAWGNLLPQESTEPQTSTSQNVSFSAQPQNLNTDGPNNTNPMNSSPNPINAMQTNGLPNWGMAVGMGAIIPPHLQGLPGANGSSVSQVSGGSAEGISNSVWGLSPGNPATGNSNSGFSQGNGDTVNSALSAKQNGSSSAVQKEGSGGNAWDSGPPAGPGILAWGRGSGNNGVGNIHSGAWGHPSRSTSNGVNGEWGKPPNQHSNSDINGKGSTGWESPSVTSQNPTVQPGGEHMNSWAKAASSGTTASEGSSDGSGNHNEGSTGREGTGEGRRRDKGIIDQGHIQLPRNDLDPRVLSNTGWGQTPVKQNTAWEFEESPRSERKNDNGTEAWGCAATQASNSGGKNDGSIMNSTNTSSVSGWVNAPPAAVPANTGWGDSNNKAPSGPGVWGDSISSTAVSTAAAAKSGHAWSGAANQEDKSPTWGEPPKPKSQHWGDGQRSNPAWSAGGGDWADSSSVLGHLGDGKKNGSGWDADSNRSGSGWNDTTRSGNSGWGNSTNTKANPGTNWGETLKPGPQQNWASKPQDNNVSNWGGAASVKQTGTGWIGGPVPVKQKDSSEATGWEEPSPPSIRRKMEIDDGTSAWGDPSNYNNKTVNMWDRNNPVIQSSTTTNTTTTTTTTTSNTTHRVETPPPHQAGTQLNRSPLLGPVSSGWGEMPNVHSKTENSWGEPSSPSTLVDNGTAAWGKPPSSGSGWGDHPAEPPVAFGRAGAPVAASALCKPASKSMQEGWGSGGDEMNLSTSQWEDEEGDVWNNAASQESTSSCSSWGNAPKKGLQKGMKTSGKQDEAWIMSRLIKQLTDMGFPREPAEEALKSNNMNLDQAMSALLEKKVDVDKRGLGVTDHNGMAAKPLGCRPPISKESSVDRPTFLDKLTLSFSNQDGGLVEEPTPSPFLPSPSLKLPLSHSALPSQALGGIASGLGMQNLNSSRQIPSGNLGMFGNSGAAQARTMQQPPQPPVQPLNSSQPSLRAQVPQFLSPQVQAQLLQFAAKNIGLNPALLTSPINPQHMTMLNQLYQLQLAYQRLQIQQQMLQAQRNVSGSMRQQEQQVARTITNLQQQIQQHQRQLAQALLVKQPPPPPPPPHLSLHPSAGKSAMDSFPSHPQTPGLPDLQTKEQQSSPNTFAPYPLAGLNPNMNVNSMDMTGGLSVKDPSQSQSRLPQWTHPNSMDNLPSAASPLEQNPSKHGAIPGGLSIGPPGKSSIDDSYGRYDLIQNSESPASPPVAVPHSWSRAKSDSDKISNGSSINWPPEFHPGVPWKGLQNIDPENDPDVTPGSVPTGPTINTTIQDVNRYLLKSGGSSPPSSQNATLPSSSAWPLSASGYSSSFSSIASAPSVAGKLSDIKSTWSSGPTSHTQASLSHELWKVPRNSTAPTRPPPGLTNPKPSSTWGASPLGWTSSYSSGSAWSTDTSGRTSSWLVLRNLTPQIDGSTLRTLCLQHGPLITFHLNLTQGNAVVRYSSKEEAAKAQKSLHMCVLGNTTILAEFAGEEEVNRFLAQGQALPPTSSWQSSSASSQPRLSAAGSSHGLVRSDAGHWNAPCLGGKGSSELLWGGVPQYSSSLWGPPSADDSRVIGSPTPLTTLLPGDLLSGESL

SEQ ID NO: 44600 - protein, 198 aa, Homo sapiens [sequence omitted]

SEQ ID NO: 44601 - protein, 447 aa, Homo sapiens
MKGQIRVAKRRVVMASLYLGTGPLEQELVDCLESTLEKSLQAKFPSNLKVSILLDFTRGSRGRKNSRTMLLPLLRRFPEQVRVSLFHTPHLRGLLRLLIPERFNETIGLQHIKVYLFDNSVILSGANLSDSYFTNRQDRYVFLQDCAEIADFFTELVDAVGDVSLQLQGDDTVQVVDGMVHPYKGDRAEYCKAANKRVMDVINSARTRQQMLHAQTFHSNSLLTQEDAAAAGDRRPAPDTWIYPLIQMKPFEIQIDEIVTETLLTEAERGAKVYLTTGYFNLTQAYMDLVLGTRAEYQILLASPEVNGFFGAKGVAGAIPAAYVHIERQFFSEVCSLGQQERVQLQEYWRRGWTFHAKGLWLYLAGSSLPCLTLIGSPNFGYRSVHRDLEAQIAIVTENQALQQQLHQEQEQLYLRSGVVSSATFEQPSRQVKLWVKMVTPLIKNFF

SEQ ID NO: 44602 - protein, 701 aa, Homo sapiens
MEKDEMLGATLILAWVPNSRIQRQDEEALRYITPESSPVRKAPRPRGRRTRSSGASHQPSPTELRPTLTPKDEDILVVAQSVPDRMLASPAPEDEEKLAQGLGVDGAQPASQPACSPSGILSTVSPQDVTEEGREPRPEAGEEDGSLELSAEGVSRDSSFDSDSDTFSSPFCLSPISAALAESRGSVFLESDSSPPSSSDAGLRFPDSNGLLQTPRWDEPQRVCALEQICGVFRVDLGHMRSLRLFFSDEACTSGQLVVASRESQYKVFHFHHGGLDKLSDVFQQWKYCTEMQLKDQQVAPDKTCMQFSIRRPKLPSSETHPEESMYKRLGVSAWLNHLNELGQVEEEYKLRKAIFFGGIDVSIRGEVWPFLLRYYSHESTSEEREALRLQKRKEYSEIQQKRLSMTPEEHRAFWRNVQFTVDKDVVRTDRNNQFFRGEDNPNVESMRRILLNYAVYNPAVGYSQGMSDLVAPILAEVLDESDTFWCFVGLMQNTIFVSSPRDEDMEKQLLYLRELLRLTHVRFYQHLVSLGEDGLQMLFCHRWLLLCFKREFPEAEALRIWEACWAHYQTDYFHLFICVAIVAIYGDDVIEQQLATDQMLLHFGNLAMHMNGELVLRKARSLLYQFRLLPRIPCSLHDLCKLCGSGMWDSGSMPAVECTGHHPGSESCPYGGTVEMPSPKSLREGKKGPKTPQDGFGFRR

SEQ ID NO: 44603 - protein, 5208 aa, Homo sapiens
MECGQELKEEGGPCLFPGSDSWQENPEEPCSKASWTVQEGATSEVLVDAAVDLISDEWEAANAIPSKRRKQDAAPLEAASVPSADCEQSKKKKRKKKKKGNKSASSELASLPLSPASPCHLTLLSNPWPQDTALPHSQAQQSGPTGQPSQPPGTATTPLEGDGLSAPTEVGDSPLQAQALGEAGVATGSEAQSSPQFQDHTEGEDQDASIPSGGRGLSQEGTGPPTSAGEGHSRTEDAAQELLLPESKGGSSEPGTELQTTEQQAGASASMAVDAVAEPANAVKGAGKEMKEKTQRMKQPPATTPPFKTHCQEAETKTKDEMAAAEEKVGKNEQGEPEDLKKPEGKNRSAAAVKNEKEQKNQEADVQEVKASTLSPGGGVTVFFHAIISLHFPFNPDLHKVFIRGGEEFGESKWDSNICELHYTRDLGHDRVLVEGIVCISKKHLDKYIPYKYVIYNGESFEYEFIYKHQQKKGEYVNRCLFIKSSLLGSGDWHQYYDIVYMKPHGRLQKVMNHITDGPRKDLVKGKQIAAALMLDSTFSILQTWDTINLNSFFTQFEQFCFVLQQPMIYEGQAQLWTDLQYREKEVKRYLWQHLKKHVVPLPDGKSTDFLPVDCPVRSKLKTGLIVLFVVEKIELLLEGSLDWLCHLLTSDASSPDEFHRDLSHILGIPQSWRLYLVNLCQRCMDTRTYTWLGALPVLHCCMELAPRHKDAWRQPEDTWAALEGLSFSPFREQMLDTSSLLQFMREKQHLLSIDEPLFRSWFSLLPLSHLVMYMENFIEHLGRFPAHILDCLSGIYYRLPGLEQVLNTQDVQDVQNVQNILEMLLRLLDTYRDKIPEEALSPSYLTVCLKLHEAICSSTKLLKFYELPALSAEIVCRMIRLLSLVDSAGQRDETGNNSVQTVFQGTLAATKRWLREVFTKNMLTSSGASFTYVKEIEVWRRLVEIQFPAEHGWKESLLGDMEWRLTKEEPLSQITAYCNSCWDTKGLEDSVAKTFEKCIIEAVSSACQSQTSILQGFSYSDLRKFGIVLSAVITKSWPRTADNFDDILKHLLTLADVKHVFRLCGTDEKILANVTEDAKRLIAVADSVLTKVVGDLLSGTILVGQLELIIKHKNQFLDIWQLREKSLSPQDEQCAVEEALDWRREELLLLKKEKRCVDSLLKMCGNVKHLIQVDFGVLAVRHSQDLSSKRLNDTVTVRLSTSSNSQRATHYHLSSQVQEMAGKIDLLRDSHIFQLFWREAAEPLSEPKEDQEAAELLSEPEEESERHILELEEVYDYLYQPSYRKFIKLHQDLKSGEVTLAEIDVIFKDFVNKYTDLDSELKIMCTVDHQDQRDWIKDRVEQIKEYHHLHQAVHAAKVILQVKESLGLNGDFSVLNTLLNFTDNFDDFRRETLDQINQELIQAKKLLQDISEARCKGLQALSLRKEFICWVREALGGINELKVFVDLASISAGENDIDVDRVACFHDAVQGYASLLFKLDPSVDFSAFMKHLKKLWKALDKDQYLPRKLCDSARNLEWLKTVNESHGSVERSSLTLATAINQRGIYVIQAPKGGQKISPDTVLHLILPESPGSHEESREYSLEEVKELLNKLMLMSGKKDRNNTEVERFSEVFCSVQRLSQAFIDLHSAGNMLFRTWIAMAYCSPKQGVSLQMDFGLDLVTELKEGGDVTELLAALCRQMEHFLDSWKRFVTQKRMEHFYLNFYTAEQLVYLSTELRKQPPSDAALTMLSFIKSNCTLRDVLRASVGCGSEAARYRMRRVMEELPLMLLSEFSLVDKLRIIMEQSMRCLPAFLPDCLDLETLGHCLAHLAGMGGSPVERCLPRGLQVGQPNLVVCGHSEVLPAALAVYMQTPSQPLPTYDEVLLCTPATTFEEVALLLRRCLTLGSLGHKVYSLLFADQLSYEVARQAEELFHNLCTQQHREDYQLVMVCDGDWEHCYLPSAFSQHKVFVTPQAPLEAIQAYLAGHYRVPKQTLSAAAVFNDRLCVGIVASERAGVGKSLYVKRLHDKMKMQLNVKNVPLKTIRLIDPQVDESRVLGALLPFLDAQYQKVPVLFHLDVTSSVQTGIWVFLFKLLILQYLMDINGKMWLRNPCHLYIVEILERRTSVPSRSSSALRTRVPQFSFLDIFPKVTCRPPKEVIDMELSALRSDTEPGMDLWEFCSETFQRPYQYLRRFNQNQDLDTFQYQEGSVEGTPEECLQHFLFHCGVINPSWSELRNFARFLNYQLRDCEASLFCNPSFIGDTLRGFKKFVVTFMIFMARDFATPSLHTSDQSPGKHMVTMDGVREEDLAPFSLRKRWESEPHPYVFFNDDHTTMTFIGFHLQPNINGSVDAISHLTGKVIKRDVMTRDLYQGLLLQRVPFNVDFDKLPRHKKLERLCLTLGIPQATDPDKTYELTTDNMLKILAIEMRFRCGIPVIIMGETGCGKTRLIKFLSDLRRGGTNADTIKLVKVHGGTTADMIYSRVREAENVAFANKDQHQLDTILFFDEANTTEAISCIKEVLCDHMVDGQPLAEDSGLHIIAACNPYRKHSEEMICRLESAGLGYRVSMEETADRLGSIPLRQLVYRVHALPPSLIPLVWDFGQLSDVAEKLYIQQIVQRLVESISLDENGTRVITEVLCASQGFMRKTEDECSFVSLRDVERCVKVFRWFHEHSAMLLAQLNAFLSKSSVSKNHTERDPVLWSLMLAIGVCYHASLEKKDSYRKAIARFFPKPYDDSRLLLDEITRAQDLFLDGVPLRKTIAKNLALKENVFMMVVCIELKIPLFLVGKPGSSKSLAKTIVADAMQGPAAYSDLFRSLKQVHLVSFQCSPHSTPQGIISTFRQCARFQQGKDLQQYVSVVVLDEVGLAEDSPKMPLKTLHPLLEDGCIEDDPAPHKKVGFVGISNWALDPAKMNRGIFVSRGSPNETELIESAKGICSSDILVQDRVQGYFASFAKAYETVCKRQDKEFFGLRDYYSLIKMVFAAAKASNRKPSPQDIAQAVLRNFSGKDDIQALDIFLANLPEAKCSEEVSPMQLIKQNIFGPSQKVPGGEQEDAESRYLLVLTKNYVALQILQQTFFEGDQQPEIIFGSGFPKDQEYTQLCRNINRVKICMETGKMVLLLNLQNLYESLYDALNQYYVHLGGQKYVDLGLGTHRVKCRVHPNFRLIVIEEKDVVYKHFPIPLINRLEKHYLDINTVLEKWQKSIVEELCAWVEKFINVKAHHFQKRHKYSPSDVFIGYHSDACASVVLQVIERQGPRALTEELHQKVSEEAKSILLNCATPDAVVRLSAYSLGGFAAEWLSQEYFHRQRHNSFADFLQAHLHTADLERHAIFTEITTFSRLLTSHDCEILESEVTGRAPKPTLLWLQQFDTEYSFLKEVRNCLTNTAKCKILIFQTDFEDGIRSAQLIASAKYSVINEINKIRENEDRIFVYFITKLSRVGRGTAYVGFHGGLWQSVHIDDLRRSTLMVSDVTRLQHVTISQLFAPGDLPELGLEHRAEDGHEEAMETEASTSGEVAEVAEEAMETESSEKVGKETSELGGSDVSILDTTRLLRSCVQSAVGMLRDQNESCTRNMRRVVLLLGLLNEDDACHASFLRVSKMRLSVFLKKQEESQFHPLEWLAREACNQDALQEAGTFRHTLWKRVQGAVTPLLASMISFIDRDGNLELLTRPDTPPWARDLWMFIFSDTMLLNIPLVMNNERHKGEMAYIVVQNHMNLSENASNNVPFSWKIKDYLEELWVQAQYITDAEGLPKKFVDIFQQTPLGRFLAQLHGEPQQELLQCYLKDFILLTMRVSTEEELKFLQMALWSCTRKLKAASEAPEEEVSLPWVHLAYQRFRSRLQNFSRILTIYPQVLHSLMEARWNHELAGCEMTLDAFAAMACTEMLTRNTLKPSPQAWLQLVKNLSMPLELICSDEHMQGSGSLAQAVIREVRAQWSRIFSTALFVEHVLLGTESRVPELQGLVTEHVFLLDKCLRENSDVKTHGPFEAVMRTLCECKETASKTLSRFGIQPCSICLGDAKDPVCLPCDHVHCLRCLRAWFASEQMICPYCLTALPDEFSPAVSQAHREAIEKHARFRQMCNSFFVDLVSTICFKDNAPPEKEVIESLLSLLFVQKGRLRDAAQRHCEHTKSLSPFNDVVDKTPVIRSVILKLLLKYSFHDVKDYIQEYLTLLKKKAFITEDKTELYMLFINCLEDSILEKTSAYSRNDELNHLEEEGRFLKAYSPASRGREPANEASVEYLQEVARIRLCLDRAADFLSEPEGGPEMAKEKQCYLQQVKQFCIRVENDWHRVYLVRKLSSQRGMEFVQGLSKPGRPHQWVFPKDVVKQQGLRQDHPGQMDRYLVYGDEYKALRDAVAKAVLECKPLGIKTALKACKTPQSQQSAYFLLTLFREVAILYRSHNASLHPTPEQCEAVSKFIGECKILSPPDISRFATSLVDNSVPLLRAGPSDSNLDGTVTEMAIHAAAVLLCGQNELLEPLKNLAFSPATMAHAFLPTMPEDLLAQARRWKGLERVHWYTCPNGHPCSVGECGRPMEQSICIDCHAPIGGIDHKPRDGFHLVKDKADRTQTGHVLGNPQRRDVVTCDRGLPPVVFLLIRLLTHLALLLGASQSSQALINIIKPPVRDPKGFLQQHILKDLEQLAKMLGHSADETIGVVHLVLRRLLQEQHQLSSRRLLNFDTELSTKEMRNNWEKEIAAVISPELEHLDKTLPTMNNLISQDKRISSNPVAKIIYGDPVTFLPHLPRKSVVHCSKIWSCRKRITVEYLQHIVEQKNGKERVPILWHFLQKEAELRLVKFLPEILALQRDLVKQFQNVQQVEYSSIRGFLSKHSSDGLRQLLHNRITVFLSTWNKLRRSLETNGEINLPKDYCSTDLDLDTEFEILLPRRRGLGLCATALVSYLIRLHNEIVYAVEKLSKENNSYSVDAAEVTELHVISYEVERDLTPLILSNCQYQVEEGRETVQEFDLEKIQRQIVSRFLQGKPRLSLKGIPTLVYRHDWNYEHLFMDIKNKMAQDSLPSSVISAISGQLQSYSDACEVLSVVEVTLGFLSTAGGDPNMQLNVYTQDILQMGDQTIHVLKALNRCQLKHTIALWQFLSAHKSEQLLRLHKEPFGEISSRYKADLSPENAKLLSTFLNQTGLDAFLLELHEMIILKLKNPQTQTEERFRPQWSLRDTLVSYMQTKESEILPEMASQFPEEILLASCVSVWKTAAVLKWNREMR

SEQ ID NO: 44604 - protein, 5159 aa, Homo sapiens [sequence omitted]

SEQ ID NO: 44605 - protein, 373 aa, Homo sapiens
MPSASHGPPTLGNLLPGAIPGPRAVRHQPGQAGGGWDELDSGPSSQNSSQNSDLSRVSDSGSHSGSDSHSGASREPGDLAERVEVVALSDCQQELSLVRTVTRGPRAFLSREEAQHFIKACGLLNCEAVLQLLTCHLRGTSECTQLRALCAIASLGSSDLLPQEHILLRTRPWLQELSMGSPGPVTNKATKILRHFEASCGQLSPARGTSAEPGPTAALPGPSDLLTDAVPLPGSQVFLQPLSSTPVSSRSPAPSSGMPSSPVPTPPPDASPIPAPGDPSEAEARLAESRRWRPERIPGGTDSPKRGPSSCAWSRDSLFAGMELVACPRLVGAGAAAGESCPDAPRAPQTSSQRTAAKEPPGSEPSAFAFLNA

SEQ ID NO: 44606 - protein, 161 aa, Homo sapiens
MQQEAQHVLFLSKNQAIRQPEVQAAPKEKSEQKKAKKAFQKRRLDKVRRKKEEKAADRLEQELLRDTVKFGEVVLQPPELTARPQRSVSKDQPGRRSQMLRMLLSPGGVSQPLTASLARQRIVEEERERAVQAYRALKQRQQQLHGERPHLTSRKKPEPQL

SEQ ID NO: 44607 - protein, 257 aa, Homo sapiens
MADKMDMSLDDIIKLNRSQRGGRGGGRGRGRAGSQGGRGGGAQAAARVNRGGGPIRNRPAIARGAAGGGGRNRPAPYSRPKQLPDKWQHDLFDSGFGGGAGVETGGKLLVSNLDFGVSDADIQELFAEFGTLKKAAVHYDRSGRSLGTADVHFERKADALKAMKQYNGVPLDGRPMNIQLVTSQIDAQRRPAQSVNRGGMTRNRGAGGFGGGGGTRRGTRGGARGRGRGAGRNSKQQLSAEELDAQLDAYNARMDTS

SEQ ID NO: 44608 - protein, 375 aa, Homo sapiens
MVHYGHSNQLRQARAMGDYLIVGVHTDEEIAKHKGPPVFTQEERYKMVQAIKWVDEVVPAAPYVTTLETLDKYNCDFCVHGNDITLTVDGRDTYEEVKQAGRYRECKRTQGVSTTDLVGRMLLVTKAHHSSQEMSSEYREYADSFGKPPHPIPAGDILSSEGCSQCPGGRNPWTGVSQFLQTSQKIIQFASGKEPQPGETVIYVAGAFDLFHIGHVDFLEKVHRLAERPYIIAGLHFDQEVNHYKGKNYPIMNLHERTLSVLACRYVSEVVIGAPYAVTAELLSHFKVDLVCHGKTEIIPDRDGSDPYQEPKRRGIFRQIDSGSNLTTDLIVQRIITNRLEYEARNQKKEAKELAFLEAARQQAAQPLGERDGDF

SEQ ID NO: 44609 - protein, 335 aa, Homo sapiens
MVHYGHSNQLRQARAMGDYLIVGVHTDEEIAKHKGPPVFTQEERYKMVQAIKWVDEVVPAAPYVTTLETLDKYNCDFCVHGNDITLTVDGRDTYEEVKQAGRYRECKRTQGVSTTDLVGRMLLVTKAHHSSQEMSSEYREYADSFGKCPGGRNPWTGVSQFLQTSQKIIQFASGKEPQPGETVIYVAGAFDLFHIGHVDFLEKVHRLAERPYIIAGLHFDQEVNHYKGKNYPIMNLHERTLSVLACRYVSEVVIGAPYAVTAELLSHFKEPKRRGIFRQIDSGSNLTTDLIVQRIITNRLEYEARNQKKEAKELAFLEAARQQAAQPLGERDGDF

SEQ ID NO: 44610 - protein, 196 aa, Homo sapiens [sequence omitted]

SEQ ID NO: 44611 - protein, 478 aa, Homo sapiens
MRLVHLDLKGAPPKVSYLSEIFPLFRALGANGLLIEYEDMFPYEGPLRLLRAKYAYSPSEIKEILHLAGLNELEVIPLVQTFGHMEFVLKHTAFAHLREVGSFPCTLNPHEAESLALVGAMIDQVLELHPGAQRLHIGCDEVYYLGEGEASRRWLQQEQNSTGKLCLSHMRAVASGVKARRPSVTPLVWDDMLRDLPEDQLAASGVPQLVEPVLWDYTADLDVHGKVLLMQKYRRCGFPQLWAASAFKGATGPSQAVPPVEHHLRNHVQWLQVAGSGPTDSLQGIILTGWQRYDHYSVLCELLPAGVPSLAACLQLLLRGGFDEDVKAKVENLLGISSLEKTDPVREGAGSFPGSNILALVTQVSLHLRSSVDALLEGNRYVTGWFSPYHRQRKLIHPVMVQHIQPAALSLLAQWSTLVQELEAALQLAFYPDAVEEWLEENVHPSLQRLQALLQDLSEVSAPPLPPTSPGRDVAQDP

SEQ ID NO: 44612 - protein, 577 aa, Homo sapiens
MRLVHLDLKGAPPKVSYLSEIFPLFRALGANGLLIEYEDMFPYEGPLRLLRAKYAYSPSEIKEILHLAGLNELEVIPLVQTFGHMEFVLKHTAFAHLREVGSFPCTLNPHEAESLALVGAMIDQVLELHPGAQRLHIGCDEVYYLGEGEASRRWLQQEQNSTGKLCLSHMRAVASGVKARRPSVTPLVWDDMLRDLPEDQLAASGVPQLVEPVLWDYTADLDVHGKVLLMQKYRRCGFPQLWAASAFKGATGPSQAVPPVEHHLRNHVQWLQVAGSGPTDSLQGIILTGWQRYDHYSVLCELLPAGVPSLAACLQLLLRGGFDEDVKAKVENLLGISSLEKTDPVRQAPCSPPCPLLPLPFPRPWRQLFSAGLSAGRGPAPSLAATSLPLSHKSASICAALWMRCWRATGMSLAGSAPTTASGSSSTRSWFSTSSPQRSASWHSGAPSCRSWRLPCSWLSTRMPWRSGWRKTCTPACSGCKLCCRTSARCLPPRCHPPALAGTLLRTPEGRAHARGLLLEAGGALHCQMAWAIRAHVGVVPSGPAVSCPHSVPEGPGQPLGERLENTEGSSTGRPAL

SEQ ID NO: 44613 - protein, 290 aa, Homo sapiens [sequence omitted]

SEQ ID NO: 44614 - protein, 612 aa, Homo sapiens
MKKRSVTIGRNSSQGSVDVSMGHSSFISRRHLEIFTPPGGGGHGGAAPELPPAQPRPDAGGDFYLRCLGKNGVFVDGVFQRRGAPPLQLPRVCTFRFPSTNIKITFTALSSEKREKQEASESPVKAVQPHISPLTINIPDTMAHLISPLPSPTGTISAANSCPSSPRGAGSSGYKVGRVMPSDLNLMADNSQPENEKEASGGDSPKDDSKPPYSYAQLIVQAITMAPDKQLTLNGIYTHITKNYPYYRTADKGWQNSIRHNLSLNRYFIKVPRSQEEPGKGSFWRIDPASESKLIEQAFRKRRPRGVPCFRTPLGPLSSRSAPASPNHAGVLSAHSSGAQTPESLSREGSPAPLEPEPGAAQPKLAVIQEARFAQSAPGSPLSSQPVLITVQRQLPQAIKPVTYTVATPVTTSTSQPPVVQTVHVVHQIPAVSVTSVAGLAPANTYTVSGQAVVTPAAVLAPPKAEAQENGDHREVKVKVEPIPAIGHATLGTASRIIQTAQTTPVQTVTIVQQAPLGQHQLPIKTVTQNGTHVASVPTAVHGQVNNAAASPLHMLATHASASASLPTKRHNGDQPEQPELKRIKTEDGEGIVIALSVDTPPAAVREKGVQN

SEQ ID NO: 44615 - protein, 180 aa, Homo sapiens
MENGFRVYNTDPLKEKEKQEFLEGGVGHVEMLFRCNYLALVGGGKKPKYPPNKVMIWDDLKKKTVIEIEFSTEVKAVKLRRDRIVVVLDSMIKVFTFTHNPHQLHVFETCYNPKGLCVLCPNSNNSLLAFPGTHTGHVQLVDLASTEKPPVDIPAHEGVLSCIALNLQGTRIATASEKGI

SEQ ID NO: 44616 - protein, 1111 aa, Homo sapiens
MNLLLDIVQDQTSPASLVHLAFKFLYIITKVRGYKTFLRLFPHEVADVEPVLDLVTIQNPKDHEAWETRYMLLLWLSVTCLIPFDFSRLDGNLLTQPGQARMSIMDRILQIAESYLIVSDKARDAAAVLVSRFITRPDVKQSKMAEFLDWSLCNLARSSFQTMQGVITMDGTLQALAQIFKHGKREDCLPYAATVLRCLDGCRLPESNQTLLRKLGVKLVQRLGLTFLKPKVAAWRYQRGCRSLAANLQLLTQGQSEQKPLILTEDDDEDDDVPEGVERVIEQLLVGLKDKDTVVRWSAAKGIGRMAGRLPRALADDVVGSVLDCFSFQETDKAWHGGCLALAELGRRGLLLPSRLVDVVAVILKALTYDEKRGACSVGTNVRDAACYVCWAFARAYEPQELKPFVTAISSALVIAAVFDRDINCRRAASAAFQENVGRQGTFPHGIDILTTADYFAVGNRSNCFLVISVFIAGFPEYTQPMIDHLVTMKISHWDGVIRELAARALHNLAQQAPEFSATQVFPRLLSMTLSPDLHMRHGSILACAEVAYALYKLAAQENRPVTDHLDEQAVQGLKQIHQQLYDRQLYRGLGGQLMRQAVCVLIEKLSLSKMPFRGDTVIDGWQWLINDTLRHLHLISSHSRQQMKDAAVSALAALCSEYYMKEPGEADPAIQEELITQYLAELRNPEEMTRCGFSLALGALPGFLLKGRLQQVLTGLRAVTHTSPEDVSFAESRRDGLKAIARICQTVGVKAGAPDEAVCGENVSQIYCALLGCMDDYTTDSRGDVGTWVRKAAMTSLMDLTLLLARSQPELIEAHTCERIMCCVAQQASEKIDRFRAHAASVFLTLLHFDSPPIPHVPHRGELEKLFPRSDVASVNWSAPSQAFPRITQLLGLPTYRYHVLLGLVVSLGGLTESTIRHSTQSLFEYMKGIQSDPQALGSFSGTLLQIFEDNLLNERVSVPLLKTLDHVLTHGCFDIFTTEEDHPFAVKLLALCKKEIKNSKDIQKLLSGIAVFCEMVQFPGDVRRQALLQLCLLLCHRFPLIRKTTASQVYETLLTYSDVVGADVLDEVVTVLSDTAWDAELAVVREQRNRLCDLLGVPRPQLVPQPGAC

SEQ ID NO: 44617 - protein, 468 aa, Homo sapiens
MVFKAQLFALTGVQPARQKVMVKGGTLKDDDWGNIKIKNGMTLLMMGSADALPEEPSAKTVFVEDMTEEQLASAMELPCGLTNLGNTCYMNATVQCIRSVPELKDALKRYAGALRASGEMASAQYITAALRDLFDSMDKTSSSIPPIILLQFLHMAFPQFAEKGEQGQYLQQDANECWIQMMRVLQQKLEAIEDDSVKETDSSSASAATPSKKKSLIDQFFGVEFETTMKCTESEEEEVTKGKENQLQLSCFINQEVKYLFTGLKLRLQEEITKQSPTLQRNALYIKSSKISRLPAYLTIQMVRFFYKEKESVNAKVLKDVKFPLMLDMYELCTPELQEKMVSFRSKFKDLEDKKVNQQPNTSDKKSSPQKEVKYEPFSFADDIGSNNCGYYDLQAVLTHQGRSSSSGHYVSWVKRKQDEWIKFDDDKVSIVTPEDILRLSGGGDWHIAYVLLYGPRRVEIMEEESEQ

SEQ ID NO: 44618 - protein, 671 aa, Homo sapiens
METSRQTYDDKLTAVESDLKKLGDQTGKKAISTNSELSTFRSDILDLRQQLREITEKTSKNKDTLEKLQASGDALVDRQSQLKETLENNSFLITTVNKTLQAYNGYVTNLQQDTSVLQGNLQNQMYSHNVVIMNLNNLNLTQVQQRNLITNLQRSVDDTSQAIQRIKNDFQNLQQVFLQAKKDTDWLKEKVQSLQTLAANNSALAKANNDTLEDMNSQLNSFTGQMENITTISQANEQNLKDLQDLHKDAENRTAIKFNQLEERFQLFETDIVNIISNISYTAHHLRTLTSNLNEVRTTCTDTLTKHTDDLTSLNNTLANIRLDSVSLRMQQDLMRSRLDTEVANLSVIMEEMKLVDSKHGQLIKNFTILQGPPGPRGPRGDRGSQGPPGPTGNKGQKGEKGEPGPPGPAGERGPIGPAGPPGERGGKGSKGSQGPKGSRGSPGKPGPQGSSGDPGPPGPPGKEGLPGPQGPPGFQGLQGTVGEPGVPGPRGLPGLPGVPGMPGPKGPPGPPGPSGAVVPLALQNEPTPAPEDNGCPPHWKNFTDKCYYFSVEKEIFEDAKLFCEDKSSHLVFINTREEQQWIKKQMVGRESHWIGLTDSERENEWKWLDGTSPDYKNWKAGQPDNWGHGHGPGEDCAGLIYAGQWNDFQCEDVNNFICEKDRETVLSSAL

SEQ ID NO: 44619 - protein, 416 aa, Homo sapiens
MHTDPDYSAAYVVIETDAEDGIKGCGITFTLGKGTEVVVCAVNALAHHVLNKDLKDIVGDFRGFYRQLTSDGQLRWIGPEKGVVHLATAAVLNAVWDLWAKQEGKPVWKLLVDMDPRMLVSCIDFRYITDVLTEEDALEILQKGQIGKKEREKQMLAQGYPAYTTSCAWLGYSDDTLKQLCAQALKDGWTRFKVKVGADLQDDMRRCQIIRDMIGPEKTLMMDANQRWDVPEAVEWMSKLAKFKPLWIEEPTSPDDILGHATISKALVPLGIGIATGEQCHNRVIFKQLLQAKALQFLQIDSCRLGSVNENLSVLLMAKKFEIPVCPHAGGVGLCELVQHLIIFDYISVSASLENRVCEYVDHLHEHFKYPVMIQRASYMPPKDPGYSTEMKEESVKKHQYPDGEVWKKLLPAQEN

SEQ ID NO: 44620 - protein, 423 aa, Homo sapiens
MDSVSSSGVCAAFIASDSSTKPENDDGGNYEMFTRKFVFRPELFDVTKPYITPAVHKECQQSNEKEDLMNGVKKEISISIIGKKRKRCVVFNQGELDAMEYHTKIRELILDGSLQLIQEGLKSGFLYPLFEKQDKGSKPITLPLDACSLSELCEMAKHLPSLNEMEHQTLQLVEEDTSVTEQDLFLRVVENNSSFTKVITLMGQKYLLPPKSSFLLSDISCMQPLLNYRKTFDVIVIDPPWQNKSVKRSNRYSYLSPLQIQQIPIPKLAAPNCLLVTWVTNRQKHLRFIKEELYPSWSVEVVAEWHWVKITNSGEFVFPLDSPHKKPYEGLILGRVQEKTALPLRNADVNVLPIPDHKLIVSVPCTLHSHKPPLAEVLKDYIKPDGEYLELFARNLQPGWTSWGNEVLKFQHVDYFIAVESGS

SEQ ID NO: 44621 - protein, 370 aa, Homo sapiens
MDSVSSSGVCAAFIASDSSTKPENDDGGNYEMFTRKFVFRPELFDVTKPYITPAVHKECQQSNEKEDLMNGVKKEISISIIGKKRKRCVVFNQGELDAMEYHTKIRELILDGSLQLIQEGLKSGFLYPLFEKQDKGSKPITLPLDACSLSELCEMAKHLPSLNEMEHQTLQLVEEDTSVTEQDLFLRVVENNSSFTKVITLMGQKYLLPPKSSFLLSDISCMQPLLNYRKTFDVIVIDPPWQNKSVKRSNRYSYLSPLQIQQIPIPKLAAPNCLLVTWVTNRQKHLRFIKEELYPSWSVEVVAEWHWVKITNSGEFVFPLDSPHKKPYEGLILGRVQEKTALPLRGFKRLHQARWGIFGVVCSKFTARLD

SEQ ID NO: 44622 - protein, 1877 aa, Homo sapiens [sequence omitted]

SEQ ID NO: 44623 - protein, 146 aa, Homo sapiens [sequence omitted]

SEQ ID NO: 44624 - protein, 77 aa, Homo sapiens
MDYFGGLPPGQYATRMTGQVHGSGCHLRSAPCDLGASQRKLSSNFSEIDAGLFSQGKSAAYTDIGATKPVEQRETAS

SEQ ID NO: 44625 - protein, 29 aa, Homo sapiens
MTFFEARFSKDILKVAFLISCLTGWRSSS

SEQ ID NO: 44626 - protein, 209 aa, Homo sapiens [sequence omitted]

SEQ ID NO: 44627 - protein, 553 aa, Homo sapiens [sequence omitted]

SEQ ID NO: 44628 - protein, 122 aa, Homo sapiens [sequence omitted]

SEQ ID NO: 44629 - protein, 287 aa, Homo sapiens
MAKHEQILVLDPPTDLKFKGPFTDVVTTNLKLRNPSDRKVCFKVKTTAPRRYCVRPNSGIIDPGSTVTVSVMLQPFDYDPNEKSKHKFMVQTIFAPPNTSDMEAVWKEAKPDELMDSKLRCVFEMPNENDKLGITPPGNAPTVTSMSSINNTVATPASYHTKDDPRGLSVLKQEKQKNDMEPSKAVPLNASKQDGPMPKPHSVSLNDTETRKLMEECKRLQGEMMKLSEENRHLRDEGLRLRKVAHSDKPGSTSTASFRDNVTSPLPSLLVVIAAIFIGFFLGKFIL

SEQ ID NO: 44630 - protein, 446 aa, Homo sapiens [sequence omitted]

SEQ ID NO: 44631 - protein, 225 aa, Homo sapiens [sequence omitted]

SEQ ID NO: 44632 - protein, 394 aa, Homo sapiens [sequence omitted]

SEQ ID NO: 44633 - protein, 149 aa, Homo sapiens
MVNSVALNGDGCGICSETEAELIEVSHRLNCSREQARGSSRCGPGPLLPTSAPVLLQHYPLYRRSDANCSGEDAAPAEERDIPFKENYDVLSREASQKLLWWLQPRLVLSGHTHSACEVHHGGRVPELSVPSFSWRNRNNPSFIMGTDA

SEQ ID NO: 44634 - protein, 168 aa, Homo sapiens
MTGKSKPLEFGVIYHCTEERLYTGRRGRGAFCNGQRLRVSGETDLSKALVLTEIGPKRDPATLKLFLSNMERLLHAKAHGVRVIGSSTLALCHLASGAADAYYQFGLHCWDLAAATVIIREAGGIVIDTSGGPLDLMACRVVAASTREMAMLIAQALQTINYGRDDEK

SEQ ID NO: 44635 - protein, 22 aa, Homo sapiens
MDSVRSGPFGQLFRPDNFIFGV

SEQ ID NO: 44636 - protein, 543 aa, Homo sapiens [sequence omitted]

SEQ ID NO: 44637 - protein, 246 aa, Homo sapiens [sequence omitted]

SEQ ID NO: 44638 - protein, 235 aa, Homo sapiens
MGLMLATCSADGIVRIYEAPDVMNLSQWSLQHEISCKLSCSCISWNPSSSRAHSPMIAVGSDDSSPNAMAKVQIFEYNENTRKYAKAETLMTVTDPVHDIAFAPNLGRSFHILAIATKDVRIFTLKPVRKELTSSGGPTKFEIHIVAQFDNHNSQVWRVSWNITGTVLASSGDDGCVRLWKANYMDNWKCTGILKGNGSPVNGSSQQGTSNPSLGSTIPSLQNSLNGSSAGRKHS

SEQ ID NO: 44639 - protein, 1251 aa, Homo sapiens
MKLLSKFEMIKRSDSAFFWEERDIMAFANSPWVVQLFYAFQDDRYLYMVMEYMPGGDLVNLMSNYDVPEKWARFYTAEVVLALDAIHSMGFIHRDVKPDNMLLDKSGHLKLADFGTCMKMNKEGMVRCDTAVGTPDYISPEVLKSQGGDGYYGRECDWWSVGVFLYEMLVGDTPFYADSLVGTYSKIMNHKNSLTFPDDNDISKEAKNLICAFLTDREVRLGRNGVEEIKRHLFFKNDQWAWETLRDTVAPVVPDLSSDIDTSNFDDLEEDKGEEETFPIPKAFVGNQLPFVGFTYYSNRRYLSSANPNDNRTSSNADKSLQESLQKTIYKLEEQLHNEMQLKDEMEQKCRTSNIKLDKIMKELDEEGNQRRNLESTVSQIEKEKMLLQHRINEYQRKAEQENEKRRNVENEVSTLKDQLEDLKKVSQNSQLANEKLSQLQKQLEEANDLLRTESDTAVRLRKSHTEMSKSISQLESLNRELQERNRILENSKSQTDKDYYQLQAILEAERRDRGHDSEMIGDLQARITSLQEEVKHLKHNLEKVEGERKEAQDMLNHSEKEKNNLEIDLNYKLKSLQQRLEQEVNEHKVTKARLTDKHQSIEEAKSVAMCEMEKKLKEEREAREKAENRVVQIEKQCSMLDVDLKQSQQKLEHLTGNKERMEDEVKNLTLQLEQESNKRLLLQNELKTQAFEADNLKGLEKQMKQEINTLLEAKRLLEFELAQLTKQYRGNEGQMRELQDQLEAEQYFSTLYKTQVKELKEEIEEKNRENLKKIQELQNEKETLATQLDLAETKAESEQLARGLLEEQYFELTQESKKAASRNRQEITDKDHTVSRLEEANSMLTKDIEILRRENEELTEKMKKAEEEYKLEKEEEISNLKAAFEKNINTERTLKTQAVNKLAEIMNRKDFKIDRKKANTQDLRKKEKENRKLQLELNQEREKFNQMVVKHQKELNDMQAQLVEECAHRNELQMQLASKESDIEQLRAKLLDLSDSTSVASFPSADETDGNLPESRIEGWLSVPNRGNIKRYGWKKQYVVVSSKKILFYNDEQDKEQSNPSMVLDIDKLFHVRPVTQGDVYRAETEEIPKIFQILYANEGECRKDVEMEPVQQAEKTNFQNHKGHEFIPTLYHFPANCDACAKPLWHVFKPPPALECRRCHVKCHRDHLDKKEDLICPCKVSYDVTSARDMLLLACSQDEQKKWVTHLVKKIPKNPPSGFVRASPRTLSTRSTANQSFRKVVKNTSGKTS

SEQ ID NO: 44640 - protein, 1838 aa, Homo sapiens
MEDDEDDEEMSDSNSPPIPYSQKPAPEGSCTTDGFCQAGKDLRLVSLCMEQIDIPAGFLLVGAKSPNLPEHILVCAVDKRFLPDDHGKNALLGFSGNCIGCGERGFRYFTEFSNHINLKLTTQPKKQKHLKYYLVRSSQGVLSKGPLICWKECRSRQSSASCHSIKPSSSVSSTVTPENGTTNGYKSGFTQTDAANGNSSHGGKGSASSSTPAHTGNYSLSPRPSYASGDQATMFISGPPKKRHRGWYPGSPLPQPGLVVPVPTVRPLSRTEPLLSAPVPQTPLTGILQPRPIPAGETVIVPENLLSNSGVRPVILIGYGTLPYFYGNVGDIVVSPLLVNCYKIPQLENKDLEKLGLTGSQFLSVENMILLTIQYLVRLGPDQVPLREEFEQIMLKAMQEFTLRERALQIGAQCVPVSPGQLPWLARLIASVSQDLVHVVVTQNSLAEGISETLRTLSEMRHYQRLPDYVVVICASKIRGNEFCVVVLGQHQSRALAESMLTTSEFLKEISYELITGKVSFLASHFKTTSLGDDLDKLLEKMQQRRGDSVVTPFDGDLNECVSPQEAAAMIPTQNLDLDNETFHIYQPQLTVARKLLSQVCAIADSGSQSLDLGHFSKVDFIIIVPRSEVLVQQTLQRIRQSGVLVDLGLEENGTAHQRAEKYVVRLDNEIQTKFEVFMRRVKQNPYTLFVLVHDNSHVELTSVISGSLSHSEPSHGLADRVINCREVLEAFNLLVLQVSSFPYTLQTQQSRISSSNEVHWIQLDTGEDVGCEEKLYFGLSEYSKSLQWGITSPLLRCDETFEKMVNTLLERYPRLHSMVVRCYLLIQQYSEALMALTTMASLRDHSTPETLSIMDDLISSPGKNKSGRGHMLIIRVPSVQLAMLAKERLQEVRDKLGLQYRFEIILGNPATELSVATHFVARLKSWRGNEPEEWIPRTYQDLDGLPCIVILTGKDPLGETFPRSLKYCDLRLIDSSYLTRTALEQEVGLACCYVSKEVIRGPTVALDLSGKEQERAAVSENDSDELLIDLERPQSNSSAVTGTSGSIMENGVSSSSTADKSQKQSLTPSFQSPATSLGLDEGVSASSAGAGAGETLKQECDSLGPQMASSTTSKPSSSSSGPRTLPWPGQPIRGCRGPQAALPPVVILSKAAYSLLGSQKSGKLPSSSSLLPHADVAWVSSLRPLLNKDMSSEEQSLYYRQWTLARQHHADYSNQLDPASGTRNFHPRRLLLTGPPQVGKTGSYLQFLRILFRMLIRLLEVDVYDEEEINTDHNESSEVSQSEGEPWPDIESFSKMPFDVSVHDPKYSLMSLVYTEKLAGVKQEVIKESKVEEPRKRETVSIMLTKYAAYNTFHHCEQCRQYMDFTSASQMSDSTLHAFTFSSSMLGEEVQLYFIIPKSKESHFVFSKQGKHLESMRLPLVSDKNLNAVKSPIFTPSSGRHEHGLLNLFHAMEGISHLHLLVVKEYEMPLYRKYWPNHIMLVLPGMFNNAGVGAARFLIKELSYHNLELERNRLEELGIKRQCVWPFIVMMDDSCVLWNIHSVQEPSSQPMEVGVSSKNVSLKTVLQHIEATPKIVHYAILGIQKWSSKLTSQSLKAPFSRCHVHDFILLNTDLTQNVQYDFNRYFCEDADFNLRTNSSGLLICRFNNFSLMKKHVQVGGQRDFIIKPKIMVSESLAPILPLQYICAPDSEHTLLAAPAQFLLEKFLQHASYKLFPKAIHNFRSPVLAIDCYLNIGPEVAICYISSRPHSSNVNCEGVFFSGLLLYLCDSFVGADLKKFKFLKGATLCVICQDRSSLRQTIVRLELEDEWQFRLRDEFQTANSSDDKPLYFLTGRHV

SEQ ID NO: 44641 - protein, 112 aa, Homo sapiens
MKLSHETVTIELKNGTQVHGTITGVDVSMNTHLKAVKMTLKNREPVQLETLSIRGNNIRYFILPDSLPLDTLLVDVEPKVKSKKREAVAGRGRGRGRGRGRGRGRGRGGPRR

SEQ ID NO: 44642 - protein, 400 aa, Homo sapiens [sequence omitted]

SEQ ID NO: 44643 - protein, 449 aa, Homo sapiens
MYQTLAALSSQGPAAYDGAPGGFVHSAAAAAAAAAAASSPVYVPTTRVGSMLPGLPYHLQGSGSGPANHAGGAGAHPGWPQASADSPPYGSGGGAAGGGAAGPGGAGSAAAHVSARFPYSPSPPMANGAAREPGGYAAAGSGGAGGVSGGGSSLAAMGGREPQYSSLSAARPLNGTYHHHHHHHHHHPSPYSPYVGAPLTPAWPAGPFETPVLHSLQSRAGAPLPVPRGPSADLLEDLSESRECVNCGSIQTPLWRRDGTGHYLCNACGLYSKMNGLSRPLIKPQKRVPSSRRLGLSCANCHTTTTTLWRRNAEGEPVCNACGLYMKLHGVPRPLAMKKEGIQTRKRKPKNINKSKTCSGNSNNSIPMTPTSTSSNSDDCSKNTSPTTQPTASGAGAPVMTGAGESTNPENSELKYSGQDGLYIGVSLASPAEVTSSVRPDSWCALALA

SEQ ID NO: 44644 - protein, 179 aa, Homo sapiens
MDYDPNLLDDPQWPCGKHKRVLIFPSYMTTVIDYVKPSDLKKDMNETFKEKFPHIKLTLSKIRSLKREMRKLAQEDCGLEEPTVAMAFVYFEKLALKGKLNKQNRKLCAGACVLLAAKIGSDLKKHEVKHLIDKLEEKFRLNRRELIAFEFPVLVALEFALHLPEHEVMPHYRRLVQSS

SEQ ID NO: 44645 - protein, 441 aa, Homo sapiens
MLAQMLQMEYDREYDAQLRREEKKFNGDSKVSISFENYRKVHPYEDSDSSEDEVDWQDTRDDPYRPAKPVPTPKKGFIGKGKDITTKHDEVVCGRKNTARMENFAPEFQVGDGIGMDLKLSNHVFNALKQHAYSEERRSARLHEKKEHSTAEKAVDPKTRLLMYKMVNSGMLETITGCISTGKESVVFHAYGGSMEDEKEDSKVIPTECAIKVFKTTLNEFKNRDKYIKDDFRFKDRFSKLNPRKIIRMWAEKEMHNLARMQRAGIPCPTVVLLKKHILVMSFIGHDQVPAPKLKEVKLNSEEMKEAYYQTLHLMRQLYHECTLVHADLSEYNMLWHAGKVWLIDVSQSVEPTHPHGLEFLFRDCRNVSQFFQKGGVKEALSERELFNAVSGLNITADNEADFLAEIEALEKMNEDHVQKNGRKAASFLKDDGDPPLLYDE

SEQ ID NO: 44646 - protein, 2400 aa, Homo sapiens
MVDLSGREVELHLRLRIPQVGHYVVVVEYSTEAAQLFVVDVNVKSSGSVLAGQVNIYSCNYSVLCRSAVIDHMSRIAMYELLADADIQLKGHMARFLLHQVCIIPIEEFSAEYVRPQVHCIASYGRFVNQSATCVSLAHETPPTALILDVLSGRPFPHLPQQSSPSVDVLPGVTLKAPQNQVTLRGRVPHLGRYVFVIHFYQAAHPTFPAQVSVDGGWPRAGSFHASFCPHVLGCRDQVIAEGQIEFDISEPEVAATVKVPEGKSLVLVRVLVVPAENYDYQILHKKSMDKSLEFITNCGKNSFYLDPQTASRFCKNSARSLVAFYHKGALPCECHPTGATGPHCSPEGGQCPCQPNVIGRQCTRCATGHYGFPRCKPCSCGRRLCEEMTGQCRCPPRTVRPQCEVCETHSFSFHPMAGCEGCNCSRRGTIEAAMPECDRDSGQCRCKPRITGRQCDRCASGFYRFPECVPCNCNRDGTEPGVCDPGTGACLCKENVEGTECNVCREGSFHLDPANLKGCTSCFCFGVNNQCHSSHKRRTKFVDMLGWHLETADRVDIPVSFNPGSNSMVADLQELPATIHSASWVAPTSYLGDKVSSYGGYLTYQAKSFGLPGDMVLLEKKPDVQLTGQHMSIIYEETNTPRPDRLHHGRVHVVEGNFRHASSRAPVSREELMTVLSRLADVRIQGLYFTETQRLTLSEVGLEEASDTGSGRIALAVEICACPPAYAGDSCQGCSPGYYRDHKGLYTGRCVPCNCNGHSNQCQDGSGICVNCQHNTAGEHCERCQEGYYGNAVHGSCRACPCPHTNSFATGCVVNGGDVRCSCKAGYTGTQCERCAPGYFGNPQKFGGSCQPCSCNSNGQLGSCHPLTGDCINQEPKDSSPAEECDDCDSCVMTLLNDLATMGEQLRLVKSQLQGLSASAGLLEQMRHMETQAKDLRNQLLNYRSAISNHGSKIEGLERELTDLNQEFETLQEKAQVNSRKAQTLNNNVNRATQSAKELDVKIKNVIRNVHILLKQISGTDGEGNNVPSGDFSREWAEAQRMMRELRNRNFGKHLREAEADKRESQLLLNRIRTWQKTHQGENNGLANSIRDSLNEYEAKLSDLRARLQEAAAQAKQANGLNQENERALGAIQRQVKEINSLQSDFTKYLTTADSSLLQTNIALQLMEKSQKEYEKLAASLNEARQELSDKVRELSRSAGKTSLVEEAEKHARSLQELAKQLEEIKRNASGDELVRCAVDAATAYENILNAIKAAEDAANRAASASESALQTVIKEDLPRKAKTLSSNSDKLLNEAKMTQKKLKQEVSPALNNLQQTLNIVTVQKEVIDTNLTTLRDGLHGIQRGDIDAMISSAKSMVRKANDITDEVLDGLNPIQTDVERIKDTYGRTQNEDFKKALTDADNSVNKLTNKLPDLWRKIESINQQLLPLGNISDNMDRIRELIQQARDAASKVAVPMRFNGKSGVEVRLPNDLEDLKGYTSLSLFLQRPNSRENGGTENMFVMYLGNKDASRDYIGMAVVDGQLTCVYNLGDREAELQVDQILTKSETKEAVMDRVKFQRIYQFARLNYTKGATSSKPETPGVYDMDGRNSNTLLNLDPENVVFYVGGYPPDFKLPSRLSFPPYKGCIELDDLNENVLSLYNFKKTFNLNTTEVEPCRRRKEESDKNYFEGTGYARVPTQPHAPIPTFGQTIQTTVDRGLLFFAENGDRFISLNIEDGKLMVRYKLNSELPKERGVGDAINNGRDHSIQIKIGKLQKRMWINVDVQNTIIDGEVFDFSTYYLGGIPIAIRERFNISTPAFRGCMKNLKKTSGVVRLNDTVGVTKKCSEDWKLVRSASFSRGGQLSFTDLGLPPTDHLQASFGFQTFQPSGILLDHQTWTRNLQVTLEDGYIELSTSDSGGPIFKSPQTYMDGLLHYVSVISDNSGLRLLIDDQLLRNSKRLKHISSSRQSLRLGGSNFEGCISNVFVQRLSLSPEVLDLTSNSLKRDVSLGGCSLNKPPFLMLLKGSTRFNKTKTFRINQLLQDTPVASPRSVKVWQDACSPLPKTQANHGALQFGDIPTSHLLFKLPQELLKPRSQFAVDMQTTSSRGLVFHTGTKNSFMALYLSKGRLVFALGTDGKKLRIKSKEKCNDGKWHTVVFGHDGEKGRLVVDGLRAREGSLPGNSTISIRAPVYLGSPPSGKPKSLPTNSFVGCLKNFQLDSKPLYTPSSSFGVSSCLGGPLEKGIYFSEEGGHVVLAHSVLLGPEFKLVFSIRPRSLTGILIHIGSQPGKHLCVYLEAGKVTASMDSGAGGTSTSVTPKQSLCDGQWHSVAVTIKQHILHLELDTDSSYTAGQIPFPPASTQEPLHLGGAPANLTTLRIPVWKSFFGCLRNIHVNHIPVPVTEALEVQGPVSLNGCPDQ

SEQ ID NO: 44647 - protein, 1867 aa, Homo sapiens
MPECDRDSGQCRCKPRITGRQCDRCASGFYRFPECVPCNCNRDGTEPGVCDPGTGACLCKENVEGTECNVCREGSFHLDPANLKGCTSCFCFGVNNQCHSSHKRRTKFVDMLGWHLETADRVDIPVSFNPGSNSMVADLQELPATIHSASWVAPTSYLGDKVSSYGGYLTYQAKSFGLPGDMVLLEKKPDVQLTGQHMSIIYEETNTPRPDRLHHGRVHVVEGNFRHASSRAPVSREELMTVLSRLADVRIQGLYFTETQRLTLSEVGLEEASDTGSGRIALAVEICACPPAYAGDSCQGCSPGYYRDHKGLYTGRCVPCNCNGHSNQCQDGSGICVNCQHNTAGEHCERCQEGYYGNAVHGSCRACPCPHTNSFATGCVVNGGDVRCSCKAGYTGTQCERCAPGYFGNPQKFGGSCQPCSCNSNGQLGSCHPLTGDCINQEPKDSSPAEECDDCDSCVMTLLNDLATMGEQLRLVKSQLQGLSASAGLLEQMRHMETQAKDLRNQLLNYRSAISNHGSKIEGLERELTDLNQEFETLQEKAQVNSRKAQTLNNNVNRATQSAKELDVKIKNVIRNVHILLKQISGTDGEGNNVPSGDFSREWAEAQRMMRELRNRNFGKHLREAEADKRESQLLLNRIRTWQKTHQGENNGLANSIRDSLNEYEAKLSDLRARLQEAAAQAKQANGLNQENERALGAIQRQVKEINSLQSDFTKYLTTADSSLLQTNIALQLMEKSQKEYEKLAASLNEARQELSDKVRELSRSAGKTSLVEEAEKHARSLQELAKQLEEIKRNASGDELVRCAVDAATAYENILNAIKAAEDAANRAASASESALQTVIKEDLPRKAKTLSSNSDKLLNEAKMTQKKLKQVNKLTNKLPDLWRKIESINQQLLPLGNISDNMDRIRELIQQARDAASKVAVPMRFNGKSGVEVRLPNDLEDLKGYTSLSLFLQRPNSRENGGTENMFVMYLGNKDASRDYIGMAVVDGQLTCVYNLGDREAELQVDQILTKSETKEAVMDRVKFQRIYQFARLNYTKGATSSKPETPGVYDMDGRNSNTLLNLDPENVVFYVGGYPPDFKLPSRLSFPPYKGCIELDDLNENVLSLYNFKKTFNLNTTEVEPCRRRKEESDKNYFEGTGYARVPTQPHAPIPTFGQTIQTTVDRGLLFFAENGDRFISLNIEDGKLMVRYKLNSELPKERGVGDAINNGRDHSIQIKIGKLQKRMWINVDVQNTIIDGEVFDFSTYYLGGIPIAIRERFNISTPAFRGCMKNLKKTSGVVRLNDTVGVTKKCSEDWKLVRSASFSRGGQLSFTDLGLPPTDHLQASFGFQTFQPSGILLDHQTWTRNLQVTLEDGYIELSTSDSGGPIFKSPQTYMDGLLHYVSVISDNSGLRLLIDDQLLRNSKRLKHISSSRQSLRLGGSNFEGCISNVFVQRLSLSPEVLDLTSNSLKRDVSLGGCSLNKPPFLMLLKGSTRFNKTKTFRINQLLQDTPVASPRSVKVWQDACSPLPKTQANHGALQFGDIPTSHLLFKLPQELLKPRSQFAVDMQTTSSRGLVFHTGTKNSFMALYLSKGRLVFALGTDGKKLRIKSKEKCNDGKWHTVVFGHDGEKGRLVVDGLRAREGSLPGNSTISIRAPVYLGSPPSGKPKSLPTNSFVGCLKNFQLDSKPLYTPSSSFGVSSCLGGPLEKGIYFSEEGGHVVLAHSVLLGPEFKLVFSIRPRSLTGILIHIGSQPGKHLCVYLEAGKVTASMDSGAGGTSTSVTPKQSLCDGQWHSVAVTIKQHILHLELDTDSSYTAGQIPFPPASTQEPLHLGGAPANLTTLRIPVWKSFFGCLRNIHVNHIPVPVTEALEVQGPVSLNGCPDQ

SEQ ID NO: 44648 - protein, 871 aa, Homo sapiens
MGDTPLHRAAFTGRKELVMLLLEYNADTTIVNGSGQTAKEVTHAEEIRSMLEAVERTQQRKLEELLLAAAREGKTTELTALLNRPNPPDVNCSDQLGNTPLHCAAYRAHKQCALKLLRSGADPNLKNKNDQKPLDLAQGAEMKHILVGNKVIYKALKRYEGPLWKSSRFFGWRLFWVVLEHGVLSWYRKQPDAVHNIYRQGCKHLTQAVCTVKSTDSCLFFIKCFDDTIHGFRVPKNSLQQSREDWLEAIEEHSAYSTHYCSQDQLTDEEEEDTVSAADLKKSLEKAQSCQQRLDREISNFLKMIKECDMAKEMLPSFLQKVEVVSEASRETCVALTDCLNLFTKQEGVRNFKLEQEQEKNKILSEALETLATEHHELEQSLVKGSPPASILSEDEFYDALSDSESERSLSRLEAVTARSFEEEGEHLGSRKHRMSEEKDCGGGDALSNGIKKHRTSLPSPMFSRNDFSIWSILRKCIGMELSKITMPVIFNEPLSFLQRLTEYMEHTYLIHKASSLSDPVERMQCVAAFAVSAVASQWERTGKPFNPLLGETYELVRDDLGFRLISEQVSHHPPISAFHAEGLNNDFIFHGSIYPKLKFWGKSVEAEPKGTITLELLEHNEAYTWTNPTCCVHNIIVGKLWIEQYGNVEIINHKTGDKCVLNFKPCGLFGKELHKVEGYIQDKSKKKLCALYGKWTECLYSVDPATFDAYKKNDKKNTEEKKNSKQMSTSEELDEMPVPDSESVFIIPGSVLLWRIAPRPPNSAQMYNFTSFAMVLNEVDKDMESVIPKTDCRLRPDIRAMENGEIDQASEEKKRLEEKQRAARKNRSKSEEDWKTRWFHQGPNPYNGAQDWIYSGSYWDRNYFNLPDIY

SEQ ID NO: 44649 - protein, 302 aa, Homo sapiens
MAAIYGEEWCVIDDCAKIFCIRISDDIDDPKWTLCLQVMLPNEYPGTAPPIYQLNAPWLKGQERADLSNSLEEIYIQNIGESILYLWVEKIRDVLIQKSQMTEPGPDVKKKTEEEDVECEDDLILACQPESSLKALDFDISETRTEVEVEELPPIDHGIPITDRRSTFQAHLAPVVCPKQVKMVLSKLYENKKIASATHNIYAYRIYCEDKQTFLQDCEDDGETAAGGRLLHLMEILNVKNVMVVVSRWYGGILLGPDRFKHINNCARNILVEKNYTNSPEESSKALGKNKKVRKDKKRNEH

SEQ ID NO: 44650 - protein, 1075 aa, Homo sapiens
MEDWKMKDTQKCSQCEEGFDFPEDLQKHIAECHPECSPNEDRAALQCVYCHELFVEETSLMNHMEQVHSGEKKNSCSICSESFHTVEELYSHMDSHQQPESCNHSNSPSLVTVGYTSVSSTTPDSNLSVDSSTMVEAAPPIPKSRGRKRAAQQTPDMTGPSSKQAKVTYSCIYCNKQLFSSLAVLQIHLKTMHLDKPEQAHICQYCLEVLPSLYNLNEHLKQVHEAQDPGLIVSAMPAIVYQCNFCSEVVNDLNTLQEHIRCSHGFANPAAKDSNAFFCPHCYMGFLTDSSLEEHIRQVHCDLSGSRFGSPVLGTPKEPVVEVYSCSYCTNSPIFNSVLKLNKHIKENHKNIPLALNYIHNGKKSRALSPLSPVAIEQTSLKMMQAVGGAPARPTGEYICNQCGAKYTSLDSFQTHLKTHLDTVLPKLTCPQCNKEFPNQESLLKHVTIHFMITSTYYICESCDKQFTSVDDLQKHLLDMHTFVFFRCTLCQEVFDSKVSIQLHLAVKHSNEKKVYRCTSCNWDFRNETDLQLHVKHNHLENQGKVHKCIFCGESFGTEVELQCHITTHSKKYNCKFCSKAFHAIILLEKHLREKHCVFETKTPNCGTNGASEQVQKEEVELQTLLTNSQESHNSHDGSEEDVDTSEPMYGCDICGAAYTMETLLQNHQLRDHNIRPGESAIVKKKAELIKGNYKCNVCSRTFFSENGLREHMQTHLGPVKHYMCPICGERFPSLLTLTEHKVTHSKSLDTGNCRICKMPLQSEEEFLEHCQMHPDLRNSLTGFRCVVCMQTVTSTLELKIHGTFHMQKTGNGSAVQTTGRGQHVQKLYKCASCLKEFRSKQDLVKLDINGLPYGLCAGCVNLSKSASPGINVPPGTNRPGLGQNENLSAIEGKGKVGGLKTRCSSCNVKFESESELQNHIQTIHRELVPDSNSTQLKTPQVSPMPRISPSQSDEKKTYQCIKCQMVFYNEWDIQVHVANHMIDEGLNHECKLCSQTFDSPAKLQCHLIEHSFEGMGGTFKCPVCFTVFVQANKLQQHIFSAHGQEDKIYDCTQCPQKFFFQTELQNHTMTQHSS

SEQ ID NO: 44651 - protein, 364 aa, Homo sapiens
MLDDNNHLIQCIMDSQNKGKTSECSQYQQMLHTNLVYLATIADSNQNMQSLLPAPPTQNMPMGPGGMNQSGPPPPPRSHNMPSDGMVGGGPPAPHMQNQMNGQMPGPNHMPMQGPGPNQLNMTNSSMNMPSSSHGSMGGYNHSVPSSQSMPVQNQMTMSQGQPMGNYGPRPNMSMQPNQGPMMHQQPPSQQYNMPQGGGQHYQGQQPPMGMMGQVNQGNHMMGQRQIPPYRPPQQGPPQQYSGQEDYYGDQYSHGGQGPPEGMNQQYYPDGNSQYGQQQDAYQGPPPQQGYPPQQQQYPGQQGYPGQQQGYGPSQGGPGPQYPNYPQGQGQQYGGYRPTQPGPPQPPQQRPYGYDQGQYGNYQQ

SEQ ID NO: 44652 - protein, 769 aa, Homo sapiens
MGLDWDEPLEPEDSAGEELEPEPVHMINMDQSAALEPEAPPRLLAPRARGGPPGDGSELDPDVLQRPERARLSENTRLATRYAVRIFREYLSEKAQSPDFETMDKGALCRVLRSFYAEARSKSGQLYSKSSLISIRSSLNRYLNEPPYCRTLDLTKDPELRSANLTLAAVIRKLEEQGAGPVVQKQAITRADLRKLYTSSVFSTNTPFGLLNKVWFETCMYFCTRGRENQRELEEDSFGLAMDEDGRKFVYFKSLGPYHKSRSSSWSKKRAESSDEENLPRMYETGTEFCPYASFVKYLSKRNPLCKAFFQRPRDHCSEGDVTWYENKAIGKNLLGTRMQMLSKAAKLSKTYTNHCIGAVSIATLNSIAGIGTKLGSPAPQGCYAEALNGAARHHSHHPPTHPSHHHRPQPPSLGNTYILPKDSQVGPDVKSEAAPKRALYESVFGSGEICGPTSPKRLCIRPSEPVDAVVVVSVKHDPLPLLPEANGHRSTNSPTIVSPAIVSPTQDSRPNMSRPLITRSPASPLNNQGIPTPAQLTKSNAPVHIDVGGHMYTSSLATLTKYPESRIGRLFDGTEPIVLDSLKQHYFIDRDGQMFRYILNFLRTSKLLIPDDFKDYTLLYEEAKYFQLQPMLLEMERWKQDRETGRFSRPCECLVVRVAPDLGERITLSGDKSLIEEVFPEIGDVMCNSVNAGWNHDSTHVIRFPLNGYCHLNSVQVLERLQQRGFEIVGSCGGGVDSSQFSEYVLRRELRRTPRVPSVIRIKQEPLD

SEQ ID NO: 44653 - protein, 754 aa, Homo sapiens
MEDITFNVKVASGECNEDTEVYNITLCTGDELTLMGQAEILYAKTFKEKSRLNTIFKKIGKLNSISKLGKGKMPCLICMNHRTNESISLPFQCKGRFSTRSPLELQMQEGEHTIRNIVEKTRLPVNVTVPSPPPRNPYDLHFIREGHRYKFVNIQTKTVVVCCVLRNNKILPMHFPLHLTVPKFSLPEHLVKGESWPETLVHHWLGICQEQFDIDEYSRAVRDVKTDWNEECKSPKKGRCSGHNHVPNSLSYARDELTQSFHRLSVCVYGNNLHGNSEVNLHGCRDLGGDWAPFPHDILPYQDSGDSGSDYLFPEASEESAGIPGKSELPYEELWLEEGKPSHQPLTRSLSEKNRCDQFRGSVRSKCATSPLPIPGTLGAAVKSSDTALPPPPVPPKSEAVREECRLLNAPPVPPRSAKPLSTSPSIPPRTVKPARQQTRSPSPTLSYYSSGLHNISVTKTDTNPSESTPVSCYPCNRVKTDSVDLKSPFGSPSAEAVSSRLSWPNHYSGASESQTRSDFLLDPSRSYSYPRQKTPGTPKRNCPAPFDFDGCELLASPTSPVTAEFSSSVSGCPKSASYSLESTDVKSLAAGVTKQSTSCPALPPRAPKLVEEKVASETSPLPLKIDGAEEDPKSGSPDLSEDQYFVKKGMQDIFSASYPFSSPLHLQLAPRSCGDGSPWQPPADLSGLSIEEVSKSLRFIGLSEDVISFFVTEKIDGNLLVQLTEEILSEDFKLSKLQVKKIMQFINGWRPKI

SEQ ID NO: 44654 - protein, 753 aa, Homo sapiens
MEDITFNVKVASGECNEDTEVYNITLCTGDELTLMGQAEILYAKTFKEKSRLNTIFKKIGKLNSISKLGKGKMPCLICMNHRTNESISLPFQCKGRFSTRSPLELQMQEGEHTIRNIVEKTRLPVNVTVPSPPPRNPYDLHFIREGHRYKFVNIQTKTVVVCCVLRNNKILPMHFPLHLTVPKFSLPEHLVKGESWPETLVHHWLGICQEQFDIDEYSRAVRDVKTDWNEECKSPKKGRCSGHNHVPNSLSYARDELTQSFHRLSVCVYGNNLHGNSEVNLHGCRDLGGDWAPFPHDILPYQDSGDSGSDYLFPEASEESAGIPGKSELPYEELWLEEGKPSHQPLTRSLSEKNRCDQFRGSVRSKCATSPLPIPGTLGAAVKSSDTALPPPPVPPKSEAVREECRLLNAPPVPPRSAKPLSTSPSIPPRTVKPARQQTRSPSPTLSYYSSGLHNIVTKTDTNPSESTPVSCYPCNRVKTDSVDLKSPFGSPSAEAVSSRLSWPNHYSGASESQTRSDFLLDPSRSYSYPRQKTPGTPKRNCPAPFDFDGCELLASPTSPVTAEFSSSVSGCPKSASYSLESTDVKSLAAGVTKQSTSCPALPPRAPKLVEEKVASETSPLPLKIDGAEEDPKSGSPDLSEDQYFVKKGMQDIFSASYPFSSPLHLQLAPRSCGDGSPWQPPADLSGLSIEEVSKSLRFIGLSEDVISFFVTEKIDGNLLVQLTEEILSEDFKLSKLQVKKIMQFINGWRPKI

SEQ ID NO: 44655 - protein, 196 aa, Homo sapiens
MPELHTKEQILELLVLEQFLSILPEELQIWVQQHNPESGEEAVTLLEDLEREFDDPGQQVPASPQGPAVPWKDLTCLRASQESTDIHLQPLKTQLKSWKPCLSPKSDCENSETATKEGISEEKSQGLPQEPSFRGIKLSRPPKASSAIRWECVSPGSFPGDIIAAEATHSTISCFAINTLPATILPSKNVNRKYFS

SEQ ID NO: 44656 - protein, 455 aa, Homo sapiens
MPELHTKEQILELLVLEQFLSILPEELQIWVQQHNPESGEEAVTLLEDLEREFDDPGQQVPASPQGPAVPWKDLTCLRASQESTDIHLQPLKTQLKSWKPCLSPKSDCENSETATKEGISEEKSQGLPQEPSFRGISEHESNLVWKQGSATGEKLRSPSQGGSFSQVIFTNKSLGKRDLYDEAERCLILTTDSIMCQKVPPEERPYRCDVCGHSFKQHSSLTQHQRIHTGEKPYKCNQCGKAFSLRSYLIIHQRIHSGEKAYECSECGKAFNQSSALIRHRKIHTGEKACKCNECGKAFSQSSYLIIHQRIHTGEKPYECNECGKTFSQSSKLIRHQRIHTGERPYECNECGKAFRQSSELITHQRIHSGEKPYECSECGKAFSLSSNLIRHQRIHSGEEPYQCNECGKTFKRSSALVQHQRIHSGDEAYICNECGKAFRHRSVLMRHQRVHTIK

SEQ ID NO: 44657 - protein, 1258 aa, Homo sapiens
MNGVINRNETIQWLYTLIGSKFRLVVKTALKLLLVFVEYSESNAPLLIQAVTAVDTKRGVKPWSNIMEILEEKDGVDTELLVYAMTLVNKTLSGLPDQDTFYDVVDCLEELGIAAVSQRHLNKKGTDLDLVEQLNIYEVALRHEDGDETTEPPPSGCRDRRRASVCSSGGGEHRGLDRRRSRRHSVQSIKSTLSAPTSPCSQSAPSFKPNQVRDLREKYSNFGNNSYHSSRPSSGSSVPTTPTSSVSPPQEARLERSSPSGLLTSSFRQHQESLAAERERRRQEREERLQRIEREERNKFSRDYLDKREEQRQAREERYKYLEQLAAEEHEKELRSRSVSRGRADLSLDLTSPAAPACLAPLSHSPSSSDSQEALTVSASSPGTPHHPQASAGDPEPESEAEPEAEAGAGQVADEAGQDIASAHEGAETEVEQALEQEPEERASLSEKERQNEGVNERDNCSASSVSSSSSTLEREEKEDKLSRDRTTGLWPAGVQDAGVNGQCGDILTNKRFMLDMLYAHNRKSPDDEEKGDGEAGRTQQEAEAVASLATRISTLQANSQTQDESVRRVDVGCLDNRGSVKAFAEKFNSGDLGRGSISPDAEPNDKVPETAPVQPKTESDYIWDQLMANPRELRIQDMDFTDLGEEDDIDVLDVDLGHREAPGPPPPPPPTFLGLPPPPPPPLLDSIPPPPVPGNLLVPPPPVFNAPQGLGWSQVPRGQPTFTKKKKTIRLFWNEVRPFDWPCKNNRRCREFLWSKLEPIKVDTSRLEHLFESKSKELSVSKKTAADGKRQEIIVLDSKRSNAINIGLTVLPPPRTIKIAILNFDEYALNKEGIEKILTMIPTDEEKQKIQEAQLANPEIPLGSAEQFLLTLSSISELSARLHLWAFKMDYETTEKEVAEPLLDLKEGIDQLENNKTLGFILSTLLAIGNFLNGTNAKAFELSYLEKVPEVKDTVHKQSLLHHVCTMVVENFPDSSDLYSEIGAITRSAKVDFDQLQDNLCQMERRCKASWDHLKAIAKHEMKPVLKQRMSEFLKDCAERIIILKIVHRRIINRFHSFLLFMGHPPYAIREVNINKFCRIISEFALEYRTTRERVLQQKQKRANHRERNKTRGKMITDSGKFSGSSPAPPSQPQGLSYAEDAAEHENMKAVLKTSSPSVEDATPALGVRTRSRASRGSTSSWTMGTDDSPNVTDDAADEIMDRIVKSATQVPSQRVVPRERKRSRANRKSLRRTLKSGLTPEEARALGLVGTSELQL

SEQ ID NO: 44658 - protein, 845 aa, Homo sapiens [sequence omitted]

SEQ ID NO: 44659 - protein, 875 aa, Homo sapiens
MPEEKDLRSSNEDSHIVKIEKLNERSKRKDDGVAHRDSAGQRCICLSKAVGYLTGDMKEYRIWLKDKHLALQFIDWVLRGTAQVMFINNPLSGLIIFIGLLIQNPWWTITGGLGTVVSTLTALALGQDRSAIASGLHGYNGMLVGLLMAVFSEKLDYYWWLLFPVTFTAMSCPVLSSALNSIFSKWDLPVFTLPFNIAVTLYLAATGHYNLFFPTTLVEPVSSVPNITWTEMEMPLLLQAIPVGVGQVYGCDNPWTGGVFLVALFISSPLICLHAAIGSIVGLLAALSVATPFETIYTGLWSYNCVLSCIAIGGMFYALTWQTHLLALICALFCAYMEAAISNIMSVVGVPPGTWAFCLATIIFLLLTTNNPAIFRLPLSKVTYPEANRIYYLTVKSGEEEKAPSGGGGEHPPTAGPKVEEGSEAVLSKHRSVFHIEWSSIRRRSKVFGKGEHQERQNKDPFPYRYRKPTVELLDLDTMEESSEIKVETNISKTSWIRSSMAASGKRVSKALSYITGEMKECGEGLKDKSPVFQFFDWVLRGTSQVMFVNNPLSGILIILGLFIQNPWWAISGCLGTIMSTLTALILSQDKSAIAAGFHGYNGVLVGLLMAVFSDKGDYYWWLLLPVIIMSMSCPILSSALGTIFSKWDLPVFTLPFNITVTLYLAATGHYNLFFPTTLLQPASAMPNITWSEVQVPLLLRAIPVGIGQVYGCDNPWTGGIFLIALFISSPLICLHAAIGSTMGMLAALTIATPFDSIYFGLCGFNSTLACIAIGGMFYVITWQTHLLAIACALFAAYLGAALANMLSVFGLPPCTWPFCLSALTFLLLTTNNPAIYKLPLSKVTYPEANRIYYLSQERNRRASIITKYQAYDVS

SEQ ID NO: 44660 - protein, 145 aa, Homo sapiens
MGLAPEHFHYQILNQAFRLLLDGAPLIAIHKARYYKRKDGLALGPGPFVTALEYATDTKATVVGKPEKTFFLEALRGTGCEPEEAVMIGDDCRDDVGGAQDVGMLGILVKTGKYRASDEEKINPPPYLTCESFPHAVDHILQHLL

SEQ ID NO: 44661 - protein, 227 aa, Homo sapiens
MDTGSPAELSPTTLSPVNHSLDLQPVTYSEPAFWCSIAYYELNQRVGETFHASQPSLTVDGFTDPSNSERFCLGLLSNVNRNATVEMTRRHIGRGVRLYYIGGEVFAECLSDSAIFVQSPNCNQRYGWHPATVCKIPPGCNLKIFNNQEFAALLAQSVNQGFEAVYQLTRMCTIRMSFVKGWGAEYRRQTVTSTPCWIELHLNGPLQWLDKVLTQMGSPSVRCSSMS

SEQ ID NO: 44662 - protein, 221 aa, Homo sapiens
MDTGSPAELSPTTLSPVNHSLDLQPVTYSEPAFWCSIAYYELNQRVGETFHASQPSLTVDGFTDPSNSERFCLGLLSNVNRNATVEMTRRHIGRGVRLYYIGGEVFAECLSDSAIFVQSPNCNQRYGWHPATVCKIPPGCNLKIFNNQEFAALLAQSVNQGFEAVYQLTRMCTIRMSFVKGWGAEYRYEIHIWFLNFHSVIMFHCILAYSGVHLYLFSMRL

SEQ ID NO: 44663 - protein, 24 aa, Homo sapiens
MREDVAEGLTLGAGVICENGSLFT

SEQ ID NO: 44664 - protein, 398 aa, Homo sapiens
MFKSRGCGVCRGCQTQEDCGHCPICLRPPRPGLRRQWKCVQRRCLRGKHARRKGGCDSKMAARRRPGAQPLPPPPPSQSPEPTEPHPRALAPSPPAEFIYYCVDEDELPYTNRRQNRKCGACAACLRRMDCGRCDFCCDKPKFGGSNQKRQKCRWRQCLQFAMKRLLPSVWSESEDGAGSPPPYRRRKRPSSARRHHLGPTLKPTLATRTAQPDHTQAPTKQEAGGGFVLPPPGTDLVFLREGASSPVQVPGPVAASTEALLQEAQCSGLSWVVALPQVKQEKADTQDEWTPGTAVLTSPVLVPGCPSKAVDPGLPSVKQEPPDPEEDKEENKDDSASKLAPEEEAGGAGTPVITEIFSLGGTRFRDTAVWLPRYYHLALDWKCNCGYHLCCRSVLVP

SEQ ID NO: 44665 - protein, 486 aa, Homo sapiens
MFKRVGCGECAACQVTEDCGACSTCLLQLPHDVASGLFCKCERRRCLRIVERSRGCGVCRGCQTQEDCGHCPICLRPPRPGLRRQWKCVQRRCLRGKHARRKGGCDSKMAARRRPGAQPLPPPPPSQSPEPTEPHPRALAPSPPAEFIYYCVDEDELQPYTNRRQNRKCGACAACLRRMDCGRCDFCCDKPKFGGSNQKRQKCRWRQCLQFAMKRLLPSVWSESEDGAGSPPPYRRRKRPSSARRHHLGPTLKPTLATRTAQPDHTQAPTKQEAGGGFVLPPPGTDLVFLREGASSPVQVPGPVAASTEALLQEAQCSGLSWVVALPQVKQEKADTQDEWTPGTAVLTSPVLVPGCPSKAVDPGLPSVKQEPPDPEEDKEENKDDSASKLAPEEEAGGAGTPVITEIFSLGGTRFRDTAVWLPSLQGRHSGREDGCKVWETEDTVEPTSTSWNPRGWPGTHVSLSPPPASMMWVSCRRSWCPSSQS

SEQ ID NO: 44666 - protein, 436 aa, Homo sapiens
MFKRVGCGECAACQVTEDCGACSTCLLQLPHDVASGLFCKCERRRCLRIVERSRGCGVCRGCQTQEDCGHCPICLRPPRPGLRRQWKCVQRRCLRGKHARRKGGCDSKMAARRRPGAQPLPPPPPSQSPEPTEPHPRALAPSPPAEFIYYCVDEDELQPYTNRRQNRKCGACAACLRRMDCGRCDFCCDKPKFGGSNQKRQKCRWRQCLQFAMKRLLPSVWSESEDGAGSPPPYRRRKRPSSARRHHLGPTLKPTLATRTAQPDHTQAPTKQEAGGGFVLPPPGTDLVFLREGASSPVQVPGPVAASTEALLQEAQCSGLSWVVALPQVKQEKADTQDEWTPGTAVLTSPVLVPGCPSKAVDPGLPSVKQEPPDPEEDKEENKDDSASKLAPEEEAGGAGTPVITEIFSLGGTRFRDTAVWLPRSKDLKKPGARKQ

SEQ ID NO: 44667 - protein, 556 aa, Homo sapiens [sequence omitted]

SEQ ID NO: 44668 - protein, 105 aa, Homo sapiens [sequence omitted]

SEQ ID NO: 44669 - protein, 361 aa, Homo sapiens [sequence omitted]

SEQ ID NO: 44670 - protein, 193 aa, Homo sapiens
MPPHPGHYWPVHNELAFQPPISNHPAPEYWCSIAYFEMDVQVGETFKVPSSCPIVTVDGYVDPSGGDRFCLGQLSNVHRTEAIERARLHIGKGVQLECKGEGDVWVRCLSDHAVFVQSYYLDREAGRAPGDAVHKIYPSAYIKVFDLRQCHRQMQQQAATAQAAAAAQAAAVAGNIPGPGSVGGIAPAIKLNS

SEQ ID NO: 44671 - protein, 715 aa, Homo sapiens
MELADVGAAASSQGVHDQVLPTPNASSRVIVHVDLDCFYAQVEMISNPELKDKPLGVQQKYLVVTCNYEARKLGVKKLMNVRDAKEKCPQLVLVNGEDLTRYREMSYKVTELLEEFSPVVERLGFDENFVDLTEMVEKRLQQLQSDELSAVTVSGHVYNNQSINLLDVLHIRLLVGSQIAAEMREAMYNQLGLTGCAGVASNKLLAKLVSGVFKPNQQTVLLPESCQHLIHSLNHIKEIPGIGYKTAKCLEALGINSVRDLQTFSPKILEKELGISVAQRIQKLSFGEDNSPVILSGPPQSFSEEDSFKKCSSEVEAKNKIEELLASLLNRVCQDGRKPHTVRLIIRRYSSEKHYGRESRQCPIPSHVIQKLGTGNYDVMTPMVDILMKLFRNMVNVKMPFHLTLLSVCFCNLKALNTAKKGLIDYYLMPSLSTTSRSGKHSFKMKDTHMEDFPKDKETNRDFLPSGRIESTRTRESPLDTTNFSKEKDINEFPLCSLPEGVDQEVFKQLPVDIQEEILSGKSREKFQGKGSVSCPLHASRGVLSFFSKKQMQDIPINPRDHLSSSKQVSSVSPCEPGTSGFNSSSSSYMSSQKDYSYYLDNRLKDERISQGPKEPQGFHFTNSNPAVSAFHSFPNLQSEQLFSRNHTTDSHKQTVATDSHEGLTENREPDSVDEKITFPSDIDPQVFYELPEAVQKELLAEWKRAGSDFHIGHK

SEQ ID NO: 44672 - protein, 532 aa, Homo sapiens
MTSRDLGSHDNLSPPFVNSRIQSKTERGSYSSYGRESNLQGCHQVYAPSASTADYNRDSPGYPSSKPATSTFPSSFFMQDGHHSSDPWSSSSGMNQPGYAGMLGNSSHIPQSSSYCSLHPHERLSYPSHSSADINSSLPPMSTFHRSGTNHYSTSSCTPPANGTDSIMANRGSGAAGSSQTGDALGKALASIYSPDHTNNSFSSNPSTPVGSPPSLSAGTAVWSRNGGQASSSPNYEGPLHSLQSRIEDRLERLDDAIHVLRNHAVGPSTAMPGGHGDMHGIIGPSHNGAMGGLGSGYGTGLLSANRHSLMVGTHREDGVALRGSHSLLPNQVPVPQLPVQSATSPDLNPPQDPYRGMPPGLQGQSVSSGSSEIKSDDEGDENLQDTKSSEDKKLDDDKKDIKSITRSRSSNNDDEDLTPEQKAEREKERRMANNARERLRVRDINEAFKELGRMVQLHLKSDKPQTKLLILHQAVAVILSLEQQVRERNLNPKAACLKRREEEKVSSEPPPLSLAGPHPGMGDASNHMGQM

SEQ ID NO: 44673 - protein, 515 aa, Homo sapiens [sequence omitted]

SEQ ID NO: 44674 - protein, 1142 aa, Homo sapiens
MNLFEQFKRAANLYFLALLILQAVPQISTLAWYTTLVPLLVVLGVTAIKDLVDDVARHKMDKEINNRTCEVIKDGRFKVAKWKEIQVGDVIRLKKNDFVPADILLLSSSEPNSLCYVETAELDGETNLKFKMSLEITDQYLQREDTLATFDGFIECEEPNNRLDKFTGTLFWRNTSFPLDADKILLRGCVIRNTDFCHGLVIFAGADTKIMKNSGKTRFKRTKIDYLMNYMVYTIFVVLILLSAGLAIGHAYWEAQVGNSSWYLYDGEDDTPSYRGFLIFWGYIIVLNTMVPISLYVSVEVIRLGQSHFINWDLQMYYAEKDTPAKARTTTLNEQLGQIHYIFSDKTGTLTQNIMTFKKCCINGQIYGDHRDASQHNHNKIEQVDFSWNTYADGKLAFYDHYLIEQIQSGKEPEVRQFFFLLAVCHTVMVDRTDGQLNYQAASPDEGALVNAARNFGFAFLARTQNTITISELGTERTYNVLAILDFNSDRKRMSIIVRTPEGNIKLYCKGADTVIYERLHRMNPTKQETQDALDIFANETLRTLCLCYKEIEEKEFTEWNKKFMAASVASTNRDEALDKVYEEIEKDLILLGATAIEDKLQDGVPETISKLAKADIKIWVLTGDKKETAENIGFACELLTEDTTICYGEDINSLLHARMENQRNRGGVYAKFAPPVQESFFPPGGNRALIITGSWLNEILLEKKTKRNKILKLKFPRTEEERRMRTQSKRRLEAKKEQRQKNFVDLACECSAVICCRVTPKQKAMVVDLVKRYKKAITLAIGDGANDVNMIKTAHIGVGISGQEGMQAVMSSDYSFAQFRYLQRLLLVHGRWSYIRMCKFLRYFFYKNFAFTLVHFWYSFFNGYSAQTAYEDWFITLYNVLYTSLPVLLMGLLDQDVSDKLSLRFPGLYIVGQRDLLFNYKRFFVSLLHGVLTSMILFFIPLGAYLQTVGQDGEAPSDYQSFAVTIASALVITVNFQIGLDTSYWTFVNAFSIFGSIALYFGIMFDFHSAGIHVLFPSAFQFTGTASNALRQPYIWLTIILAVAVCLLPVVAIRFLSMTIWPSESDKIQKHRKRLKAEEQWQRRQQVFRRGVSTRRSAYAFSHQRGYADLISSGRSIRKKRSPLDAIVADGTAEYRRTGDS

SEQ ID NO: 44675 - protein, 2076 aa, Homo sapiens
MICCSASVEVECSSENPQLSPNLEDDRDRGWKHETGTHEEERANQIDEKEHPYKEEESISPGTPRSADSSPSKSNHSLSLQSLGNLDISVSSSENPLGVKGTRHTGEAYDPSNTEEIANGLLFLNSSHIYEKQDRCCHKTVHSMASKFTDGDLNNDGPHDEGLRSSQQNPKVQKYISFSLPLSEATAHIYPGDSAVANKQPSPQLSSEDSDSDYELCPEITLTYTEEFSDDDLEYLECSDVMTDYSNAVWQRNLLGTEHVFLLESDDEEMEFGEHCLGGCEHFLSGMGCGSRVSGDAGPMVATAGFCGHHSQPQEVGVRSSRVSKHGPSSPQTGMTLILGPHQDGTSSVTEQGRYKLPTAPEAAENDYPGIQGETRDSHQAREEFASDNLLNMDESVRETEMKLLSGESENSGMSQCWETAADKRVGGKDLWSKRGSRKSARVRQPGMKGNPKKPNANLRESTTEGTLHLCSAKESAEPPLTQSDKRETSHTTAAATGRSSHADARECAISTQAEQEAKTLQTSTDSVSKEGNTNCKGEGMQVNTLFETSQVPDWSDPPQVQVQETVRETISCSQMPAFSEPAGEESPFTGTTTISFSNLGGVHKENASLAQHSEVKPCTCGPQHEEKQDRDGNIPDNFREDLKYEQSISEANDETMSPGVFSRHLPKDARADFREPVAVSVASPEPTDTALTLENVCDEPRDREAVCAMECFEAGDQGTCFDTIDSLVGRPVDKYSPQEICSVDTELAEGQNKVSDLCSSNDKTLEVFFQTQVSETSVSTCKSSKDGNSVMSPLFTSTFTLNISHTASEGATGENLAKVENSTYPLASTVHAGQEQPSPSNSGGLDETQLLSSENNPLVQFKEGGDKSPSPSAADTTATPASYSSIVSFPWEKPTTLTANNECFQATRETEDTSTVTIATEVHPAKYLAVSIPEDKHAGGTEERFPRASHEKVSQFPSQVQLDHILSGATIKSTKELLCRAPSVPGVPHHVLQLPEGEGFCSNSPLQVDNLSGDKSQTVDRADFRSYEENFQERGSETKQGVQQQSLSQQGSLSAPDFQQSLPTTSAAQEERNLVPTAHSPASSREGAGQRSGWGTRVSVVAETAGEEDSQALSNVPSLSDILLEESKEYRPGNWEAGNKLKIITLEASASEIWPPRQLTNSESKASDGGLIIPDKVWAVPDSLKADAVVPELAPSEIAALAHSPEDAESALADSRESHKGEEPTISVHWRSLSSRGFSQPRLLESSVDPVDEKELSVTDSLSAASETGGKENVNNVSQDQEEKQLKMDHTAFFKKFLTCPKILESSVDPIDEISVIEYTRAGKPEPSETTPQGAREGGQSNDGNMGHEAEIQPAILQVPCLQGTILSENRISRSQEGSMKQEAEQIQPEEAKTAIWQVLQPSEGGERIPSGCSIGQIQESSDGSLGEAEQSKKDKAELISPTSPLSSCLPIMTHASLGVDTHNSTGQIHDVPENDIVEPRKRQYVFPVSQKRGTIENERGKPLPSSPDLTRFPCTSSPEGNVTDFLISHKMEEPKIEVLQIGETKPPSSSSSSAKTLAFISGERELEKAPKLLQDPCQKGTLGCAKKSREREKSLEARAGKSPGTLTAVTGSEEVKRKPEAPGSGHLAEGVKKKILSRVAALRLKLEEKENIRKNSAFLKKMPKLETSLSHTEEKQDPKKPSCKREGRAPVLLKKIQAEMFPEHSGNVKLSCQFAEIHEDSTICWTKDSKSIAQVQRSAGDNSTVSFAIVQASPKDQGLYYCCIKNSYGKVTAEFNLTAEVLKQLSSRQDTKGCEEIEFSQLIFKEDFLHDSYFGGRLRGQIATEELHFGEGVHRKAFRSTVMHGLMPVFKPGHACVLKVHNAIAYGTRNNDELIQRNYKLAAQECYVQNTARYYAKIYAAEAQPLEGFGEVPEIIPIFLIHRPENNIPYATVEEELIGEFVKYSIRDGKEINFLRRESEAGQKCCTFQHWVYQKTSGCLLVTDMQGVGMKLTDVGIATLAKGYKGFKGNCSMTFIDQFKALHQCNKYCKMLGLKSLQNNNQKQKQPSIGKSKVQTNSMTIKKAGPETPGEKKT

SEQ ID NO: 44676 - protein, 729 aa, Homo sapiens [sequence omitted]

SEQ ID NO: 44677 - protein, 1261 aa, Homo sapiens
MKQNAHGEDDSHAPSSSDVGVSVIVKNVRNIDSSEGGEKDGHNPTGNGLHNGFLTASSLDSYSKDGAKSLKGDVPASEVTLKDSTFSQFSPISSAEEFDDDEKIEVDDPPDKEDMRSSFRSNVLTGSAPQQDYDKLKALGGENSSKTGLSTSGNVEKNKAVKRETEASSINLSVYEPFKVRKAEDKLKESSDKVLENRVLDGKLSSEKNDTSLPSVAPSKTKSSSKLSSCIAAIAALSAKKAASDSCKEPVANSRESSPLPKEVNDSPRAADKSPESQNLIDGTKKPSLKQPDSPRSISSENSSKGSPSSPAGSTPAIPKVRIKTIKTSSGEIKRTVTRVLPEVDLDSGKKPSEQTASVMASVTSLLSSPASAAVLSSPPRAPLQSAVVTNAVSPAELTPKQVTIKPVATAFLPVSAVKTAGSQVINLKLANNTTVKATVISAASVQSASSAIIKAANAIQQQTVVVPASSLANAKLVPKTVHLANLNLLPQGAQATSELRQVLTKPQQQIKQAIINAAASQPPKKVSRVQVVSSLQSSVVEAFNKVLSSVNPVPVYIPNLSPPANAGITLPTRGYKCLECGDSFALEKSLTQHYDRRSVRIEVTCNHCTKNLVFYNKCSLLSHARGHKEKGVVMQCSHLILKPVPADQMIVSPSSNTSTSTSTLQSPVGAGTHTVTKIQSGITGTVISAPSSTPITPAMPLDEDPSKLCRHSLKCLECNEVFQDETSLATHFQQAADTSGQKTCTICQMLLPNQCSYASHQRIHQHKSPYTCPECGAICRSVHFQTHVTKNCLHYTRRVGFRCVHCNVVYSDVAALKSHIQGSHCEVFYKCPICPMAFKSAPSTHSHAYTQHPGIKIGEPKIIYKCSMCDTVFTLQTLLYRHFDQHIENQKVSVFKCPDCSLLYAQKQLMMDHIKSMHGTLKSIEGPPNLGINLPLSIKPATQNSANQNKEDTKSMNGKEKLEKKSPSPVKKSMETKKVASPGWTCWECDCLFMQRDVYISHVRKEHGKQMKKHPCRQCDKSFSSSHSLCRHNRIKHKGIRKVYACSHCPDSRRTFTKRLMLEKHVQLMHGIKDPDLKEMTDATNEEETEIKEDTKVPSPKRKLEEPVLEFRPPRGAITQPLKKLKINVFKVHKCAVCGFTTENLLQFHEHIPQHKSDGSSYQCRECGLCYTSHVSLSRHLFIVHKLKEPQPVSKQNGAGEDNQQENKPSHEDESPDGAVSDRKCKVCAKTFETEAALNTHMRTHGMAFIKSKRMSSAEK

SEQ ID NO: 44678 - protein, 147 aa, Homo sapiens
MIWKGLIVLTGSESPIVVVLSGSMEPAFHRGDLLFLTNFREDPIRAGEIVVFKVEGRDIPIVHRVIKVHEKDNGDIKFLTKGDNNEVDDRGLYKEGQNWLEKKDVVGRARGFLPYVGMVTIIMNDYPKFKYALLAVMGAYVLLKRES

SEQ ID NO: 44679 - protein, 893 aa, Homo sapiens
MHEGSWGISHTRVPTESRPGHVALIAGFYEDVSAVAKGWKENPVEFDSLFNESKYTWSWGSPDILPMFAKGASGDHVYTYSYDAKREDFGAQDATKLDTWVFDNVKDFFHHARNNQSLFSKINEEKIVFFLHLLGIDTNGHAHRPSSRDYKHNIKKVDDGVKEIVSMFNHFYGNDGKTTFIFTSDHGMTDWGSHGAGHPSETLTPLVTWGAGIKYPQRVSAQQFDDAFLKEWRLENWKRLDVNQADIAPLMTSLIGVPFPLNSVGILPVDYLNNTDLFKAESMFTNAVQILEQFKVKMTQKKEVTLPFLFTPFKLLSDSKQFNILRKARSYIKHRKFDEVVSLCKELIHLALKGLSYYHTYDRFFLGVNVVIGFVGWISYASLLIIKSHSNLIKGVSKEVKKPSHLLPCSFVAIGILVAFFLLIQACPWTYYVYGLLPLPIWYAVLREFQVIQDLVVSVLTYPLSHFVGYLLAFTLGIEVLVLSFFYRYMLTAGLTAFAAWPFLTRLWTRAKMTSLSWTFFSLLLAVFPLMPVVGRKPDISLVMGAGLLVLLLSLCVVTSLMKRKDSFIKEELLVHLLQVLSTVLSMYVVYSTQSSLLRKQGLPLMNQIISWATLASSLVVPLLSSPVLFQRLFSILLSLMSTYLLLSTGYEALFPLVLSCLMFVWINIEQETLQQSGVCCKQKLTSIQFSYNTDITQFRQLYLDDIRRAFFLVFFLVTAFFGTGNIASINSFDLASVYCFLTVFSPFMMGALMMWKILIPFVLVMCAFEAVQLTTQLSSKSLFLIVLVISDIMALHFFFLVKDYGSWLDIGTRQLLACTAWLFMYISASPNRLWMLSDPGLDLNLLHAIRACISHYVIVMSMTIFLVFLNGLAQLLTTKKLRLCGKPKSHFM

SEQ ID NO: 44680 - protein, 721 aa, Homo sapiens
MHEGSWGISHTRVPTESRPGHVALIAGFYEDVSAVAKGWKENPVEFDSLFNESKYTWSWGSPDILPMFAKGASGDHVYTYSYDAKREDFGAQDATKLDTWVFDNVKDFFHHARNNQSLFSKINEEKIVFFLHLLGIDTNGHAHRPSSRDYKHNIKKVDDGVKEIVSMFNHFYGNDGKTTFIFTSDHGMTDWGSHGAGHPSETLTPLVTWGAGIKYPQRVSAQQFDDAFLKEWRLENWKRLDVNQADIAPLMTSLIGVPFPLNSVGILPVDYLNNTDLFKAESMFTNAVQILEQFKVKMTQKKEVTLPFLFTPFKLLSDSKQFNILRKARSYIKHRKFDEVVSLCKELIHLALKGLSYYHTYDRFFLGVNVVIGFVGWISYASLLIIKSHSNLIKGVSKEVKKPSHLLPCSFVAIGILVAFFLLIQACPWTYYVYGLLPLPIWYAVLREFQVIQDLVVSVLTYPLSHFVGYLLAFTLGIEVLVLSFFYRYMLTAGLTAFAAWPFLTRLWTRAKMTSLSWTFFSLLLAVFPLMPVVGRKPDISLVMGAGLLVLLLSLCVVTSLMKRKDSFIKEELLVHLLQVLSTVLSMYVVYSTQSSLLRKQGLPLMNQIISWATLASSLVVPLLSSPVLFQRLFSILLSLMSTYLLLSTGYEALFPLVLSCLMFVWINIEQETLQQSGVCCKQKLTSIQFSYNTDITQFRQLYLDDIRRAFFLVSFVETLV

SEQ ID NO: 44681 - protein, 281 aa, Homo sapiens
MVSPLISPKPLALPGAHVVVTGGSSGIGKCIAIECYKQGAFITLVARNEDKLLQAKKEIEMHSINDKQVVLCISVDVSQDYNQVENVIKQAQEKLGPVDMLVNCAGMAVSGKFEDLEVSTFERLMSINYLGSVYPSRAVITTMKERRVGRIVFVSSQAGQLGLFGFTAYSASKFAIRGLAEALQMEVKPYNVYITVAYPPDTDTPGFAEENRTKPLETRLISETTSVCKPEQVAKQIVKDAIVVTMGLFRTIALFYLGSFDSIVRRCMMQREKSENADKTA

SEQ ID NO: 44682 - protein, 315 aa, Homo sapiens [sequence omitted]

SEQ ID NO: 44683 - protein, 136 aa, Homo sapiens [sequence omitted]

SEQ ID NO: 44684 - protein, 1212 aa, Homo sapiens
MALMFTGHLLFLALLMFAFSTFEESVSNYSEWAVFTDDIDQFKTQKVQDFRPNQKLKKSMLHPSLYFDAGEIQAMRQKSRASHLHLFRAIRSAVTVMLSNPTYYLPPPKHADFAAKWNEIYGNNLPPLALYCLLCPEDKVAFEFVLEYMDRMVGYKDWLVENAPGDEVPIGHSLTGFATAFDFLYNLLDNHRRQKYLEKIWVITEEMYEYSKVRSWGKQLLHNHQATNMIALLTGALVTGVDKGSKANIWKQAVVDVMEKTMFLLNHIVDGSLDEGVAYGSYTAKSVTQYVFLAQRHFNINNLDNNWLKMHFWFYYATLLPGFQRTVGIADSNYNWFYGPESQLVFLDKFILKNGAGNWLAQQIRKHRPKDGPMVPSTAQRWSTLHTEYIWYDPQLTPQPPADYGTAKIHTFPNWGVVTYGAGLPNTQTNTFVSFKSGKLGGRAVYDIVHFQPYSWIDGWRSFNPGHEHPDQNSFTFAPNGQVFVSEALYGPKLSHLNNVLVFAPSPSSQCNKPWEGQLGECAQWLKWTGEEVGDAAGEIITASQHGEMVFVSGEAVSAYSSAMRLKSVYRALLLLNSQTLLVVDHIERQEDSPINSVSAFFHNLDIDFKYIPYKFMNRYNGAMMDVWDAHYKMFWFDHHGNSPMASIQEAEQAAEFKKRWTQFVNVTFQMEPTITRIAYVFYGPYINVSSCRFIDSSNPGLQISLNVNNTEHVVSIVTDYHNLKTRFNYLGFGGFASVADQGQITRFGLGTQAIVKPVRHDRIIFPFGFKFNIAVGLILCISLVILTFQWRFYLSFRKLMRWILILVIALWFIELLDVWSTCSQPICAKWTRTEAEGSKKSLSSEGHHMDLPDVVITSLPGSGAEILKQLFFNSSDFLYIRVPTAYIDIPETELEIDSFVDACEWKVSDIRSGHFRLLRGWLQSLVQDTKLHLQNIHLHEPNRGKLAQYFAMNKDKKRKFKRRESLPEQRSQMKGAFDRDAEYIRALRRHLVYYPSARPVLSLSSGSWTLKLHFFQEVLGASMRALYIVRDPRAWIYSMLYNSKPSLYSLKNVPEHLAKLFKIEGGKGKCNLNSGYAFEYEPLRKELSKSKSNAVSLLSHLWLANTAAALRINTDLLPTSYQLVKFEDIVHFPQKTTERIFAFLGIPLSPASLNQILFATSTNLFYLPYEGEISPTNTNVWKQNLPRDEIKLIENICWTLMDRLGYPKFMD

SEQ ID NO: 44685 - protein, 120 aa, Homo sapiens
MIYQKVHSATLAIAEQHERLMLEMEQKARLQTSLTEPMTLSKSISLPRSAYWHHITRQNSVGEIYSLQGNHENRHSDLTGKSCKKSENRFLEENAPLVMYGITHHLFMDTSTCKVVHDLE

SEQ ID NO: 44686 - protein, 2141 aa, Homo sapiens
MKEEVLNLLSRLVKYPPAVQHLVDVGAVEFLSKLRSNVEPNLQAEIDGILDGLFLLPSEVPALSSASYQTNQTELSKNPEILTGYFPQDKSNFQQMEVPPRPVVNQTVKCLKFSTFPWLPLTTTDRHVLSSNESSLRSSNHTLIWNTCELLKDVIMQDFPAEIFLQRPKIVQSLLSLLKLAFGDGKHRLALQSVSCLQQLCMYLRNRLNFHRDPGFFSNKHDTVSQNSSLSYCHEARGTHHSQNPSPGSSSPRPSVVGRTGQRPRGDGQDWDAASSSGSSSHAHVNSRISVHSPLDMGHIDLPELETEDTLELQFQQLSLPQFCVSILESAVPLLRTGSRQVIIRVLELLTEDMTLIGEAISTDIWDDSSLFGIDMKEKLLLVLGALGETMCYHKSSISLEQPEVMLVHHRMAFISISLFAVRLLQTLLPVEKASEFLSEPMSTALFLLSLDMPISLEYPNIHEAVVAYLEQLNSENYSIYKRTAEAVYSIECTCNFLSDIGKEGEKNLLELVELADQALRSFSYHQHFPLIKEIISICSKIWKSAQASPLLQGESQKVLLHMLSHPLPRVKAETYHCCLEITKECLGVHNVTKPVSSLCNGIHFLLHPKVLYEISVFGIQEPESEVNTAAKAILLYLLQGRLMMTALTWNKFIESLCPVIPILQGYADTEDPLGNCILLLSKASSDTEEMLPCTTRLKSMLRLLLVKKPSVRSLALKLLAFHLTSEEGADTKRPLIDARVLSRVTDLFIGKKPIELRLDDRRELVIKLETVEKVYEIFTSDDVDLVLRKSAAEQLAVIMQDIKMHAVVKKLCLIDKIIEYLNECVSQDGKVVECLVQPCLTLLRKVLCGDPVMRVSLSQQSSLLTVLFRVSLIFHEDCSVVTEVGALFCLLLFDEVSRMDMWSVNPSNKPSLPSVFSLPVSVFRRYHLPVHVIGHHAVSPYSIVLPLSADCLALKPVSDMLRIAWNLSWYHGSDNLLKQMNSETKTQEILDALKLSTEDILTLKITHMASGLQDCLHSIVQAATHREVRAAVTRMSFYLLNDRLSLKGCPGPCGVTLKSLAWHTALNRFLQVLPACTEDEKLLIDIIHFLNKLIKEQRKNSSLELLNWILELLLRHSANPLLDLLVLTESQAREETDDIRTAVRQQLQKELIALFDTLLLNFMEVTDRKCSELLYVFQTQLALKLLQCLKVTDAPHFYGLPSLERTLRGMANLTAFPGWSSHSPLTKPLDICVKYLSGLLEVITSFYVERGGNAMSFMGKGVTKSTILCLLHLSHEMMAQAGSLEWMSLWFLPLGSHSEEHIPTQQGLAWLIPLWVDRDPEVRFTSLGLGSALTTLETGCVALANSCQNISGGLWGTVVNILLDQSECSMVRREAAFILQNLLVIPMPTEIIKDYTWQGPCVHDEDSGLSLIGKPALQALLYHCHFYEHLNQMVKHCYLGRCMFDLNFSAFDRNSESNDLNGLDDSFKFWRAPSRTSQDRDPSSLSTSETTVAPSLGSTEFQPLVQSTTLLPEASHDQFVAQGHQESTSPRPPHDSSLSAPLPKLCVFVTPSLLSAMCSLLDNLLTIAPRDTAKAFRQAHLIELLCSIADATLIQTCVQELRALLPSSPPAEHTQAQVSFLLEYLSSLSRLLQSCLLVEPDLVIQDELVKPLITNIIGILTICTKDVLDKELISAFYHTWTHLFNLLAMLLRKAGAITLPFVTVALAKHWTAAIDMFCTCAGLSATCPALYTASLQFLSVLLTEEAKGHLQAKSKTHLCCSPTVASLLDDSQENQKSLEQLSDVILQCYEGKSSKDILKRVAANALMSLLAVSRRAQKHALKANLIDNCMEQMKHINAQLNLDSLRPGKAALKKKEDGVIKELSIAMQLLRNCLYQNEECKEAALEAHLVPVLHSLWPWILMDDSLMQISLQLLCVYTANFPNGCSSLCWSSCGQHPVQATHRGAVSNSLMLCILKLASQMPLENTTVQQMVFMLLSNLALSHDCKGVIQKSNFLQNFLSLALPKGGNKHLSNLTILWLKLLLNISSGEDGQQMILRLDGCLDLLTEMSKYKHKSSPLLPLLIFHNVCFSPANKPKILANEKVITVLAACLESENQNAQRIGAAALWALIYNYQKAKTALKSPSVKRRVDEAYSLAKKTP

SEQ ID NO: 44687 - protein, 2201 aa, Homo sapiens
MGKRGFSESSNSDSVVIGEDRNKHASKRRKLDEAEPLKSGKQGICRLETSESSVTEGGIALDETGKETFLSDCTVGGTCLPNALSPSCNFSTIDVVSLKTDTEKTSAQEMVSLDLERESPFPPKEISVSCTIGNVDTVLKCSICGHLFSSCSDLEKHAESHMQQPKEHTCCHCSHKAESSSALHMHIKQAHGPQKVFSCDLCGFQCSEENLLNAHYLGKTHLRRQNLAARGGFVQILTKQPFPKKSRTMATKNVHSKPRTSKSIAKNSDSKGLRNVGSTFKDFRGSISKQSGSSSELLVEMMPSRNTLSQEVEIVEEHVTSLGLAQNPENQSRKLDTLVTSEGLLEKLESTKNTLQAAHGNSVTSRPRPERNILVLGNSFRRRSSTFTLKGQAKKRFNLLGIKRGTSETQRMYMKHLRTQMKTHDAESVLKHLEACSSVQRVCVTTSETQEAEQGQGSARPPDSGLHSLTVKPASGSQTLCACTDCGQVATNRTDLEIHVKRCHAREMKFYCRTCDFSSMSRRDLDEHLHSNQHQQTASVLSCQCCSFISLDEINLRDHMKEKHNMHFLCTPCNLFFLSEKDVEEHKATEKHINSLVQPKTLQSSNSDLVLQTLPLSTLESENAKESMDDSGKASQEEPLKSRVSHGNEVRHSSKPQFQCKKCFYKTRSSTVLTRHIKLRHGQDYHFLCKACNLYSLSKEGMEKHIKRSKHLENAKKNNIGLSFEECIERVCIGANDKKEEFDVSGNGRIEGHIGVQLQEHSYLEKGMLASEELSQSGGSTKDDELASTTTPKRGRPKGNISRTCSHCGLLASSITNLTVHIRRKHSHQYSYLCKVCKYYTVTKGDMERHCATKKHKGRVEIEASGKHSSDIIVGPEGGSLEAGKKNAGSAVTMSDEHANKPAESPTSVLEKPDRGNSIEAEVENVFHSLDGEVNSHLLDKKEQISSEPEDFAQPGDVYSQRDVTGTGENKCLHCEFSAHSSASLELHVKRKHTKEFEFYCMACDYYAVTRREMTRHAATEKHKMKRQSYLNSANVEAGSADMSKNIIMPEEEHQQNSEEFQIISGQPSDTLKSRNAADCSILNENTNLDMSKVLCAADSVEVETEEESNFNEDHSFCETFQQAPVKDKVRKPEEMMSLTMSSNYGSPSRFQNENSGSSALNCETAKKNHEISNDAGELRVHCEGEGGNAGDGGGVVPHRHLCPVTLDGERSAESPVLVVTRITREQGNLESGGQNRVARGHGLEDLKGVQEDPVLGNKEILMNSQHETEFILEEDGPASDSTVESSDVYETIISIDDKGQAMYSFGRFDSSIIRIKNPEDGELIDQSEEGLIATGVRISELPLKDCAQGVKKKKSEGSSIGESTRIRCDDCGFLADGLSGLNVHIAMKHPTKEKHFHCLLCGKSFYTESNLHQHLASAGHMRNEQASVEELPEGGATFKCVKCTEPFDSEQNLFLHIKGQHEELLREVNKYIVEDTEQINREREENQGNVCKYCGKMCRSSNSMAFLAHIRTHTGSKPFKCKICHFATAQLGDARNHVKRHLGMREYKCHVCGVAFVMKKHLNTHLLGKHGVGTPKERKFTCHLCDRSFTEKWALNNHMKLHTGEKPFKCTWPTCHYSFLTASAMKDHYRTHTGEKSFLCDLCGFAGGTRHALTKHRRQHTGEKPFKCDECNFASTTQSHLTRHKRVHTGEKPYRCPWCDYRSNCAENIRKHILHTGKHEGVKMYNCPKCDYGTNVPVEFRNHLKEQHPDIENPDLAYLHAGIVSKSYECRLKGQGATFVETDSPFTAAALAEEPLVKEKPLRSSRRPAPPPEQVQQVIIFQGYDGEFALDPSVEETAAATLQTLAMAGQVARVVHITEDGQVIATSQSGAHVGSVVPGPILPEQLADGATQVVVVGGSMEGHGMDESLSPGGAVIQQVTKQEILNLSEAGVAPPEASSALDALLCAVTELGEVEGRAGLEEQGRPGAKDVLIQLPGQEVSHVAADPEAPEIQMFPQAQESPAAVEVLTQVVHPSAAMASQERAQVAFKKMVQGVLQFAVCDTAAAGQLVKDGVTQVVVSEEGAVHMVAGEGAQIIMQEAQGEHMDLVESDGEISQIIVTEELVQAMVQESSGGFSEGTTHYILTELPPGVQDEPGLYSHTVLETADSQELLQAGATLGTEAGAPSRAEQLASVVIYTQEGSSAAAAIQSQRESSELQEA

SEQ ID NO: 44688 - protein, 363 aa, Homo sapiens
MSYARHFLDFQGSAIPQAMQKLVVTRLSPNFREAVTLSRDCPVPLPGDGDLLVRNRFVGVNASDINYSAGRYDPSVKPPFDIGFEGIGEVVALGLSASARYTVGQAVAYMAPGSFAEYTVVPASIATPVPSVKPEYLTLLVSGTTAYISLKELGGLSEGKKVLVTAAAGGTGQFAMQLSKKAKCHVIGTCSSDEKSAFLKSLGCDRPINYKTEPVGTVLKQEYPEGVDVVYESVGGAMFDLAVDALATKGRLIVIGFISGYQTPTGLSPVKAGTLPAKLLKKSASVQGFFLNHYLSKYQAAMSHLLEMCVSGDLVCEVDLGDLSPEGRFTGLESIFRAVNYMYMGKNTGKIVVELPHSVNSKL

SEQ ID NO: 44689 - protein, 1059 aa, Homo sapiens
MRASEGLDACASPTKSASACNRLLNGASQADGARVLNGASQADSGRVLLRSSKKGAEGSACAPGEAKAAVQCSFCKSQFERKKDLELHVHQAHKPFKCRLCSYATLREESLLSHIERDHITAQGPGSGEACVENGKPELSPGEFPCEVCGQAFSQTWFLKAHMKKHRGSFDHGCHICGRRFKEPWFLKNHMKAHGPKTGSKNRPKSELDPIATINNVVQEEVIVAGLSLYEVCAKCGNLFTNLDSLNAHNAIHRRVEASRTRAPAEEGAEGPSDTKQFFLQCLNLRPSAAGDSCPGTQAGRRVAELDPVNSYQAWQLATRGKVAEPAEYLKYGAWDEALAGDVAFDKDRREYVLVSQEKRKREQDAPAAQGPPRKRASGPGDPAPAGHLDPRSAARPNRRAAATTGQGKSSECFECGKIFRTYHQMVLHSRVHRRARRERDSDGDRAARARCGSLSEGDSASQPSSPGSACAAADSPGSGLADEAAEDSGEEGAPEPAPGGQPRRCCFSEEVTSTELSSGDQSHKMGDNASERDTGESKAGIAASVSILENSSRETSRRQEQHRFSMDLKMPAFHPKQEVPVPGDGVEFPSSTGAEGQTGHPAEKLSDLHNKEHSGGGKRALAPDLMPLDLSARSTRDDPSNKETASSLQAALVVHPCPYCSHKTYYPEVLWMHKRIWHRVSCNSVAPPWIQPNGYKSIRSNLVFLSRSGRTGPPPALGGKECQPLLLARFTRTQVPGGMPGSKSGSSPLGVVTKAASMPKNKESHSGGPCALWAPGPDGYRQTKPCHGQEPHGAATQGPLAKPRQEASSKPVPAPGGGGFSRSATPTPTVIARAGAQPSANSKPVEKFGVPPAGAGFAPTNKHSAPDSLKAKFSAQPQGPPPAKGEGGAPPLPPREPPSKAAQELRTLATCAAGSRGDAALQAQPGVAGAPPVLHSIKQEPVAEGHEKRLDILNIFKTYIPKDFATLYQGWGVSGPGLEHRGTLRTQARPGEFVCIECGKSFHQPGHLRAHMRAHSVVFESDGPRGSEVHTTSADAPKQGRDHSNTGTVQTVPLRKGT

SEQ ID NO: 44690 - protein, 1790 aa, Homo sapiens
MRDHERNDKPHRCDQCPQTFNVEFNLTLHKCTHSGEDPTCPVCNKKFSRVASLKAHIMLHEKEENLICSECGDEFTLQSQLAVHMEEHRQELAGTRQHACKACKKEFETSSELKEHMKTHYKIRVSSTRSYNRNIDRSGFTYSCPHCGKTFQKPSQLTRHIRIHTGERPFKCSECGKAFNQKGALQTHMIKHTGEKPHACAFCPAAFSQKGNLQSHVQRVHSEVKNGPTYNCTECSCVFKSLGSLNTHISKMHMGGPQNSTSSTETAHVLTATLFQTLPLQQTEAQATSASSQPSSQAVSDVIQQLLELSEPAPVESGQSPQPGQQLSITVGINQDILQQALENSGLSSIPAAAHPNDSCHAKTSAPHAQNPDVSSVSNEQTDPTDAEQEKEQESPEKLDKKEKKMIKKKSPFLPGSIREENGVRWHVCPYCAKEFRKPSDLVRHIRIHTHEKPFKCPQCFRAFAVKSTLTAHIKTHTGIKAFKCQYCMKSFSTSGSLKVHIRLHTGVRPFACPHCDKKFRTSGHRKTHIASHFKHTELRKMRHQRKPAKVRVGKTNIPVPDIPLQEPILITDLGLIQPIPKNQFFQSYFNNNFVNEADRPYKCFYCHRAYKKSCHLKQHIRSHTGEKPFKCSQCGRGFVSAGVLKAHIRTHTGLKSFKCLICNGAFTTGGSLRRHMGIHNDLRPYMCPYCQKTFKTSLNCKKHMKTHRYELAQQLQQHQQAASIDDSTVDQQSMQASTQMQVEIESDELPQTAEVVAANPEAMLDLEPQHVVGTEEAGLGQQLADQPLEADEDGFVAPQDPLRGHVDQFEEQSPAQQSFEPAGLPQGFTVTDTYHQQPQFPPVQQLQDSSTLESQALSTSFHQQSLLQAPSSDGMNVTTRLIQESSQEELDLQAQGSQFLEDNEDQSRRSYRCDYCNKGFKKSSHLKQHVRSHTGEKPYKCKLCGRGFVSSGVLKSHEKTHTGVKAFSCSVCNASFTTNGSLTRHMATHMSMKPYKCPFCEEGFRTTVHCKKHMKRHQTVPSAVSATGETEGGDICMEEEEEHSDRNASRKSRPEVITFTEEETAQLAKIRPQESATVSEKVLVQSAAEKDRISELRDKQAELQDEPKHANCCTYCPKSFKKPSDLVRHVRIHTGEKPYKCDECGKSFTVKSTLDCHVKTHTGQKLFSCHVCSNAFSTKGSLKVHMRLHTGAKPFKCPHCELRFRTSGRRKTHMQFHYKPDPKKARKPMTRSSSEGLQPVNLLNSSSTDPNVFIMNNSVLTGQFDQNLLQPGLVGQAILPASVSAGGDLTVSLTDGSLATLEGIQLQLAANLVGPNVQISGIDAASINNITLQIDPSILQQTLQQGNLLAQQLTGEPGLAPQNSSLQTSDSTVPASVVIQPISGLSLQPTVTSANLTIGPLSEQDSVLTTNSSGTQDLTQVMTSQGLVSPSGGPHEITLTINNSSLSQVLAQAAGPTATSSSGSPQEITLTISELNTTSGSLPSTTPMSPSAISTQNLVMSSSGVGGDASVTLTLADTQGMLSGGLDTVTLNITSQGQQFPALLTDPSLSGQGGAGSPQVILVSHTPQSASAACEEIAYQVAGVSGNLAPGNQPEKEGRAHQCLECDRAFSSAAVLMHHSKEVHGRERIHGCPVCRKAFKRATHLKEHMQTHQAGPSLSSQKPRVFKCDTCEKAFAKPSQLERHSRIHTGERPFHCTLCEKAFNQKSALQVHMKKHTGERPYKCAYCVMGFTQKSNMKLHMKRAHSYAGALQESAGHPEQDGEELSRTLHLEEVVQEAAGEWQALTHVF

SEQ ID NO: 44691 - protein, 536 aa, Homo sapiens
MSPTLPALDWQLPSHSGPYELRIEVQPKSHHRAHYETEGSRGAVKASAGGHPIVQLHGYLENEPLMLQLFIGTADDRLLRPHAFYQVHRITGKTVSTTSHEAILSNTKVLEIPLLPENSMRAVIDCAGILKLRNSDIELRKGETDIGRKNTRVRLVFRVHVPQPSGRTLSLQVASNPIECSQRSAQELPLVEKQSTDSYPVVGGKKMVLSGHNFLQDSKVIFVEKAPDGHHVWEMEAKTDRDLCKPNSLVVEIPPFRNQRITSPVHVSFYVCNGKRKRSQYQRFTYLPANVPIIKTEPTDDYEPAPTCGPVSQGLSPLPRPYYSQQLAMPPDPSSCLVAGFPPCPQRSTLMPAAPGVSPKLHDLSPAAYTKGVASPGHCHLGLPQPAGEAPAVQDVPRPVATHPGSPGQPPPALLPQQVSAPPSSSCPPGLEHSLCPSSPSPPLPPATQEPTCLQPCSPACPPATGRPQHLPSTVRRDESPTAGPRLLPEVHEDGSPNLAPIPVTVKREPEELDQLYLDDVNEIIRNDLSSTSTHS

SEQ ID NO: 44692 - protein, 153 aa, Homo sapiens
MRSQLLILLGFPYFDPHHFWQWSSFSDYVQCVLAFTGVAGYITYLSIDSALFVETLGFLAVLTEAMLGVPQLYRNHRHQSTEGMSIKMVLMWTSGDAFKTAYFLLKGAPLQFSVCGLLQVLVDLAILGQAYAFARHPQKPAPHAVHPTGTKAL

SEQ ID NO: 44693 - protein, 266 aa, Homo sapiens [sequence omitted]

SEQ ID NO: 44694 - protein, 461 aa, Homo sapiens
MPFDELLALYGYEASDPISDRESEGGDVAPNLPDMTLDKEQIAKDLLSGEEEEETQSSADDLTPSVTSHEASDLFPNRSGSRFLADEDREPGSSASSDTEEDSLPANKCKKEIMVGPQFQADLSNLHLNRHCEKIYENEDQLLWDPSVLPEREVEEFLYRAVKRRWHEMAGPQLPEGEAVKDSEQALYELVKCNFNVEEALRRLRFNVKVIRDGLCAWSEEECRNFEHGFRVHGKNFHLIQANKVRTRSVGECVEYYYLWKKSERYDYFAQQTRLGRRKYVPSGTTDADQDLDGSDPDGPGRPRPEQDTLTGMRTDPLSVDGTAGGLDEPGVASDGLPSSEPGPCSFQQLDESPAVPLSHRPPALADPASYQPAVTAPEPDASPRLAVDFALPKELPLISSHVDLSGDPEETVAPAQVALSVTEFGLIGIGDVNPFLAAHPTCPAPGLHSEPLSHCNVMTC

SEQ ID NO: 44695 - protein, 1122 aa, Homo sapiens
MGAKDATPVPCGRWAKILEKDKRTQQMRMQRLKAKLQMPFQSGEFKALTRRLQVEPRLLSKQMAGCLEDCTRQAPESPWEEQLARLLQEAPGKLSLDVEQAPSGQHSQAQLSGQQQRLLAFFKCCLLTDQLPLAHHLLVVHHGQRQKRKLLTLDMYNAVMLGWARQGAFKELVYVLFMVKDAGLTPDLLSYAAALQCMGRQDQDAGTIERCLEQMSQEGLKLQALFTAVLLSEEDRATVLKAVHKVKPTFSLPPQLPPPVNTSKLLRDVYAKDGRVSYPKLHLPLKTLQCLFEKQLHMELASRVCVVSVEKPTLPSKEVKHARKTLKTLRDQWEKALCRALRETKNRLEREVYEGRFSLYPFLCLLDEREVVRMLLQVLQALPAQGESFTTLARELSARTFSRHVVQRQRVSGQVQALQNHYRKYLCLLASDAEVPEPCLPRQYWEELGAPEALREQPWPLPVQMELGKLLAEMLVQATQMPCSLDKPHRSSRLVPVLYHVYSFRNVQQIGILKPHPAYVQLLEKAAEPTLTFEAVDVPMLCPPLPWTSPHSGAFLLSPTKLMRTVEGATQHQELLETCPPTALHGALDALTQLGNCAWRVNGRVLDLVLQLFQAKGCPQLGVPAPPSEAPQPPEAHLPHSAAPARKAELRRELAHCQKVAREMHSLRAEALYRLSLAQHLRDRVFWLPHNMDFRGRTYPCPPHFNHLGSDVARALLEFAQGRPLGPHGLDWLKIHLVNLTGLKKREPLRKRLAFAEEVMDDILDSADQPLTGRKWWMGAEEPWQTLACCMEVANAVRASDPAAYVSHLPVHQDGSCNGLQHYAALGRDSVGAASVNLEPSDVPQDVYSGVAAQVEVFRRQDAQRGMRVAQVLEGFITRKVVKQTVMTVVYGVTRYGGRLQIEKRLRELSDFPQEFVWEASHYLVRQVFKSLQEMFSGTRAIQHWLTESARLISHMGSVVEWVTPLGVPVIQPYRLDSKVKQIGGGIQSITYTHNGDISRKPNTRKQKNGFPPNFIHSLDSSHMMLTALHCYRKGLTFVSVHDCYWTHAADVSVMNQVCREQFVRLHSEPILQDLSRFLVKRFCSEPQKILEASQLKETLQAVPKPGAFDLEQVKRSTYFFS

SEQ ID NO: 44696 - protein, 501 aa, Homo sapiens
MSSNSASAANGNDSKKFKGDSRSAGVPSRVIHIRKLPIDVTEGEVISLGLPFGKVTNLLMLKGKNQAFIEMNTEEAANTMVNYYTSVTPVLRGQPIYIQFSNHKELKTDSSPNQARAQAALQAVNSVQSGNLALAASAAAVDAGMAMAGQSPVLRIIVENLFYPVTLDVLHQIFSKFGTVLKIITFTKNNQFQALLQYADPVSAQHAKLSLDGQNIYNACCTLRIDFSKLTSLNVKYNNDKSRDYTRPDLPSGDSQPSLDQTMAAAFGLSVPNVHGALAPLAIPSAAAAAAAAGRIAIPGLAGAGNSVLLVSNLNPERVTPQSLFILFGVYGDVQRVKILFNKKENALVQMADGNQAQLAMSHLNGHKLHGKPIRITLSKHQNVQLPREGQEDQGLTKDYGNSPLHRFKKPGSKNFQNIFPPSATLHLSNIPPSVSEEDLKVLFSSNGGVVKGFKFFQKDRKMALIQMGSVEEAVQALIDLHNHDLGENHHLRVSFSKSTI

SEQ ID NO: 44697 - protein, 179 aa, Homo sapiens
MAGQSPVLRIIVENLFYPVTLDVLHQIFSKFGTVLKIITFTKNNQFQALLQYADPVSAQHAKLSLDGQNIYNACCTLRIDFSKLTSLNVKYNNDKSRDYTRPDLPSGDSQPSLDQTMAAAFGLSVPNVHGALAPLAIPSAAAAAAAAGRIAIPGLAGAGNSVLLVSNLNPEASTVTCSA

SEQ ID NO: 44698 - protein, 462 aa, Homo sapiens
MEEDLGEDEEEEEEDYEDEEEEEDEEGLGPPGPASLGTTALFPRKAQPPQAFRGDGVPRVLGGQERPGPGPAHPGGAAHVAPQLQPPDHGDWTYEEQFKQLYELDGDPKRKEFLDDLFSFMQKRGTPVNRIPIMAKQVLDLFMLYVLVTEKGGLVEVINKKLWREITKGLNLPTSITSAAFTLRTQYMKYLYPYECEKRGLSNPNELQAAIDSNRREGRRQSFGGSLFAYSPGGAHGMLSSPKLPVSSLGLAASTNGSSITPAPKIKKEEDSAIPITVPGRLPVSLAGHPVVAAQAAAVQAAAAQAAVAAQAAALEQLREKLESAEPPEKKMALVADEQQRLMQRALQQNFLAMAAQLPMSIRINSQASESRQDSAVNLTGTNGSNSISMSVEINGIMYTGVLFAQPPAPTPTSAPNKGGGGGGGSSSNAGGRGGNTGTSGGQAGPAGLSTPSTSTSNNSLP

SEQ ID NO: 44699 - protein, 2131 aa, Homo sapiens
MYRRRQPVQLLVELLWPLFLFFILVAVRHSHPPLEHHECHFPNKPLPSAGTVPWLQGLICNVNNTCFPQLTPGEEPGRLSNFNDSLVSRLLADARTVLGGASAHRTLAGLGKLIATLRAARSTAQPQPTKQSPLEPPMLDVAELLTSLLRTESLGLALGQAQEPLHSLLEAAEDLAQELLALRSLVELRALLQRPRGTSGPLELLSEALCSVRGPSSTVGPSLNWYEASDLMELVGQEPESALPDSSLSPACSELIGALDSHPLSRLLWRRLKPLILGKLLFAPDTPFTRKLMAQVNRTFEELTLLRDVREVWEMLGPRIFTFMNDSSNVAMLQRLLQMQDEGRRQPRPGGRDHMEALRSFLDPGSGGYSWQDAHADVGHLVGTLGRVTECLSLDKLEAAPSEAALVSRALQLLAEHRFWAGVVFLGPEDSSDPTEHPTPDLGPGHVRIKIRMDIDVVTRTNKIRDRFWDPGPAADPLTDLRYVWGGFVYLQDLVERAAVRVLSGANPRAGLYLQQMPYPCYVDDVFLRVLSRSLPLFLTLAWIYSVTLTVKAVVREKETRLRDTMRAMGLSRAVLWLGWFLSCLGPFLLSAALLVLVLKLGDILPYSHPGVVFLFLAAFAVATVTQSFLLSAFFSRANLAAACGGLAYFSLYLPYVLCVAWRDRLPAGGRVAASLLSPVAFGFGCESLALLEEQGEGAQWHNVGTRPTADVFSLAQVSGLLLLDAALYGLATWYLEAVCPGQYGIPEPWNFPFRRSYWCGPRPPKSPAPCPTPLDPKVLVEEAPPGLSPGVSVRSLEKRFPGSPQPALRGLSLDFYQGHITAFLGHNGAGKTTTLSILSGLFPPSGGSAFILGHDVRSSMAAIRPHLGVCPQYNVLFDMLTVDEHVWFYGRLKGLSAAVVGPEQDRLLQDVGLVSKQSVQTRHLSGGMQRKLSVAIAFVGGSQVVILDEPTAGVDPASRRGIWELLLKYREGRTLILSTHHLDEAELLGDRVAVVAGGRLCCCGSPLFLRRHLGSGYYLTLVKARLPLTTNEKADTDMEGSVDTRQEKKNGSQGSRVGTPQLLALVQHWVPGARLVEELPHELVLVLPYTGAHDGSFATLFRELDTRLAELRLTGYGISDTSLEEIFLKVVEECAADTDMEDGSCGQHLCTGIAGLDVTLRLKMPPQETALENGEPAGSAPETDQGSGPDAVGRVQGWALTRQQLQALLLKRFLLARRSRRGLFAQIVLPALFVGLALVFSLIVPPFGHYPALRLSPTMYGAQVSFFSEDAPGDPGRARLLEALLQEAGLEEPPVQHSSHRFSAPEVPAEVAKVLASGNWTPESPSPACQCSRPGARRLLPDCPAAAGGPPPPQAVTGSGEVVQNLTGRNLSDFLVKTYPRLVRQGLKTKKWVNEVRYGGFSLGGRDPGLPSGQELGRSVEELWALLSPLPGGALDRVLKNLTAWAHSLDAQDSLKIWFNNKGWHSMVAFVNRASNAILRAHLPPGPARHAHSITTLNHPLNLTKEQLSEGALMASSVDVLVSICVVFAMSFVPASFTLVLIEERVTRAKHLQLMGGLSPTLYWLGNFLWDMCNYLVPACIVVLIFLAFQQRAYVAPANLPALLLLLLLYGWSITPLMYPASFFFSVPSTAYVVLTCINLFIGINGSMATFVLELFSDQKLQEVSRILKQVFLIFPHFCLGRGLIDMVRNQAMADAFERLGDRQFQSPLRWEVVGKNLLAMVIQGPLFLLFTLLLQHRSQLLPQPRVRSLPLLGEEDEDVARERERVVQGATQGDVLVLRNLTKVYRGQRMPAVDRLCLGIPPGECFGLLGVNGAGKTSTFRMVTGDTLASRGEAVLAGHSVAREPSAAHLSMGYCPQSDAIFELLTGREHLELLARLRGVPEAQVAQTAGSGLARLGLSWYADRPAGTYSGGNKRKLATALALVGDPAVVFLDEPTTGMDPSARRFLWNSLLAVVREGRSVMLTSHSMEECEALCSRLAIMVNGRFRCLGSPQHLKGRFAAGHTLTLRVPAARSQPAAAFVAAEFPGAELREAHGGRLRFQLPPGGRCALARVFGELAVHGAEHGVEDFSVSQTMLEEVFLYFSKDQGKDEDTEEQKEAGVGVDPAPGLQHPKRVSQFLDDPSTAETVL

SEQ ID NO: 44700 - protein, 187 aa, Homo sapiens
MQLCHDRGYLVTQDELDQTLEEFKAQSGDKPSEGRPRRTDLTVLVAHNDDPTDQMFVFFPEEPKVGIKTIKVYCQRMQEENITRALIVVQQGMTPSAKQSLVDMAPKYILEQFLQQELLINITEHELVPEHVVMTKEEVTELLARYKLRENQLPRIQAGDPVARYFGIKRGQPLLSVSAGGEDHPAQ

SEQ ID NO: 44701 - protein, 412 aa, Homo sapiens
MDTFIHRIDSTEVIYQPRRKRAKLIGKYLMGDLLGEGSYGKVKEVLDSETLCRRAVKILKKKKLRRIPNGEANVKKEIQLLRRLRHKNVIQLVDVLYNEEKQKMYMVMEYCVCGMQEMLDSVPEKRFPVCQAHGYFCQLIDGLEYLHSQGIVHKDIKPGNLLLTTGGTLKISDLGVAEALHPFAADDTCRTSQGSPAFQPPEIANGLDTFSGFKVDIWSAGVTLYNITTGLYPFEGDNIYKLFENIGKGSYAIPGDCGPPLSDLLKGMLEYEPAKRFSIRQIRQHSWFRKKHPPAEAPVPIPPSPDTKDRWRSMTVVPYLEDLHGADEDEDLFDIEDDIIYTQDFTVPGQVPEEEASHNGQRRGLPKAVCMNGTEAAQLSTKSRAEGRAPNPARKACSASSKIRRLSACKQQ

SEQ ID NO: 44702 - protein, 622 aa, Homo sapiens [sequence omitted]

SEQ ID NO: 44703 - protein, 1483 aa, Homo sapiens
MENYVLIDYDTKSFESMQRLCDKYNRAIDSIHQLWKGTTQPMKLNTRPSTGLLRHILQQVYNHSVTDPEKLNNYEPFSPEVYGETSFDLVAQMIDEIKMTDDDLFVDLGSGVGQVVLQVAAATNCKHHYGVEKADIPAKYAETMDREFRKWMKWYGKKHAEYTLERGDFLSEEWRERIANTSVIFVNNFAFGPEVDHQLKERFANMKEGGRIVSSKPFAPLNFRINSRNLSDIGTIMRVVELSPLKGSVSWTGKPVSYYLHTIDRTILENYFSSLKNPKLREEQEAARRRQQRESKSNAATPTKGPEGKVAGPADAPMDSGAEEEKAGAATVKKPSPSKARKKKLNKKGRKMAGRKRGRPKKMNTANPERKPKKNQTALDALHAQTVSQTAASSPQDAYRSPHSPFYQLPPSVQRHSPNPLLVAPTPPALQKLLESFKIQYLQFLAYTKTPQYKASLQELLGQEKEKNAQLLGAAQQLLSHCQAQKEEIRRLFQQKLDELGVKALTYNDLIQAQKEISAHNQQLREQSEQLEQDNRALRGQSLQLLKARCEELQLDWATLSLEKLLKEKQALKSQISEKQRHCLELQISIVELEKSQRQQELLQLKSCVPPDDALSLHLRGKGALGRELEPDASRLHLELDCTKFSLPHLSSMSPELSMNGQAAGYELCGVLSRPSSKQNTPQYLASPLDQEVVPCTPSHVGRPRLEKLSGLAAPDYTRLSPAKIVLRRHLSQDHTVPGRPAASELHSRAEHTKENGLPYQSPSVPGSMKLSPQDPRPLSPGALQLAGEKSSEKGLRERAYGSSGELITSLPISIPLSTVQPNKLPVSIPLASVVLPSRAERARSTPSPVLQPRDPSSTLEKQIGANAHGAGSRSLALAPAGFSYAGSVAISGALAGSPASLTPGAEPATLDESSSSGSLFATVGSRSSTPQHPLLLAQPRNSLPASPAHQLSSSPRLGGAAQGPLPEASKGDLPSDSGFSDPESEAKRRIVFTITTGAGSAKQSPSSKHSPLTASARGDCVPSHGQDSRRRGRRKRASAGTPSLSAGVSPKRRALPSVAGLFTQPSGSPLNLNSMVSNINQPLEITAISSPETSLKSSPVPYQDHDQPPVLKKERPLSQTNGAHYSPLTSDEEPGSEDEPSSARIERKIATISLESKSPPKTLENGGGLAGRKPAPAGEPVNSSKWKSTFSPISDIGLAKSADSPLQASSALSQNSLFTFRPALEEPSADAKLAAHPRKGFPGSLSGADGLSPGTNPANGCTFGGGLAADLSLHSFSDGASLPHKGPEAAGLSSPLSFPSQRGKEGSDANPFLSKRQLDGLAGLKGEGSRGKEAGEGGLPLCGPTDKTPLLSGKAAKARDREVDLKNGHNLFISAAAVPPGSLLSGPGLAPAASSAGGAASSAQTHRSFLGPFPPGPQFALGPMSLQANLGSVAGSSVLQSLFSSVPAAAGLVHVSSAATRLTNSHAMGSFSGVAGGTVGGN

SEQ ID NO: 44704 - protein, 600 aa, Homo sapiens
MATPLPGRAGGPATPLSPTRLSRLQEKEELRELNDRLAHYIDRVRALELENDRLLLKISEKEEVTTREVSGIKALYESELADARRVLDETARERARLQIEIGKLRAELDEVNKSAKKREGELTVAQGRVKDLESLFHRSEVELAAALSDKRGLESDVAELRAQLAKAEDGHAVAKKQLEKETLMRVDLENRCQSLQEELDFRKSVFEEEVRETRRRHERRLVEVDSSRQQEYDFKMAQALEELRSQHDEQVRLYKLELEQTYQAKLDSAKLSSDQNDKAASAAREELKEARMRLESLSYQLSGLQKQASAAEDRIRELEEAMAGERDKFRKMLDAKEQEMTEMRDVMQQQLAEYQELLDVKLALDMEINAYRKLLEGEEERLKLSPSPSSRVTVSRATSSSSGSLSATGRLGRSKRKRLEVEEPLGSGPSVLGTGTGGSGGFHLAQQASASGSVSIEEIDLEGKFVQLKNNSDKDQSLGNWRIKRQVLEGEEIAYKFTPKYILRAGQMVTVWAAGAGVAHSPPSTLVWKGQSSWGTGESFRTVLVNADGEEVAMRTVKKSSVMRENENGEEEEEEAEFGEEDLFHQQGDPRTTSRGCYVM

SEQ ID NO: 44705 - protein, 218 aa, Homo sapiens [sequence omitted]

SEQ ID NO: 44706 - protein, 679 aa, Homo sapiens [sequence omitted]

SEQ ID NO: 44707 - protein, 196 aa, Homo sapiens
MFPQSRHSGSSHLPQQLKFTTSDSCDRIKDEFQLLQAQYHSLKLECDKLASEKSEMQRHYVMYYEMSYGLNIEMHKQAEIVKRLNGICAQVLPYLSQEHQQQVLGAIERAKQVTAPELNSIIRQQLQAHQLSQLQALALPLTPLPVGLQPPSLPAVSAGTGLLSLSALGSQAHLSKEDKNGHDGDTHQEDDGEKSD

SEQ ID NO: 44708 - protein, 380 aa, Homo sapiens [sequence omitted]

SEQ ID NO: 44709 - protein, 391 aa, Homo sapiens
MSKDEERAVKDELLGEKPEVKQKWASRLLAKLRKDIRPECREDFVLSITGKKAPGCVLSNPDQKGKMRRIDCLRQADKVWRLDLVMVILFKGIPLESTDGERLVKAAQCGHPVLCVQPHHIGVAVKELDLYLAYFVRERDAEQSGSPRTGMGSDQEDSKPITLDTTDFQESFVTSGVFSVTELIQVSRTPVVTGTGPNFSLGELQGHLAYDLNPASTGLRRTLPSTSSSGSKRHKSGSMEEDVDTSPGGDYYTSPSSPTSSSRNWTEDMEGGISSPVKKTEMDKSPFNSPSPQDSPRLSSFTQHHRPVIAVHSGIARSPHPSSALHFPTTSILPQTASTYFPHTAIRYPPHLNPQDPLKDLVSLACDPASQQPGPPTLRPTRPLQTVPLWD

SEQ ID NO: 44710 - protein, 460 aa, Homo sapiens
MSKDEERAVKDELLGEKPEVKQKWASRLLAKLRKDIRPECREDFVLSITGKKAPGCVLSNPDQKGKMRRIDCLRQADKVWRLDLVMVILFKGIPLESTDGERLVKAAQCGHPVLCVQPHHIGVAVKELDLYLAYFVRERDAEQSGSPRTGMGSDQEDSKPITLDTTDFQESFVTSGVFSVTELIQVSRTPVVTGTGPNFSLGELQGHLAYDLNPASTGLRRTLPSTSSSGSKRHKSGSMEEDVDTSPGGDYYTSPSSPTSSSRNWTEDMEGGISSPVKKTEMDKSPFNSPSPQDSPRLSSFTQHHRPVIAVHSGIARSPHPSSALHFPTTSILPQTASTYFPHTAIRYPPHLNPQDPLKDLVSLACDPASQQPGPLNGSGQLKMPSHCLSAQMLAPPPPGLPRLALPPATKPATTSEGGATSPTSPSYSPPDTSPANRSFVGLGPRDPAGIYQAQSWYLG

SEQ ID NO: 44711 - protein, 206 aa, Homo sapiens
MLGGLSVGLSFLLNTVSVATLCHVYHGQEAAQQRPRDSEVEMMAQLLGIMVVASVCWLPLLVFIAQTVLRNPPAMSPAGQLSRTTEKELLIYLRVATWNQILDPWVYILFRRAVLRRLQPRLSTRPRRSLTLWPSLEYSGTISAHCNLRLPGSSDSRASASRAAGITGVSHCARPCMLFDPEFDLLAGVQLLPFEPPTGKALSRKD

SEQ ID NO: 44712 - protein, 489 aa, Homo sapiens
MLLGFVGRSKSGLKHELVTRALQLVQFDCSPELFKKIKELYETRYAKKNSEPAPQPHRPLDPLTMHSTYDRAGAVPRTPLAGPNIDYPVLYGKYLNGLGRLPAKTLKPEVRLVKLPFFNMLDELLKPTELVPQNNEKLQESPCIFALTPRQVELIRNSRELQPGVKAVQVVLRICYSDTSCPQEDQYPPNIAVKVNHSYCSVPGYYPSNKPGVEPKRPCRPINLTHLMYLSSATNRITVTWGNYGKSYSVALYLVRQLTSSELLQRLKTIGVKHPELCKALVKEKLRLDPDSEIATTGVRVSLICPLVKMRLSVPCRAETCAHLQCFDAVFYLQMNEKKPTWMCPVCDKPAPYDQLIIDGLLSKILSECEDADEIEYLVDGSWCPIRAEKERSCSPQGAILVLGPSDANGLLPAPSVNGSGALGSTGGGGPVGSMENGKPGADVVDLTLDSSSSSEDEEEEEEEEEDEDEEGPRPKRRCPFQKGLVPAC

SEQ ID NO: 44713 - protein, 333 aa, Homo sapiens
MEKKVDVTSKAVTEVLARTIEYLQPNPASRAKLTMLNTVSKIRGQVKNPGYPQSEGLLGECMIRHGKELGGESNFGDALLDAGESMKRLAEVKDSLDIEVKQNFIDPLQNLCEKDLKEIQHHLKKLEGRRLDFDYKKKRQGKIPDEELRQALEKFEESKEVAETSMHNLLETDIEQVSQLSALVDAQLDYHRQAVQILDELAEKLKRRMREASSRPKREYKPKPREPFDLGEPEQSNGGFPCTTAPKIAASSSFRSSDKPIRTPSRSMPPLDQPSCKALYDFEPENDGELGFHEGDVITLTNQIDENWYEGMLDGQSGFFPLSYVEVLVPLPQ

SEQ ID NO: 44714 - protein, 285 aa, Homo sapiens
MEKKVDVTSKAVTEVLARTIEYLQPNPGDALLDAGESMKRLAEVKDSLDIEVKQNFIDPLQNLCEKDLKEIQHHLKKLEGRRLDFDYKKKRQGKIPDEELRQALEKFEESKEVAETSMHNLLETDIEQVSQLSALVDAQLDYHRQAVQILDELAEKLKRRMREASSRPKREYKPKPREPFDLGEPEQSNGGFPCTTAPKIAASSSFRSSDKPIRTPSRSMPPLDQPSCKALYDFEPENDGELGFHEGDVITLTNQIDENWYEGMLDGQSGFFPLSYVEVLVPLPQ

SEQ ID NO: 44715 - protein, 489 aa, Homo sapiens
MATTGTPTADRGDAAATDDPAARFQVQKHSWDGLRSIIHGSRKYSGLIVNKAPHDFQFVQKTDESGPHSHRLYYLGMPYGSRENSLLYSEIPKKVRKEALLLLSWKQMLDHFQATPHHGVYSREEELLRERKRLGVFGITSYDFHSESGLFLFQASNSLFHCRDGGKNGFMVSPMKPLEIKTQCSGPRMDPKICPADPAFFSFINNSDLWVANIETGEERRLTFCHQGLSNVLDDPKSAGVATFVIQEEFDRFTGYWWCPTASWEGSEGLKTLRILYEEVDESEVEVIHVPSPALEERKTDSYRYPRTGSKNPKIALKLAEFQTDSQGKIVSTQEKELVQPFSSLFPKVEYIARAGWTRDGKYAWAMFLDRPQQWLQLVLLPPALFIPSTENEEQRLASARAVPRNVQPYVVYEEVTNVWINVHDIFYPFPQSEGEDELCFLRANECKTGFCHLYKVTAVLKSQGYDWSEPFSPGEGEQSLTNAVDSSR

SEQ ID NO: 44716 - protein, 471 aa, Homo sapiens
MPFLSLHRSPHGPSKLCDDPQASLVPEPVPGGCQEPEEMSWPPSGEIASPPELPSSPPPGLPEVAPDATSTGLPDTPAAPETSTNYPVECTEGSAGPQSLPLPILEPVKNPCSVKDQTPLQLSVEDTTSPNTKPCPPTPTTPETSPPPPPPPPSSTPCSAHLTPSSLFPSSLESSSEQKFYNFVILHARADEHIALRVREKLEALGVPDGATFCEDFQVPGRGELSCLQDAIDHSAFIILLLTSNFDCRLSLHQVNQAMMSNLTRQGSPDCVIPFLPLESSPAQLSSDTASLLSGLVRLDEHSQIFARKVANTFKPHRLQARKAMWRKEQDTRALREQSQHLDGERMQAAALNAAYSAYLQSYLSYQAQMEQLQVAFGSHMSFGTGAPYGARMPFGGQVPLGAPPPFPTWPGCPQPPPSPAFPTASPAPPQSPGLQPLIIHHAQMVQLGLNNHMWNQRGSQAPEDKTQEAE

SEQ ID NO: 44717 - protein, 403 aa, Homo sapiens
MPLISSTCDMVSAAYASTKESYPHIKTVCDAAEKGVRTLTAAAVSGAQPILSKLEPQIASASEYAHRGLDKLEENLPILQQPTEKVLADTKELVSSKVSGAQEMVSSAKDTVATQLSEAVDATRGAVQSGVDKTKSVVTGGVQSVMGSRLGQMVLSGVDTVLGKSEEWADNHLPLTDAELARIATSLDGFDVASVQQQRQEQSYFVRLGSLSERLRQHAYEHSLGKLRATKQRAQEALLQLSQVLSLMETVKQGVDQKLVEGQEKLHQMWLSWNQKQLQGPEKEPPKPEQVESRALTMFRDIAQQLQATCTSLGSSIQGLPTNVKDQVQQARRQVEDLQATFSSIHSFQDLSSSILAQSRERVASAREALDHMVEYVAQNTPVTWLVGPFAPGITEKAPEEKK

SEQ ID NO: 44718 - protein, 402 aa, Homo sapiens
MPLISSTCDMVSAAYASTKESYPHIKTVCDAAEKGVRTLTAAAVSGAQPILSKLEPQIASASEYAHRGLDKLEENLPILQQPTEKVLADTKELVSSKVSGAQEMVSSAKDTVATQLSEAVDATRGAVQSGVDKTKSVVTGGVQSVMGSRLGQMVLSGVDTVLGKSEEWADNHLPLTDAELARIATSLDGFDVASVQQQRQEQSYFVRLGSLSERLRQHAYEHSLGKLRATKQRAQEALLQLSQVLSLMETVKQGVDQKLVEGQEKLHQMWLSWNQKQLQGPEKEPPKPEVESRALTMFRDIAQQLQATCTSLGSSIQGLPTNVKDQVQQARRQVEDLQATFSSIHSFQDLSSSILAQSRERVASAREALDHMVEYVAQNTPVTWLVGPFAPGITEKAPEEKK

SEQ ID NO: 44719 - protein, 897 aa, Homo sapiens
MERLKKAVKEEGQDPDEIGIELEATSKKSAKRCVKGLKMEEEGTEDNGLEDDSRDGQEDMEASLENLQNMGMMDMSVLDETEVANSSAPDFGEDGTDGLLDSFCDSKEYVAAQLRQLPAQPPEHAVDGEGFKNTLETSSLNFKVTPDIEESLLEPENEKILDILGETCKSEPVKEESSELEQPFAQDTSSVGPDRKLAEEEDLFDSAHPEEGDLDLASESTAHAQSSKADSLLAVVKREPAEQPGDGERTDCEPVGLEPAVEQSSAASELAEASSEELAEAPTEAPSPEARDSKEDGRKFDFDACNEVPPAPKESSTSEGADQKMSSFKEEKDIKPIIKDEKGRVGSGSGRNLWVSGLSSTTRATDLKNLFSKYGKVVGAKVVTNARSPGARCYGFVTMSTSDEATKCISHLHRTELHGRMISVEKAKNEPAGKKLSDRKECEVKKEKLSSVDRHHSVEIKIEKTVIKKEEKIEKKEEKKPEDIKKEEKDQDELKPGPTNRSRVTKSGSRGMERTVVMDKSKGEPVISVKTTSRSKERSSKSQDRKSESKEKRDILSFDKIKEQRERERQRQREREIRETERRREREQREREQRLEAFHERKEKARLQRERLQLECQRQRLERERMERERLERERMRVERERRKEQERIHREREELRRQQEQLRYEQERRPGRRPYDLDRRDDAYWPEGKRVAMEDRYRADFPRPDHRFHDFDHRDRGQYQDHAIDRREGSRPMMGDHRDGQHYGDDRHGHGGPPERHGRDSRDGWGGYGSDKRLSEGRGLPPPPRGGRDWGEHNQRLEEHQARAWQGAMDAGAASREHARWQGGERGLSGPSGPGHMASRGGVAGRGGFAQGGHSQGHVVPGGGLEGGGVASQDRGSRVPHPHPHPPPYPHFTRRY

SEQ ID NO: 44720 - protein, 859 aa, Homo sapiens
MERLKKAIEDEGGNPDEIEITSEGNKKTSKRSSKGRKPEEEGVEDNGLEENSGDGQEDVETSLENLQDIDIMDISVLDEAEIDNGSVADCVEDDDADNLQESLSDSRELVEGEMKELPEQLQEHAIEDKETINNLDTSSSDFTILQEIEEPSLEPENEKILDILGETCKSEPVKEESSELEQPFAQDTSSVGPDRKLAEEEDLFDSAHPEEGDLDLASESTAHAQSSKADSLLAVVKREPAEQPGDGERTDCEPVGLEPAVEQSSAASELAEASSEELAEAPTEAPSPEARDSKEDGRKFDFDACNEVPPAPKESSTSEGADQKMSSPEDDSDTKRLSKEEKGRSSCGRNFWVSGLSSTTRATDLKNLFSKYGKVVGAKVVTNARSPGARCYGFVTMSTAEEATKCINHLHKTELHGKMISVEKAKNEPVGKKTSDKRDSDGKKEKSSNSDRSTNLKRDDKCDRKDDAKKGDDGSGEKSKDQDDQKPGPSERSRATKSGSRGTERTVVMDKSKGVPVISVKTSGSKERASKSQDRKSASREKRSVVSFDKVKEPRKSRDSESHRVRERSEREQRMQAQWEREERERLEIARERLAFQRQRLERERMERERLERERMHVEHERRREQERIHREREELRRQQELRYEQERRPAVRRPYDLDRRDDAYWPEAKRAALDERYHSDFNRQDRFHDFDHRDRGRYPDHSVDRREGSRSMMGEREGQHYPERHGGPERHGRDSRDGWGGYGSDKRMSEGRGLPPPPRGRRDWGDHGRREDDRSWQGTADGGMMDRDHKRWQGGERSMSGHSGPGHMMNRGGMSGRGSFAPGGASRGHPIPHGGMQGGFGGQSRGSRPSDARFTRRY

SEQ ID NO: 44721 - protein, 99 aa, Homo sapiens
MAVGLNKGHKVTKNVSKPRHSRRRGRLTKHTKFVRDMIREVCGFAPYERRAMELLKVSKDKRALKFIKKRVGTHIRAKRKREELSNVLAAMRKAAAKKD

SEQ ID NO: 44722 - protein, 873 aa, Homo sapiens
MLAAAGGRVPTAAGAWLLRGPVITALTPMTIPDVFPHLPLIAITRNPVFPRFIKIIEVKNKKLVELLRRKVRLAQPYVGVFLKRDDSNESDVVESLDEIYHTGTFAQIHEMQDLGDKLRMIVMGHRRVHISRQLEVEPEEPEAENKHKPRRKSKRGKKEAEDELSARHPAELAMEPTPELPAEVLMVEVENVVHEDFQVTEEVKALTAEIVKTIRDIIALNPLYRESVLQMMQAGQRVVDNPIYLSDMGAALTGAESHELQDVLEETNIPKRLYKALSLLKKEFELSKLQQRLGREVEEKIKQTHRKYLLQEQLKIIKKELGLEKDDKDAIEEKFRERLKELVVPKHVMDVVDEELSKLGLLDNHSSEFNVTRNYLDWLTSIPWGKYSNENLDLARAQAVLEEDHYGMEDVKKRILEFIAVSQLRGSTQGKILCFYGPPGVGKTSIARSIARALNREYFRFSVGGMTDVAEIKGHRRTYVGAMPGKIIQCLKKTKTENPLILIDEVDKIGRGYQGDPSSALLELLDPEQNANFLDHYLDVPVDLSKVLFICTANVTDTIPEPLRDRMEMINVSGYVAQEKLAIAERYLVPQARALCGLDESKAKLSSDVLTLLIKQYCRESGVRNLQKQVEKVLRKSAYKIVSGEAESVEVTPENLQDFVGKPVFTVERMYDVTPPGVVMGLAWTAMGGSTLFVETSLRRPQDKDAKGDKDGSLEVTGQLGEVMKESARIAYTFARAFLMQHAPANDYLVTSHIHLHVPEGATPKDGPSAGCTIVTALLSLAMGRPVRQNLAMTGEVSLTGKILPVGGIKEKTIAAKRAGVTCIVLPAENKKDFYDLAAFITEGLEVHFVEHYREIFDIAFPDEQAEALAVER

SEQ ID NO: 44723 - protein, 277 aa, Homo sapiens [sequence omitted]

SEQ ID NO: 44724 - protein, 678 aa, Homo sapiens
MQPISLPRVQQVPQQVQPVQHVYPAQVQYVEGGDAVYTNGAIRTAYTYNPEPQMYAPSSTASYFEAPGGAQVTVAASSPPAVPSHSMVGITMDVGGSPIVSSAGAYLIHGGMDSTRHSLAHTSRSSPATLEMAIENLQKSEGITSHKSGLLNSHLQWLLDNYETAEGVSLPRSSLYNHYLRHCQEHKLDPVNAASFGKLIRSVFMGLRTRRLGTRGNSKYHYYGIRLKPDSPLNRLQEDTQYMAMRQQPMHQKPRYRPAQKTDSLGDSGSHSGLHSTPEQTMAVQSQHHQQYIDVSHVFPEFPAPDLGSFLLQDGVTLHDVKALQLVYRRHCEATVDVVMNLQFHYIEKLWLSFWNSKASSSDGPTSLPASDEDPEGAVLPKDKLISLCQCDPILRWMRSCDHILYQALVEILIPDVLRPVPSTLTQAIRNFAKSLEGWLTNAMSDFPQQVIQTKVGVVSAFAQTLRRYTSLNHLAQAARAVLQNTSQINQMLSDLNRVDFANVQEQASWVCQCEESVVQRLEQDFKLTLQQQSSLDQWASWLDSVVTQVLKQHAGSPSFPKAARQFLLKWSFYSSMVIRDLTLRSAASFGSFHLIRLLYDEYMFYLVEHRVAEATGETPIAVMGEFNDLASLSLTLLDKDDMGDEQRGSEAGPDARSLGEPLVKRERSDPNHSLQGI

SEQ ID NO: 44725 - protein, 567 aa, Homo sapiens
MTEEYRVPDGMVGLIIGRGGEQINKIQQDSGCKVQISPDSGGLPERSVSLTGAPESVQKAKMMLDDIVSRGRGGPPGQFHDNANGGQNGTVQEIMIPAGKAGLVIGKGGETIKQLQERAGVKMILIQDGSQNTNVDKPLRIIGDPYKVQQACEMVMDILRERDQGGFGDRNEYGSRIGGGIDVPVPRHSVGVVIGRSGEMIKKIQNDAGVRIQFKQDDGTGPEKIAHIMGPPDRCEHAARIINDLLQSLRSGPPGPPGGPGMPPGGRGRGRGQGNWGPPGGEMTFSIPTHKCGLVIGRGGENVKAINQQTGAFVEISRQLPPNGDPNFKLFIIRGSPQQIDHAKQLIEEKIEGPLCPVGPGPGGPGPAGPMGPFNPGPFNQGPPGAPPHAGGPPPHQYPPQGWGNTYPQWQPPAPHDPSKAAAAAADPNAAWAAYYSHYYQQPPGPVPGPAPAPAAPPAQGEPPQPPPTGQSDYTKAWEEYYKKIGQQPQQPGAPPQQDYTKAWEEYYKKQAQVATGGGPGAPPGSQPDYSAAWAEYYRQQAAYYGQTPGPGGPQPPPTQQGQQQAQ

SEQ ID NO: 44726 - protein, 1246 aa, Homo sapiens
MNITRGSVRIEKNNELCYLATIDWSRILDSVEDNYIVLNKDDNEECGDICPGTAKGKTNCPATVINGQFVERCWTHSHCQKVCPTICKSHGCTAEGLCCHSECLGNCSQPDDPTKCVACRNFYLDGRCVETCPPPYYHFQDWRCVNFSFCQDLHHKCKNSRRQGCHQYVIHNNKCIPECPSGYTMNSSNLLCTPCLGPCPKVCHLLEGEKTIDSVTSAQELRGCTVINGSLIINIRGGNNLAAELEANLGLIEEISGYLKIRRSYALVSLSFFRKLRLIRGETLEIGNYSFYALDNQNLRQLWDWSKHNLTITQGKLFFHYNPKLCLSEIHKMEEVSGTKGRQERNDIALKTNGDQASCENELLKFSYIRTSFDKILLRWEPYWPPDFRDLLGFMLFYKEAPYQNVTEFDGQDACGSNSWTVVDIDPPLRSNDPKSQNHPGWLMRGLKPWTQYAIFVKTLVTFSDERRTYGAKSDIIYVQTDATNPSVPLDPISVSNSSSQIILKWKPPSDPNGNITHYLVFWERQAEDSELFELDYCLKGLKLPSRTWSPPFESEDSQKHNQSEYEDSAGECCSCPKTDSQILKELEESSFRKTFEDYLHNVVFVPRKTSSGTGAEDPRPSRKRRSLGDVGNVTVAVPTVAAFPNTSSTSVPTSPEEHRPFEKVVNKESLVISGLRHFTGYRIELQACNQDTPEERCSVAAYVSARTMPEAKADDIVGPVTHEIFENNVVHLMWQEPKEPNGLIVLYEVSYRRYGDEELHLCVSRKHFALERGCRLRGLSPGNYSVRIRATSLAGNGSWTEPTYFYVTDYLDVPSNIAKIIIGPLIFVFLFSVVIGSIYLFLRKRQPDGPLGPLYASSNPEYLSASDVFPCSVYVPDEWEVSREKITLLRELGQGSFGMVYEGNARDIIKGEAETRVAVKTVNESASLRERIEFLNEASVMKGFTCHHVVRLLGVVSKGQPTLVVMELMAHGDLKSYLRSLRPEAENNPGRPPPTLQEMIQMAAEIADGMAYLNAKKFVHRDLAARNCMVAHDFTVKIGDFGMTRDIYETDYYRKGGKGLLPVRWMAPESLKDGVFTTSSDMWSFGVVLWEITSLAEQPYQGLSNEQVLKFVMDGGYLDQPDNCPERVTDLMRMCWQFNPKMRPTFLEIVNLLKDDLHPSFPEVSFFHSEENKAPESEELEMEFEDMENVPLDRSSHCQREEAGGRDGGSSLGFKRSYEEHIPYTHMNGGKKNGRILTLPRSNPS

SEQ ID NO: 44727 - protein, 106 aa, Homo sapiens
MRGLKPWTQYAIFVKTLVTFSDERRTYGAKSDIIYVQTDATNPSVPLDPISVSNSSSQIILKWKPPSDPNGNITHYLVFWERQAEDSELFELDYCLKGRVQSSAPL

SEQ ID NO: 44728 - protein, 987 aa, Homo sapiens
MDEADSAFLKFKQTADDSLSLTSPNTESIFVEDPYTASLRSEIESDGHEFEAESWSLAVDAAYAKKQKREVVKRQDVLYELMQTEVHHVRTLKIMLKVYSRALQEELQFSSKAIGRLFPCADDLLETHSHFLARLKERRQESLEEGSDRNYVIQKIGDLLVQQFSGENGERMKEKYGVFCSGHNEAVSHYKLLLQQNKKFQNLIKKIGNFSIVRRLGVQECILLVTQRITKYPVLVERIIQNTEAGTEDYEDLTQALNLIKDIISQVDAKVSECEKGQRLREIAGKMDLKSSSKLKNGLTFRKEDMLQRQLHLEGMLCWKTTSGRLKDILAILLTDVLLLLQEKDQKYVFASVDSKPPVISLQKLIVREVANEEKAMFLISASLQGPEMYEIYTSSKEDRNAWMAHIQRAVESCPDEEEGPFSLPEEERKVVEARATRLRDFQERLSMKDQLIAQSLLEKQQIYLEMAEMGGLEDLPQPRGLFRGGDPSETLQGELILKSAMSEIEGIQSLICRQLGSANGQAEDGGSSTGPPRRAETFAGYDCTNSPTKNGSFKKKVSSTDPRPRDWRGPPNSPDLKLSDSDIPGSSEESPQVVEAPGTESDPRLPTVLESELVQRIQTLSQLLLNLQAVIAHQDSYVETQRAAIQEREKQFRLQSTRGNLLLEQERQRNFEKQREERAALEKLQSQLRHEQQRWERERQWQHQELERAGARLQEREGEARQLRERLEQERAELERQRQAYQHDLERLREAQRAVERERERLELLRRLKKQNTAPGALPPDTLAEAQPPSHPPSFNGEGLEGPRVSMLPSGVGPEYAERPEVARRDSAPTENRLAKSDVPIQLLSATNQFQRQAAVQQQIPTKLAASTKGGKDKGGKSRGSQRWESSASFDLKQQLLLNKLMGKDESTSRNRRSLSPILPGRHSPAPPPDPGFPAPSPPPADSPSEGFSLKAGGTALLPGPPAPSPLPATPLSAKEDASKEDVIFF

SEQ ID NO: 44729 - protein, 481 aa, Homo sapiens
MSSSFDLDPDVIGPVPLILDPNSDTLSPGDPKVDPISSGLTATPQVLATSPAVLPAPASPPRPFSCPDCGRAFRRSSGLSQHRRTHSGEKPYRCPDCGKSFSHGATLAQHRGIHTGARPYQCAACGKAFGWRSTLLKHRSSHSGEKPHHCPVCGKAFGHGSLLAQHLRTHGGPRPHKCPVCAKGFGQGSALLKHLRTHTGERPYPCPQCGKAFGQSSALLQHQRTHTAERPYRCPHCGKAFGQSSNLQHHLRIHTGERPYACPHCSKAFGQSSALLQHLHVHSGERPYRCQLCGKAFGQASSLTKHKRVHEGAAAAAAAAAAAAAAAAAGLGLGPGLSPASMMRPGQVSLLGPDAVSVLGSGLGLSPGTSSGRNPDPGSGPGTLPDPSSKPLPGSRSTPSPTPVESSDPKAGHDAGPDLVPSPDLDPVPSPDPDPVPSPDPNPVSCPDPCSPTRGTVSPALPTGESPEWVQEQGALLGPDG

SEQ ID NO: 44730 - protein, 1313 aa, Homo sapiens [sequence omitted]

SEQ ID NO: 44731 - protein, 852 aa, Homo sapiens [sequence omitted]

SEQ ID NO: 44732 - protein, 353 aa, Homo sapiens
MLGLPSTLFTPRSMESIEIDQKLQEIMKQTGYLTIGGQRYQAEINDLENLGEMGSGTCGQVWKMRFRKTGHVIAVKQMRRSGNKEENKRILMDLDVVLKSHDCPYIVQCFGTFITNTDVFIAMELMGTCAEKLKKRMQGPIPERILGKMTVAIVKALYYLKEKHGVIHRDVKPSNILLDERGQIKLCDFGISGRLVDSKAKTRSAGCAAYMAPERIDPPDPTKPDYDIRADVWSLGISLPCPSPSQVELATGQFPYKNCKTDFEVLTKVLQEEPPLLPGHMGFSGDFQSFVKDCLTKDHRKRPKYNKLLEHSFIKRYETLEVDVASWFKDVMAKTESPRTSGVLSQPHLPFFR

SEQ ID NO: 44733 - protein, 346 aa, Homo sapiens
MLGLPSTLFTPRSMESIEIDQKLQEIMKQTGYLTIGGQRYQAEINDLENLGEMGSGTCGQVWKMRFRKTGHVIAVKQMRRSGNKEENKRILMDLDVVLKSHDCPYIVQCFGTFITNTDVFIAMELMGTCAEKLKKRMQGPIPERILGKMTVAIVKALYYLKEKHGVIHRDVKPSNILLDERGQIKLCDFGISGRLVDSKAKTRSAGCAAYMAPERIDPPDPTKPDYDIRADVWSLGISLVELATGQFPYKNCKTDFEVLTKVLQEEPPLLPGHMGFSGDFQSFVKDCLTKDHRKRPKYNKLLEHSFIKRYETLEVDVASWFKDVMAKTESPRTSGVLSQPHLPFFR

SEQ ID NO: 44734 - protein, 235 aa, Homo sapiens
MAQVGAWRTGALGLALLLLLGLGLGLEAAASPLSTPTSAQAAGIEPCTQKGQCPPPPGLPCPCTGVSDCSGGTDKKLRNCSRLACLAGELRCTLSDDCIPLTWRCDGHPDCPDSSDELGCGTNEILPEGDATTMGPPVTLESVTSLRNATTMGPPVTLESVPSVGNATSSSAGDQSGSPTAYGVIAAAAVLSASLVTATLLLLSWLRAQERLRPLGLLVAMKESLLLSEQKTSLP

SEQ ID NO: 44735 - protein, 610 aa, Homo sapiens
MEESMKKAAEVLNKHSLSGRPLKVKEDPDGEHARRAMQKVMATTGGMGMGPGGPGMITIPPSILNNPNIPNEIIHALQAGRLGSTVFVANLDYKVGWKKLKEVFSMAGVVVRADILEDKDGKSRGIGTVTFEQSIEAVQAISMFNGQLLFDRPMHVKMDERALPKGDFFPPERPQQLPHGLGGIGMGLGPGGQPIDANHLNKGIGMGNIGPAGMGMEGIGFGINKMGGMEGPFGGGMENMGRFGSGMNMGRINEILSNALKRGEIIAKQGGGGGGGSVPGIERMGPGIDRLGGAGMERMGAGLGHGMDRVGSEIERMGLVMDRMGSVERMGSGIERMGPLGLDHMASSIERMGQTMERIGSGVERMGAGMGFGLERMAAPIDRVGQTIERMGSGVERMGPAIERMGLSMERMVPAGMGAGLERMGPVMDRMATGLERMGANNLERMGLERMGANSLERMGLERMGANSLERMGPAMGPALGAGIERMGLAMGGGGGASFDRAIEMERGNFGGSFAGSFGGAGGHAPGVARKACQIFVRNLPFDFTWKMLKDKFNECGHVLYADIKMENGKSKGCGVVKFESPEVAERACRMMNGMKLSGREIDVRIDRNA

SEQ ID NO: 44736 - protein, 571 aa, Homo sapiens
MEESMKKAAEVLNKHSLSGRPLKVKEDPDGEHARRAMQKAGRLGSTVFVANLDYKVGWKKLKEVFSMAGVVVRADILEDKDGKSRGIGTVTFEQSIEAVQAISMFNGQLLFDRPMHVKMDERALPKGDFFPPERPQQLPHGLGGIGMGLGPGGQPIDANHLNKGIGMGNIGPAGMGMEGIGFGINKMGGMEGPFGGGMENMGRFGSGMNMGRINEILSNALKRGEIIAKQGGGGGGGSVPGIERMGPGIDRLGGAGMERMGAGLGHGMDRVGSEIERMGLVMDRMGSVERMGSGIERMGPLGLDHMASSIERMGQTMERIGSGVERMGAGMGFGLERMAAPIDRVGQTIERMGSGVERMGPAIERMGLSMERMVPAGMGAGLERMGPVMDRMATGLERMGANNLERMGLERMGANSLERMGLERMGANSLERMGPAMGPALGAGIERMGLAMGGGGGASFDRAIEMERGNFGGSFAGSFGGAGGHAPGVARKACQIFVRNLPFDFTWKMLKDKFNECGHVLYADIKMENGKSKGCGVVKFESPEVAERACRMMNGMKLSGREIDVRIDRNA

SEQ ID NO: 44737 - protein, 379 aa, Homo sapiens
MLATAEPSSSETDKEVLSPAVPAAAPSSSMSEEPGPEQAATPPVWERGGAGGMQQGSSPAPDSCQPGPGPSPGLTSIVSGTSEDLRPPRRRPPPGKQIPCSSPGCCLSFPSVRDLAQHLRTHCPPTQSLEGKLFRCSALSCTETFPSMQELVAHSKLHYKPNRYFKCENCLLRFRTHRSLFKHLHVCAEHAQSPAPPPPPALDREPPAPERPPEVDPASAPGLPFPLLEPFTTPAPAPTGPFLPYLNPAPFGLSPPRLRPFLAAAPGPPASSAAVWKKSQGAGSSPRRPQGGSDAPSGHAAPSRIVWEHTRGRYSCMQCAFSTASRPAMTLHLEDHRPGAPAAPAAGPPRPDAPADPAPLAPKVSPLLSEGELPVFSQL

SEQ ID NO: 44738 - protein, 510 aa, Homo sapiens
MLENYSNLTSLGYQVGKPSLISHLEQEEEPRTEERGAHQGACADWETPSKTKWSLLMEDIFGKETPSGVTMERAGLGEKSTEYAHLFEVFGMDPHLTQPMGRHAGKRPYHRRDYGVAFKGRPHLTQHMSMYDGRKMHECHQCQKAFTTSASLTRHRRIHTGEKPYECSDCGKAFNDPSALRSHARTHLKEKPFDCSQCGNAFRTLSALKIHMRVHTGERPYKCDQCGKAYGRSCHLIAHKRTHTGERPYECHDCGKAFQHPSHLKEHVRNHTGEKPYACTQCGKAFRWKSNFNLHKKNHMVEKTYECKECGKSFGDLVSRRKHMRIHIVKKPVECRQCGKTFRNQSILKTHMNSHTGEKPYGCDLCGKAFSASSNLTAHRKIHTQERRYECAACGKVFGDYLSRRRHMSVHLVKKRVECRQCGKAFRNQSTLKTHMRSHTGEKPYECDHCGKAFSIGSNLNVHRRIHTGEKPYECLVCGKAFSDHSSLRSHVKTHRGEKLFVSSVWKRLQ

SEQ ID NO: 44739 - protein, 483 aa, Homo sapiens [sequence omitted]

SEQ ID NO: 44740 - protein, 319 aa, Homo sapiens
MGTHTGDNPYECKECGKAFTRSCQLTQHRKTHTGEKPYKCKDCGRAFTVSSCLSQHMKIHVGEKPYECKECGIAFTRSSQLTEHLKTHTAKDPFECKICGKSFRNSSCLSDHFRIHTGIKPYKCKDCGKAFTQNSDLTKHARTHSGERPYECKECGKAFARSSRLSEHTRTHTGEKPFECVKCGKAFAISSNLSGHLRIHTGEKPFECLECGKAFTHSSSLNNHMRTHSAKKPFTCMECGKAFKFPTCVNLHMRIHTGEKPYKCKQCGKSFSYSNSFQLHERTHTGEKPYECKECGKAFSSSSSFRNHERRHADERLSA

SEQ ID NO: 44741 - protein, 341 aa, Homo sapiens
MLHNSAPAGETLSVLNQCRKAFSLPPNVHQRTWIGDKSFEYSDCEEAFVDQSHLQANRITHNGETLYEQKQCGRAFTYSTSHAVSVKMHTVEKPYECKECGKFFRYSSYLNSHMRTHTGEKPYECKECGKCFTVSSHLVEHVRIHTGEKPYQCKECGRAFAGRSGLTKHVRIHTGEKPYECNECGKAYNRFYLLTEHFKTHTEEKPFECKVCGKSFRSSSCLKNHFRIHTGIKPYKCKECGKAFTVSSSLHNHVKIHTGEKPYECKDCGKAFATSSQLIEHIRTHTGEKPYICKECGKTFRASSHLQKHVRIHTGEKPYICNECGKAYNRFYLLTKHLKTH

SEQ ID NO: 44742 - protein, 17 aa, Homo sapiens
MGFFPGNQSVLLKKRQR

SEQ ID NO: 44743 - protein, 268 aa, Homo sapiens [sequence omitted]

SEQ ID NO: 44744 - protein, 148 aa, Homo sapiens
MLPMKVRALGLKVALTVKLAQDDLHIMDSLELPTGDPQYLTELAHYRRWGDSVLLVDLTHEEMPQSIVEATSRLKTFNLIPAVGLNVHSMLKHQTLVLTLPTVAFLEDKLLWQDSRYRPLYPFSLPYSDFPRPLPHATQGPAATPYHC

SEQ ID NO: 44745 - protein, 100 aa, Homo sapiens
MLPMKVRALGLKVALTVKLAQDDLHIMDSLELPTGDPQYLTELAHYRRWGDSVLLVDLTHEEMPQSIVEATSRLKTFNLIPAVGEQRAQAPRVRMCRLRC

SEQ ID NO: 44746 - protein, 559 aa, Homo sapiens
MKKDSAARAKSDLLGKPLGPRTLYVHWTDAGQLTPALLHSRCLCVDRLPPGFNDVDALCRALSAVHSPTFCQLACGQDGQLKGFAVLEYETAEMAEEAQQQADGLSLGGSHLRVSFCAPGPPGRSMLAALIAAQATALNRGKGLLPEPNILQLLNNLGPSASLQLLLNPLLHGSAGGKQGLLGAPPAMPLLNGPALSTALLQLALQTQGQKKPGILGDSPLGALQPGAQPANPLLGELPAGGGLPPELPPRRGKPPPLLPSVLGPAGGDREALGLGPPAAQLTPPPAPVGLRGSGLRGLQKDSGPLPTPPGVSLLGEPPKDYRIPLNPYLNLHSLLPASNLAGKEARGWGGAGRSRRPAEGPPTNPPAPGGGSSSSKAFQLKSRLLSPLSSARLPPEPGLSDSYSFDYPSDMGPRRLFSHPREPALGPHGPSRHKMSPPPSGFGERSSGGSGGGPLSHFYSGSPTSYFTSGLQAGLKQSHLSKAIGSSPLGSGEGLLGLSPGPNGHSHLLKTPLGGQKRSFAHLLPSPEPSPEGSYVGQHSQGLGGHYADSYLKRKRIF

SEQ ID NO: 44747 - protein, 71 aa, Homo sapiens
MDIEAGSSHFVPVFVAVLLTLGVVTIVLALMYVFREHQRSGSYHVREESTYLPLTSMQPTEAMGEEPSRAE

SEQ ID NO: 44748 - protein, 1047 aa, Homo sapiens [sequence omitted]

SEQ ID NO: 44749 - protein, 339 aa, Homo sapiens [sequence omitted]

SEQ ID NO: 44750 - protein, 803 aa, Homo sapiens
MSWPSSFHGTGTGSGGAGGGSSRRFEAENGPTPSPGRSPLDSQASPGLVLHAGAATSQRRESFLYRSDSDYDMSPKTMSRNSSVTSEAHAEDLIVTPFAQVLASLRSVRSNFSLLTNVPVPSNKRSPLGGPTPVCKATLSEETCQQLARETLEELDWCLEQLETMQTYRSVSEMASHKFKRMLNRELTHLSEMSRSGNQVSEYISTTFLDKQNEVEIPSPTMKEREKQQAPRPRPSQPPPPPVPHLQPMSQITGLKKLMHSNSLNNSNIPRFGVKTDQEELLAQELENLNKWGLNIFCVSDYAGGRSLTCIMYMIFQERDLLKKFRIPVDTMVTYMLTLEDHYHADVAYHNSLHAADVLQSTHVLLATPALDAVFTDLEILAALFAAAIHDVDHPGVSNQFLINTNSELALMYNDESVLENHHLAVGFKLLQEDNCDIFQNLSKRQRQSLRKMVIDMVLATDMSKHMTLLADLKTMVETKKVTSSGVLLLDNYSDRIQVLRNMVHCADLSNPTKPLELYRQWTDRIMAEFFQQGDRERERGMEISPMCDKHTASVEKSQVGFIDYIVHPLWETWADLVHPDAQEILDTLEDNRDWYYSAIRQSPSPPPEEESRGPGHPPLPDKFQFELTLEEEEEEEISMAQIPCTAQEALTAQGLSGVEEALDATIAWEASPAQESLEVMAQEASLEAELEAVYLTQQAQSTGSAPVAPDEFSSREEFVVAVSHSSPSALALQSPLLPAWRTLSVSEHAPGLPGLPSTAAEVEAQREHQAAKRACSACAGTFGEDTSALPAPGGGGSGGDPT

SEQ ID NO: 44751 - protein, 387 aa, Homo sapiens [sequence omitted]

SEQ ID NO: 44752 - protein, 1434 aa, Homo sapiens
MPTLPPPSVSATGPGPGPGPGPGPGPGPAPPNYSRPHGMGGPNMPPPGPSGVPPGMPGQPPGGPPKPWPEGPMANAAAPTSTPQKLIPPQPTGRPSPAPPAVPPAASPVMPPQTQSPGQPAQPAPMVPLHQKQSRITPIQKPRGLDPVEILQEREYRLQARIAHRIQELENLPGSLAGDLRTKATIELKALRLLNFQRQLRQEVVVCMRRDTALETALNAKAYKRSKRQSLREARITEKLEKQQKIEQERKRRQKHQEYLNSILQHAKDFKEYHRSVTGKIQKLTKAVATYHANTEREQKKENERIEKERMRRLMAEDEEGYRKLIDQKKDKRLAYLLQQTDEYVANLTELVRQHKAAQVAKEKKKKKKKKKAENAEGQTPAIGPDGEPLDETSQMSDLPVKVIHVESGKILTGTDAPKAGQLEAWLEMNPGYEVAPRSDSEESGSEEEEEEEEEEQPQAAQPPTLPVEEKKKIPDPDSDDVSEVDARHIIENAKQDVDDEYGVSQALARGLQSYYAVAHAVTERVDKQSALMVNGVLKQYQIKGLEWLVSLYNNNLNGILADEMGLGKTIQTIALITYLMEHKRINGPFLIIVPLSTLSNWAYEFDKWAPSVVKVSYKGSPAARRAFVPQLRSGKFNVLLTTYEYIIKDKHILAKIRWKYMIVDEGHRMKNHHCKLTQVLNTHYVAPRRLLLTGTPLQNKLPELWALLNFLLPTIFKSCSTFEQWFNAPFAMTGEKVDLNEEETILIIRRLHKVLRPFLLRRLKKEVEAQLPEKVEYVIKCDMSALQRVLYRHMQAKGVLLTDGSEKDKKGKGGTKTLMNTIMQLRKICNHPYMFQHIEESFSEHLGFTGGIVQGLDLYRASGKFELLDRILPKLRATNHKVLLFCQMTSLMTIMEDYFAYRGFKYLRLDGTTKAEDRGMLLKTFNEPGSEYFIFLLSTRAGGLGLNLQSADTVIIFDSDWNPHQDLQAQDRAHRIGQQNEVRVLRLCTVNSVEEKILAAAKYKLNVDQKVIQAGMFDQKSSSHERRAFLQAILEHEEQDESRHCSTGSGSASFAHTAPPPAGVNPDLEEPPLKEEDEVPDDETVNQMIARHEEEFDLFMRMDLDRRREEARNPKRKPRLMEEDELPSWIIKDDAEVERLTCEEEEEKMFGRGSRHRKEVDYSDSLTEKQWLKTLKAIEEGTLEEIEEEVRQKKSSRKRKRDSDAGSSTPTTSTRSRDKDDESKKQKKRGRPPAEKLSPNPPNLTKKMKKIVDAVIKYKDSSSGRQLSEVFIQLPSRKELPEYYELIRKPVDFKKIKERIRNHKYRSLNDLEKDVMLLCQNAQTFNLEGSLIYEDSIVLQSVFTSVRQKIEKEDDSEGEESEEEEEGEEEGSESESRSVKVKIKLGRKEKAQDRLKGGRRRPSRGSRAKPVVSDDDSEEEQEEDRSGSGSEED

SEQ ID NO: 44753 - protein, 1933 aa, Homo sapiens
MYIEDWVIVHRRYQYLSAAYSPVTTDTQRERQKGLPRQVFEQDASGDERSGPEDSNDSRRGSGSPEDTPRSSGASSIFDLRNLAADSLLPSLLERAAPEDVDRRNETLRRQHRPPALLTLYPAPDEDEAVERCSRPEPPREHFGQRILVKCLSLKFEIEIEPIFGILALYDVREKKKISENFYFDLNSDSMKGLLRAHGTHPAISTLARSAIFSVTYPSPDIFLVIKLEKVLQQGDISECCEPYMVLKEVDTAKNKEKLEKLRLAAEQFCTRLGRYRMPFAWTAVHLANIVSSAGQLDRDSDSEGERRPAWTDRRRRGPQDRASSGDDACSFSGFRPATLTVTNFFKQEAERLSDEDLFKFLADMRRPSSLLRRLRPVTAQLKIDISPAPENPHFCLSPELLHIKPYPDPRGRPTKEILEFPAREVYAPHTSYRNLLYVYPHSLNFSSRQGSVRNLAVRVQYMTGEDPSQALPVIFGKSSCSEFTREAFTPVVYHNKSPEFYEEFKLHLPACVTENHHLLFTFYHVSCQPRPGTALETPVGFTWIPLLQHGRLRTGPFCLPVSVDQPPPSYSVLTPDVALPGMRWVDGHKGVFSVELTAVSSVHPQDPYLDKFFTLVHVLEEGAFPFRLKDTVLSEGNVEQELRASLAALRLASPEPLVAFSHHVLDKLVRLVIRPPIISGQIVNLGRGAFEAMAHVVSLVHRSLEAAQDARGHCPQLAAYVHYAFRLPGTEPSLPDGAPPVTVQAATLARGSGRPASLYLARSKSISSSNPDLAVAPGSVDDEVSRILASKLLHEELALQWVVSSSAVREAILQHAWFFFQLMVKSMALHLLLGQRLDTPRKLRFPGRFLDDITALVGSVGLEVITRVHKDVELAEHLNASLAFFLSDLLSLVDRGFVFSLVRAHYKQVATRLQSSPNPAALLTLRMEFTRILCSHEHYVTLNLPCCPLSPPASPSPSVSSTTSQSSTFSSQAPDPKVTSMFELSGPFRQQHFLAGLLLTELALALEPEAEGAFLLHKKAISAVHSLLCGHDTDPRYAEATVKARVAELYLPLLSIARDTLPRLHDFAEGPGQRSRLASMLDSDTEGEGDIAGTINPSVAMAIAGGPLAPGSRASISQGPPTASRAGCALSAESSRTLLACVLWVLKNTEPALLQRWATDLTLPQLGRLLDLLYLCLAAFEYKGKKAFERINSLTFKKSLDMKARLEEAILGTIGARQEMVRRSRERSPFGNPENVRWRKSVTHWKQTSDRVDKTKDEMEHEALVEGNLATEASLVVLDTLEIIVQTVMLSEARESVLGAVLKVVLYSLGSAQSALFLQHGLATQRALVSKFPELLFEEDTELCADLCLRLLRHCGSRISTIRTHASASLYLLMRQNFEIGHNFARVKMQVTMSLSSLVGTTQNFSEEHLRRSLKTILTYAEEDMGLRDSTFAEQVQDLMFNLHMILTDTVKMKEHQEDPEMLIDLMYRIARGYQGSPDLRLTWLQNMAGKHAELGNHAEAAQCMVHAAALVAEYLALLEDHRHLPVGCVSFQNISSNVLEESAISDDILSPDEEGFCSGKHFTELGLVGLLEQAAGYFTMGGLYEAVNEVYKNLIPILEAHRDYKKLAAVHGKLQEAFTKIMHQSSGWERVFGTYFRVGFYGAHFGDLDEQEFVYKEPSITKLAEISHRLEEFYTERFGDDVVEIIKDSNPVDKSKLDSQKAYIQITYVEPYFDTYELKDRVTYFDRNYGLRTFLFCTPFTPDGRAHGELPEQHKRKTLLSTDHAFPYIKTRIRVCHREETVLTPVEVAIEDMQKKTRELAFATEQDPPDAKMLQMVLQGSVGPTVNQGPLEVAQVFLAEIPEDPKLFRHHNKLRLCFKDFCKKCEDALRKNKALIGPDQKEYHRELERNYCRLREALQPLLTQRLPQLMAPTPPGLRNSLNRASFRKADL

SEQ ID NO: 44754 - protein, 1275 aa, Homo sapiens
MAHVVSLVHRSLEAAQDARGHCPQLAAYVHYAFRLPGTEPSLPDGAPPVTVQAATLARGSGRPASLYLARSKSISSSNPDLAVAPGSVDDEVSRILASKGIDRSHSWVNSAYAPGGSKAVLRRAPPYCGADPRQLLHEELALQWVVSSSAVREAILQHAWFFFQLMVKSMALHLLLGQRLDTPRKLRFPGRFLDDITALVGSVGLEVITRVHKDVELAEHLNASLAFFLSDLLSLVDRGFVFSLVRAHYKQVATRLQSSPNPAALLTLRMEFTRILCSHEHYVTLNLPCCPLSPPASPSPSVSSTTSQSSTFSSQAPDPKVTSMFELSGPFRQQHFLAGLLLTELALALEPEAEGAFLLHKKAISAVHSLLCGHDTDPRYAEATVKARVAELYLPLLSIARDTLPRLHDFAEGPGQRSRLASMLDSDTEGEGDIAGTINPSVAMAIAGGPLAPGSRASISQGPPTASRAGCALSAESSRTLLACVLWVLKNTEPALLQRWATDLTLPQLGRLLDLLYLCLAAFEYKGKKAFERINSLTFKKSLDMKARLEEAILGTIGARQEMVRRSRERSPFGNPENVRWRKSVTHWKQTSDRVDKTKDEMEHEALVEGNLATEASLVVLDTLEIIVQTVMLSEARESVLGAVLKVVLYSLGSAQSALFLQHGLATQRALVSKFPELLFEEDTELCADLCLRLLRHCGSRISTIRTHASASLYLLMRQNFEIGHNFARVKMQVTMSLSSLVGTTQNFSEEHLRRSLKTILTYAEEDMGLRDSTFAEQVQDLMFNLHMILTDTVKMKEHQEDPEMLIDLMYRIARGYQGSPDLRLTWLQNMAGKHAELGNHAEAAQCMVHAAALVAEYLALLEDHRHLPVGCVSFQNISSNVLEESAISDDILSPDEEGFCSGKHFTELGLVGLLEQAAGYFTMGGLYEAVNEVYKNLIPILEAHRDYKKLAAVHGKLQEAFTKIMHQSSGWERVFGTYFRVGFYGAHFGDLDEQEFVYKEPSITKLAEISHRLEEFYTERFGDDVVEIIKDSNPVDKSKLDSQKAYIQITYVEPYFDTYELKDRVTYFDRNYGLRTFLFCTPFTPDGRAHGELPEQHKRKTLLSTDHAFPYIKTRIRVCHREETVLTPVEVAIEDMQKKTRELAFATEQDPPDAKMLQMVLQGSVGPTVNQGPLEVAQVFLAEIPEDPKLFRHHNKLRLCFKDFCKKCEDALRKNKALIGPDQKEYHRELERNYCRLREALQPLLTQRLPQLMAPTPPGLRNSLNRASFRKADL

SEQ ID NO: 44755 - protein, 486 aa, Homo sapiens
MFQDPVAFKDVAVNFTQEEWALLDISQKNLYREVMLETFWNLTSIGKKWKDQNIEYEYQNPRRNFRSVTEEKVNEIKEDSHCGETFTPVPDDRLNFQKKKASPEVKSCDSFVCEVGLGNSSSNMNIRGDTGHKACECQEYGPKPWKSQQPKKAFRYHPSLRTQERDHTGKKPYACKECGKNIIYHSSIQRHMVVHSGDGPYKCKFCGKAFHCLSLYLIHERTHTGEKPYECKQCGKSFSYSATHRIHERTHIGEKPYECQECGKAFHSPRSCHRHERSHMGEKAYQCKECGKAFMCPRYVRRHERTHSRKKLYECKQCGKALSSLTSFQTHIRMHSGERPYECKTCGKGFYSAKSFQRHEKTHSGEKPYKCKQCGKAFTRSGSFRYHERTHTGEKPYECKQCGKAFRSAPNLQLHGRTHTGEKPYQCKECGKAFRSASQLRIHRRIHTGEKPYECKKCGKAFRYVQNFRFHERTQTHKNALWRKTL

SEQ ID NO: 44756 - protein, 581 aa, Homo sapiens
MLKKTTTGVKSCESSVYGEVGSAHSSLNRHIRDDTGHKAYEYQEYGQKPYKCKYCKKPFNCLSSVQTHERAHSGRKLYVCEECGKTFISHSNLQRHRIMHRGDGPYKCKFCGKALMFLSLYLIHKRTHTGEKPYQCKQCGKAFSHSSSLRIHERTHTGEKPYKCNECGKAFHSSTCLHAHKRTHTGEKPYECKQCGKAFSSSHSFQIHERTHTGEKPYECKECGKAFKCPSSVRRHERTHSRKKPYECKHCGKVLSYLTSFQNHLGMHTGEISHKCKICGKAFYSPSSLQTHEKTHTGEKPYKCNQCGKAFNSSSSFRYHERTHTGEKPYECKQCGKAFRSASLLQTHGRTHTGEKPYACKECGKPFSNFSFFQIHERMHREEKPYECKGYGKTFSLPSLFHRHERTHTGGKTYECKQCGRSFNCSSSFRYHGRTHTGEKPYECKQCGKAFRSASQLQIHGRTHTGEKPYECKQCGKAFGSASHLQMHGRTHTGEKPYECKQCGKSFGCASRLQMHGRTHTGEKPYKCKQCGKAFGCPSNLRRHGRTHTGEKPYKCNQCGKVFRCSSQLQVHGRAHCIDTP

SEQ ID NO: 44757 - protein, 310 aa, Homo sapiens
MHTRMRPYKCKTVEKPLILPVRFEDMKELTLERNLMNASTVVKPSIVPVPFTIMKGLTLERNPMNVSSVVKPSFLPLPFDIMKGLTLERNRMSVSNVGKPSDLPHTFKCMEGLTLKRNPMNVSSVVKPSFFPLPFDIMKGLTLERNPMSVSNVGKPSHLPHTFKCMKGLTLESNCMNLNNVKKPLDLSETFKFMKRHTLERNPIRNMEKHSTISLPFKYMQQCTEDRMPMNVKSVTKHSYLPRSFEYMQEHTLERNPMNVRNAEKRSIIFLLCVYTKGCTLERNHINVRIVGKHSVCLVPFVDIKGLTLE

SEQ ID NO: 44758 - protein, 497 aa, Homo sapiens
MQETFKNLTSVGKTWKVQNIEDEYKNPRRNLSLMREKLCESKESHHCGESFNQIADDMLNRKTLPGITPCESSVCGEVGTGHSSLNTHIRADTGHKSSEYQEYGENPYRNKECKKAFSYLDSFQSHDKACTKEKPYDGKECTETFISHSCIQRHRVMHSGDGPYKCKFCGKAFYFLNLCLIHERIHTGVKPYKCKQCGKAFTRSTTLPVHERTHTGVNADECKECGNAFSFPSEIRRHKRSHTGEKPYECKQCGKVFISFSSIQYHKMTHTGEKPYECKQCGKAFRCGSHLQKHGRTHTGEKPYECRQCGKAFRCTSDLQRHEKTHTEDKPYGCKQCGKGFRCASQLQIHERTHSGEKPHECKECGKVFKYFSSLRIHERTHTGEKPHECKQCGKAFRYFSSLHIHERTHTGDKPYECKVCGKAFTCSSSIRYHERTHTGEKPYECKHCGKAFISNYIRYHERTHTGEKPYQCKQCGKAFIRASSCREHERTHTINR

SEQ ID NO: 44759 - protein, 444 aa, Homo sapiens
MQETIRNLDCIRMIWEEQNTEDQYKNPRRNLRCHMVERFSESKDSSQCGETFSLIRDSIVNNSICPGEDPCQSAECEEVIMGHLSLNSHIRVDSGHKPHEYQEYGEKPHTHKQRGKAFSYHHSFQSRGRPHTGKKRYECKECGKTFSSRRNLRRHMVVQGGNRPYKCKLCGKAFFWPSLLRMHERTHTGEKPYECKQCSKAFPFYSSYRRHERMHTGEKPYECKQCSKALPDSSSYIRHERTHTGEKPYTCKQCGKAFSVSSSLRRHETTHSAEKPYECKQCGKTFHHLGSFQIHMKRHTGDRPHKCKICGKGFDRPSLVRYHERIHTGEKPYECKQCGKTLSHSSSFRRHMIMHTGGGPHKCKICGKAFVYPSVCQRHEKSHSGEKPYECKQCGKALSHSSSFRRHMVMHTGDGPNKCKVCGKAFVYPSVCQRHEKTHWRETI

SEQ ID NO: 44760 - protein, 519 aa, Homo sapiens
MERPLEEQVQSKWSSSQGRTGTGGSDVLQMQNSEHHGQSIKTQTDSISLEDVAVNFTLEEWALLDPGQRNIYRDVMRATFKNLACIGEKWKDQDIEDEHKNQGRNLRSPMVEALCENKEDCPCGKSTSQIPDLNTNLETPTGLKPCDCSVCGEVFMHQVSLNRHMRSHTEQKPNECHEYGEKPHKCKECGKTFTRSSSIRTHERIHTGEKPYECKECGKAFAFLFSFRNHIRIHTGETPYECKECGKAFRYLTALRRHEKNHTGEKPYKCKQCGKAFIYYQPFLTHERTHTGEKPYECKQCGKAFSCPTYLRSHEKTHTGEKPFVCRECGRAFFSHSSLRKHVKTHTGVQPYTCKKCGEAFKSSSSCEVHERTHFGEKPYECKQCGKAFNSSSYLQLHERVHTGEKTYECKECGKAFLYSTHFRIHERTHTREKPYECKQCGRVFIYFSHLRRHERSHTGVKPCECKQCGKAFTCLNSLKVHKRIHTGERPFQCRQCGKAFSYSKSLHVHERTHSRQKP

SEQ ID NO: 44761 - protein, 544 aa, Homo sapiens
MQETFKNLASIGEKWEDPNVEDQHKNQGRNLRSHTGERLCEGKEGSQCAENFSPNLSVTKKTAGVKPYECTICGKAFMRLSSLTRHMRSHTGYELFEKPYKCKECEKAFSYLKSFQRHERSHTGEKPYKCKQCGKTFIYHQPFQRHERTHIGEKPYECKQCGKALSCSSSLRVHERIHTGEKPYECKQCGKAFSCSSSIRVHERTHTGEKPYACKECGKAFISHTSVLTHMITHNGDRPYKCKECGKAFIFPSFLRVHERIHTGEKPYKCKQCGKAFRCSTSIQIHERIHTGEKPYKCKECGKSFSARPAFRVHVRVHTGEKPYKCKECGKAFSRISYFRIHERTHTGEKPYECKKCGKTFNYPLDLKIHKRNHTGEKPYECKECAKTFISLENFRRHMITHTGDGPYKCRDCGKVFIFPSALRTHERTHTGEKPYECKQCGKAFSCSSYIRIHKRTHTGEKPYECKECGKAFIYPTSFQGHMRMHTGEKPYKCKECGKAFSLHSSFQRHTRIHNYEKPLECKQCGKAFSVSTSLKKHMRMHNR

SEQ ID NO: 44762 - protein, 206 aa, Homo sapiens
MAADGQQFGEIKASSAVLCLSYLPDILVTGTYDKKVTIYDPRAGPALLKHQQLHSRPVLTLLADDRHIISGSEDHTLVVVDRRANSVLQRLQLDSYLLCMSYQEPQLWAGDNQGLLHVFANRNGCFQLIRSFDVGHSFPITGIQYSVGALYTTSTDKTIRVHVPTDPPRTICTRRHDNGLNRVCAEGNLVVAGSGDLSLEVWRLQA

SEQ ID NO: 44763 - protein, 191 aa, Homo sapiens [sequence omitted]

SEQ ID NO: 44764 - protein, 124 aa, Homo sapiens
MQESLRVKQLAEEQKRREREQHIAECMAKMPQMIVNWQQQQRENWEKAQADKERRARLQAEAQELLGYQVDPRSARFQELLQDLEKKERKRLKEEKQKRKKEARAAALAAAVAQDPAASGAPSS

SEQ ID NO: 44765 - protein, 876 aa, Homo sapiens
MASLCMRDPDEDEEEGTDEDDLEADDDLLAELNEVLGEEQKASETPPPVAQPKPEAPHPGLETTLQERLALYQTAIESARQAGDSAKMRRYDRGLKTLENLLASIRKGNAIDEADIPPPVAIGKGPASTPTYSPAPTQPAPRIASAPEPRVTLEGPSATAPASSPGLAKPQMPPGPCSPGPLAQLQSRQRDYKLAALHAKQQGDTTAAARHFRVAKSFDAVLEALSRGEPVDLSCLPPPPDQLPPDPPSPPSQPPTPATAPSTTEVPPPPRTLLEALEQRMERYQVAAAQAKSKGDQRKARMHERIVKQYQDAIRAHKAGRAVDVAELPVPPGFPPIQGLEATKPTQQSLVGVLETAMKLANQDEGPEDEEDEVPKKQNSPVAPTAQPKAPPSRTPQSGSAPTAKAPPKATSTRAQQQLAFLEGRKKQLLQAALRAKQKNDVEGAKMHLRQAKGLEPMLEASRNGLPVDITKVPPAPVNKDDFALVQRPGPGLSQEAARRYGELTKLIRQQHEMCLNHSNQFTQLGNITETTKFEKLAEDCKRSMDILKQAFVRGLPTPTARFEQRTFSVIKIFPDLSSNDMLLFIVKGINLPTPPGLSPGDLDVFVRFDFPYPNVEEAQKDKTSVIKNTDSPEFKEQFKLCINRSHRGFRRAIQTKGIKFEVVHKGGLFKTDRVLGTAQLKLDALEIACEVREILEVLDGRRPTGGRLEVMVRIREPLTAQQLETTTERWLVIDPVPAAVPTQVAGPKGKAPPVPAPARESGNRSARPLHSLSVLAFDQERLERKILALRQARRPVPPEVAQQYQDIMQRSQWQRAQLEQGGVGIRREYAAQLERQLQFYTEAARRLGNDGSRDAAKEALYRRNLVESELQRLRR

SEQ ID NO: 44766 - protein, 1383 aa, Homo sapiens
MSQRCNNRTQCVVVAGSDAFPDPCPGTYKYLEVQYDCVPYKVEQKVFVCPGTLQKVLEPTSTHESEHQSGAWCKDPLQAGDRIYVMPWIPYRTDTLTEYASWEDYVAARHTTTYRLPNRVDGTGFVVYDGAVFYNKERTRNIVKYDLRTRIKSGETVINTANYHDTSPYRWGGKTDIDLAVDENGLWVIYATEGNNGRLVVSQLNPYTLRFEGTWETGYDKRSASNAFMVCGVLYVLRSVYVDDDSEAAGNRVDYAFNTNANREEPVSLTFPNPYQFISSVDYNPRDNQLYVWNNYFVVRYSLEFGPPDPSAGPATSPPLSTTTTARPTPLTSTASPAATTPLRRAPLTTHPVGAINQLGPDLPPATAPVPSTRRPPAPNLHVSPELFCEPREVRRVQWPATQQGMLVERPCPKGTRGIASFQCLPALGLWNPRGPDLSNCTSPWVNQVAQKIKSGENAANIASELARHTRGSIYAGDVSSSVKLMEQLLDILDAQLQALRPIERESAGKNYNKMHKRERTCKDYIKAVVETVDNLLRPEALESWKDMNATEQVHTATMLLDVLEEGAFLLADNVREPARFLAAKENVVLEVTVLNTEGQVQELVFPQEEYPRKNSIQLSAKTIKQNSRNGVVKVVFILYNNLGLFLSTENATVKLAGEAGPGGPGGASLVVNSQVIAASINKESSRVFLMDPVIFTVAHLEDKNHFNANCSFWNYSERSMLGYWSTQGCRLVESNKTHTTCACSHLTNFAVLMAHREIYQGRINELLLSVITWVGIVISLVCLAICISTFCFLRGLQTDRNTIHKNLCINLFLAELLFLVGIDKTQYEIACPIFAGLLHYFFLAAFSWLCLEGVHLYLLLVEVFESEYSRTKYYYLGGYCFPALVVGIAAAIDYRSYGTEKACWLRVDNYFIWSFIGPVSFVIVVNLVFLMVTLHKMIRSSSVLKPDSSRLDNIKSWALGAIALLFLLGLTWAFGLLFINKESVVMAYLFTTFNAFQGVFIFVFHCALQKKVHKEYSKCLRHSYCCIRSPPGGTHGSLKTSAMRSNTRYYTGTQSRIRRMWNDTVRKQTESSFMAGDINSTPTLNRGTMGNHLLTNPVLQPRGGTSPYNTLIAESVGFNPSSPPVFNSPGSYREPKHPLGGREACGMDTLPLNGNFNNSYSLRSGDFPPGDGGPEPPRGRNLADAAAFEKMIISELVHNNLRGSSSAAKGPPPPEPPVPPVPGGGGEEEAGGPGGADRAEIELLYKALEEPLLLPRAQSVLYQSDLDESESCTAEDGATSRPLSSPPGRDSLYASGANLRDSPSYPDSSPEGPSEALPPPPPAPPGPPEIYYTSRPPALVARNPLQGYYQVRRPSHEGYLAAPGLEGPGPDGDGQMQLVTSL

SEQ ID NO: 44767 - protein, 795 aa, Homo sapiens
MIQTYSNGSTKDRKLLLTAQQMLQDSKTKIDIIRMQLRRALQAGQLENQAAPDDTQGSPDLGAVELRIEELRHHFRVEHAVAEGAKNVLRLLSAAKAPDRKAVSEAQEKLTESNQKLGLLREALERRLGELPADHPKGRLLREELAAASSAAFSTRLAGPFPATHYSTLCKPAPLTGTLEVRVVGCRDLPETIPWNPTPSMGGPGTPDSRPPFLSRPARGLYSRSGSLSGRSSLKAEAENTSEVSTVLKLDNTVVGQTSWKPCGPNAWDQSFTLELERARELELAVFWRDQRGLCALKFLKLEDFLDNERHEVQLDMEPQGCLVAEVTFRNPVIERIPRLRRQKKIFSKQQGKAFQRARQMNIDVATWVRLLRRLIPNATGTGTFSPGASPGSEARTTGDISVEKLNLGTDSDSSPQKSSRDPPSSPSSLSSPIQESTAPELPSETQETPGPALCSPLRKSPLTLEDFKFLAVLGRGHFGKVLLSEFRPSGELFAIKALKKGDIVARDEVESLMCEKRILAAVTSAGHPFLVNLFGCFQTPEHVCFVMEYSAGGDLMLHIHSDVFSEPRAIFYSACVVLGLQFLHEHKIVYRDLKLDNLLLDTEGYVKIADFGLCKEGMGYGDRTSTFCGTPEFLAPEVLTDTSYTRAVDWWGLGVLLYEMLVGESPFPGDDEEEVFDSIVNDEVRYPRFLSAEAIGIMRRLLRRNPERRLGSSERDAEDVKKQPFFRTLGWEALLARRLPPPFVPTLSGRTDVSNFDEEFTGEAPTLSPPRDARPLTAAEQAAFLDFDFVAGGC

SEQ ID NO: 44768 - protein, 205 aa, Homo sapiens
MGMGGFTNVNFGRSRSAQEPARKKQDPPVTHDLRVSLEEIYSGCTKKMKISHKRLNPDGKSIRNEDKILTIEVKKGWKEGTKITFPKEGDQTSNNIPADIVFVLKDKPHNIFKRDGSDVIYPARISLREALCGCTVNVPTLDGRTIPVVFKDVIRPGMRRKVPGEGLPLPKTPEKRGDLIIEFEVIFPERIPQTSRTVLEQVLPI

SEQ ID NO: 44769 - protein, 634 aa, Homo sapiens
MLDQCRTLASRGTPPCKPSCVSQLGQRAEPKATERGILRATGVAWESQLKPEELPSMQDLLEEASSRDMQMGPGLFLRMQLVPSIEERETPLTREDRPALQEPPWSLGCTGLKAAMQIQRVVIPVPTLGHRNPWVARDSAVPARDPAWLQEDKVEEEAMAPGLPTACSQEPVTFADVAVVFTPEEWVFLDSTQRSLYRDVMLENYRNLASVADQLCKPNALSYLEERGEQWTTDRGVLSDTCAEPQCQPQEAIPSQDTFTEILSIDVKGEQPQPGEKLYKYNELEKPFNSIEPLFQYQRIHAGEASCECQEIRNSFFQSAHLIVPEKIRSGDKSYACNKCEKSFRYSSDLIRHEKTHTAEKCFDCQECGQAFKYSSNLRRHMRTHTGEKPFECSQCGKTFTRNFNLILHQRNHTGEKPYECKDCGKAFNQPSSLRSHVRTHTGEKPFECSQCGKAFREHSSLKTHLRTHTREKPYECNQCGKPFRTSTHLNVHKRIHTGEKLYECATCGQVLSRLSTLKSHMRTHTGEKPYVCQECGRAFSEPSSLRKHARTHSGKKPYACQECGRAFGQSSHLIVHVRTHSAGRPYQCNQCEKAFRHSSSLTVHKRTHVGRETIRNGSLPLSMSHPYCGPLAN

SEQ ID NO: 44770 - protein, 1980 aa, Homo sapiens
MGKTGLLCHLDDACVSNPCHEDAICDTNPVNGRAICTCPPGFTGGACDQDVDECSIGANPCEHLGRCVNTQGSFLCQCGRGYTGPRCETDVNECLSGPCRNQATCLDRIGQFTCICMAGFTGTYCEVDIDECQSSPCVNGGVCKDRVNGFSCTCPSGFSGSTCQLDVDECASTPCRNGAKCVDQPDGYECRCAEGFEGTLCDRNVDDCSPDPCHHGRCVDGIASFSCACAPGYTGTRCESQVDECRSQPCRHGGKCLDLVDKYLCRCPSGTTGVNCEVNIDDCASNPCTFGVCRDGINRYDCVCQPGFTGPLCNVEINECASSPCGEGGSCVDGENGFRCLCPPGSLPPLCLPPSHPCAHEPCSHGICYDAPGGFRCVCEPGWSGPRCSQSLARDACESQPCRAGGTCSSDGMGFHCTCPPGVQGRQCELLSPCTPNPCEHGGRCESAPGQLPVCSCPQGWQGPRCQQDVDECAGPAPCGPHGICTNLAGSFSCTCHGGYTGPSCDQDINDCDPNPCLNGGSCQDGVGSFSCSCLPGFAGPRCARDVDECLSNPCGPGTCTDHVASFTCTCPPGYGGFHCEQDLPDCSPSSCFNGGTCVDGVNSFSCLCRPGYTGAHCQHEADPCLSRPCLHGGVCSAAHPGFRCTCLESFTGPQCQTLVDWCSRQPCQNGGRCVQTGAYCLCPPGWSGRLCDIRSLPCREAAAQIGVRLEQLCQAGGQCVDEDSSHYCVCPEGRTGSHCEQEVDPCLAQPCQHGGTCRGYMGGYMCECLPGYNGDNCEDDVDECASQPCQHGGSCIDLVARYLCSCPPGTLGVLCEINEDDCGPGPPLDSGPRCLHNGTCVDLVGGFRCTCPPGYTGLRCEADINECRSGACHAAHTRDCLQDPGGGFRCLCHAGFSGPRCQTVLSPCESQPCQHGGQCRPSPGPGGGLTFTCHCAQPFWGPRCERVARSCRELQCPVGVPCQQTPRGPRCACPPGLSGPSCRSFPGSPPGASNASCAAAPCLHGGSCRPAPLAPFFRCACAQGWTGPRCEAPAAAPEVSEEPRCPRAACQAKRGDQRCDRECNSPGCGWDGGDCSLSVGDPWRQCEALQCWRLFNNSRCDPACSSPACLYDNFDCHAGGRERTCNPVYEKYCADHFADGRCDQGCNTEECGWDGLDCASEVPALLARGVLVLTVLLPPEELLRSSADFLQRLSAILRTSLRFRLDAHGQAMVFPYHRPSPGSEPRARRELAPEVIGSVVMLEIDNRLCLQSPENDHCFPDAQSAADYLGALSAVERLDFPYPLRDVRGEPLEPPEPSVPLLPLLVAGAVLLLVILVLGVMVARRKREHSTLWFPEGFSLHKDVASGHKGRREPVGQDALGMKNMAKGESLMGEVATDWMDTECPEAKRLKVEEPGMGAEEAVDCRQWTQHHLVAADIRVAPAMALTPPQGDADADGMDVNVRGPDGFTPLMLASFCGGALEPMPTEEDEADDTSASIISDLICQGAQLGARTDRTGETALHLAARYARADAAKRLLDAGADTNAQDHSGRTPLHTAVTADAQGVFQILIRNRSTDLDARMADGSTALILAARLAVEGMVEELIASHADVNAVDELGKSALHWAAAVNNVEATLALLKNGANKDMQDSKEETPLFLAAREGSYEAAKLLLDHFANREITDHLDRLPRDVAQERLHQDIVRLLDQPSGPRSPPGPHGLGPLLCPPGAFLPGLKAAQSGSKKSRRPPGKAGLGPQGPRGRGKKLTLACPGPLADSSVTLSPVDSLDSPRPFGGPPASPGGFPLEGPYAAATATAVSLAQLGGPGRAGLGRQPPGGCVLSLGLLNPVAVPLDWARLPPPAPPGPSFLLPLAPGPQLLNPGTPVSPQERPPPYLAVPGHGEEYPAAGAHSSPPKARFLRVPSEHPYLTPSPESPEHWASPSPPSLSDWSESTPSPATATGAMATTTGALPAQPLPLSVPSSLAQAQTQLGPQPEVTPKRQVLA

SEQ ID NO: 44771 - protein, 1346 aa, Homo sapiens
MGDGLETSQMSTTQAQAQPQPANAASTNPPPPETSNPNKPKRQTNQLQYLLRVVLKTLWKHQFAWPFQQPVDAVKLNLPDYYKIIKTPMDMGTIKKRLENNYYWNAQECIQDFNTMFTNCYIYNKPGDDIVLMAEALEKLFLQKINELPTEETEIMIVQAKGRGRGRKETGTAKPGVSTVPNTTQASTPPQTQTPQPNPPPVQATPHPFPAVTPDLIVQTPVMTVVPPQPLQTPPPVPPQPQPPPAPAPQPVQSHPPIIAATPQPVKTKKGVKRKADTTTPTTIDPIHEPPSLPPEPKTTKLGQRRESSRPVKPPKKDVPDSQQHPAPEKSSKVSEQLKCCSGILKEMFAKKHAAYAWPFYKPVDVEALGLHDYCDIIKHPMDMSTIKSKLEAREYRDAQEFGADVRLMFSNCYKYNPPDHEVVAMARKLQDVFEMRFAKMPDEPEEPVVAVSSPAVPPPTKVVAPPSSSDSSSDSSSDSDSSTDDSEEERAQRLAELQEQLKAVHEQLAALSQPQQNKPKKKEKDKKEKKKEKHKRKEEVEENKKSKAKEPPPKKTKKNNSSNSNVSKKEPAPMKSKPPPTYESEEEDKCKPMSYEEKRQLSLDINKLPGEKLGRVVHIIQSREPSLKNSNPDEIEIDFETLKPSTLRELERYVTSCLRKKRKPQAEKVDVIAGSSKMKGFSSSESESSSESSSSDSEDSETEMAPKSKKKGHPGREQKKHHHHHHQQMQQAPAPVPQQPPPPPQQPPPPPPPQQQQQPPPPPPPPSMPQQAAPAMKSSPPPFIATQVPVLEPQLPGSVFDPIGHFTQPILHLPQPELPPHLPQPPEHSTPPHLNQHAVVSPPALHNALPQQPSRPSNRAAALPPKPARPPAVSPALTQTPLLPQPPMAQPPQVLLEDEEPPAPPLTSMQMQLYLQQLQKVQPPTPLLPSVKVQSQPPPPLPPPPHPSVQQQLQQQPPPPPPPQPQPPPQQQHQPPPRPVHLQPMQFSTHIQQPPPPQGQQPPHPPPGQQPPPPQPAKPQQVIQHHHSPRHHKSDPYSTGHLREAPSPLMIHSPQMSQFQSLTHQSPPQQNVQPKKQELRAASVVQPQPLVVVKEEKIHSPIIRSEPFSPSLRPEPPKHPESIKAPVHLPQRPEMKPVDVGRPVIRPPEQNAPPPGAPDKDKQKQEPKTPVAPKKDLKIKNMGSWASLVQKHPTTPSSTAKSSSDSFEQFRRAAREKEEREKALKAQAEHAEKEKERLRQERMRSREDEDALEQARRAHEEARRRQEQQQQQRQEQQQQQQQQAAAVAAAATPQAQSSQPQSMLDQQRELARKREQERRRREAMAATIDMNFQSDLLSIFEENLF

SEQ ID NO: 44772 - protein, 706 aa, Homo sapiens [sequence omitted]

SEQ ID NO: 44773 - protein, 441 aa, Homo sapiens
MAPDYGVMGMQGAGGYDSTMPYGCGRSQPRMRDRDRPKRRGFDRFGPDGTGRKRKQFQLYEEPDTKLARVDSEGDFSENDDAAGDFRSGDEEFKGEDELCDSGRQRGEKEDEDEDVKKRREKQRRRDRTRDRAADRIQFACSVCKFRSFDDEEIQKHLQSKFHKETLRFISTKLPDKTVEFLQEYIVNRNKKIEKRRQELMEKETAKPKPDPFKGIGQEHFFKKIEAAHCLACDMLIPAQPQLLQRHLHSVDHNHNRRLAAEQFKKTSLHVAKSVLNNRHIVKMLEKYLKGEDPFTSETVDPEMEGDDNLGGEDKKETPEEVAADVLAEVITAAVRAVDGEGAPAPESSGEPAEDEGPTDTAEAGSDPQAEQLLEEQVPCGTAHEKGVPKARSEAAEAGNGAETMAAEAESAQTRVAPAPAAADAEVEQTDAESKDAVPTE

SEQ ID NO: 44774 - protein, 576 aa, Homo sapiens
MPSSDTNANTSASGSASADSVLSRINQRLDMVPHLETDMMQGGVYGSGGERYDSYESCDSRAVLSERDLYRSGYDYSELDPEMEMAYEGQYDAYRDQFRMRGNDTFGPRAQGWARDARSGRPMASGYGRMWEDPMGARGQCMSGASRLPSLFSQNIIPEYGMFQGMRGGGAFPGGSRFGFGFGNGMKQMRRTWKTWTTADFRTKKKKRKQGGSPDEPDSKATRTDCSDNSDSDNDEGTEGEATEGLEGTEAVEKGSRVDGEDEEGKEDGREEGKEDPEKGALTTQDENGQTKRKLQAGKKSQDKQKKRQRDRMVERIQFVCSLCKYRTFYEDEMASHLDSKFHKEHFKYVGTKLPKQTADFLQEYVTNKTKKTEELRKTVEDLDGLIQQIYRDQDLTQEIAMEHFVKKVEAAHCAACDLFIPMQFGIIQKHLKTMDHNRNRRLMMEQSKKSSLMVARSILNNKLISKKLERYLKGENPFTDSPEEEKEQEEAEGGALDEGAQGEAAGISEGAEGVPAQPPVPPEPAPGAVSPPPPPPPEEEEEGAVPLLGGALQRQIRGIPGLDVEDDEEGGGGAP

SEQ ID NO: 44775 - protein, 1738 aa, Homo sapiens
MKPHAELEGSRRFLHHRGEPRLLEKHAQGRPRFDWLQDEDEQGSPQDAGLHLDLPAQPPPLAPFRRVFVPVEDTPKTLDMAVVGGREDLEDLEGLAQPSEWGLPTSASEVATQTWTVNSEASVERLQPLLPPIRTGPYLCELLEEVAEGVASPDEDEDEEPAVFPCIECSIYFKQKEHLLEHMSQHRRAPGQEPPADLAPLACGECGWAFADPTALEQHRQLHQASREKIIEEIQKLKQVPGDEGREARLQCPKCVFGTNSSRAYVQHAKLHMREPPGQTTKEPFGGSSGAGSPSPEASALLYQPYGAAVGLSACVFCGFPAPSESLLREHVRLVHAHPHWEEDGEAYEEDPASQPGTSQDAHACFPDTAVDYFGKAEPSLAPMWRENPAGYDPSLAFGPGCQQLSIRDFPLSKPLLHGTGQRPLGRLAFPSTLASTPYSLQLGRNKSTVHPQGLGERRRPWSEEEEEEEEEEDVVLTSEMDFSPENGVFSPLATPSLIPQAALELKQAFREALQAVEATQGQQQQLRGMVPIVLVAKLGPQVMAAARVPPRLQPEELGLAGAHPLDFLLLDAPLGGPLGLDTLLDGDPAMALKHEERKCPYCPDRFHNGIGLANHVRGHLNRVGVSYNVRHFISAEEVKAIERRFSFQKKKKKVANFDPGTFSLMRCDFCGAGFDTRAGLSSHARAHLRDFGITNWELTVSPINILQELLATSAAEQPPSPLGREPGGPPGSFLTSRRPRLPLTVPFPPTWAEDPGPAYGDGLGSEENAMVAMDLGSPSLPKKSLPVPGALEQVASRLSSKVAAEVPHGSKQELQDLKAQSLTTCEVCGACFETRKGLSSHARSHLRQLGVAESESSGAPIDLLYELVKQKGLPDAHLGLPPGLAKKSSSLKEVVAGAPRPGLLSLAKPLDAPAVNKAIKSPPGFSAKGLGHPPSSPLLKKTPLALAGSPTPKNPEDKSPQLSLSPRPASPKAQWPQSEDEGPLNLTLDSDGGRELDCQLCGAWFETRKGLSSHARAHLRHLGVSDPDAKGSPIDVLHGLIRRDGVQIRLPPRRGALAHPGRPPPTSAALSLLPPPPPAKKAKLKAAGMASPWGKQDLSAAAAAGIFWASDVEPSPLNLSSGPEPARDIRCEFCGEFFENRKGLSSHARSHLRQMGVTEWYVNGSPIDTLREILKRRTQSRPGGPPNPPGPSPKALAKMMGGAGPGSSLEARSPSDLHISPLAKKLPPPPGSPLGHSPTASPPPTARKMFPGLAAPSLPKKLKPEQIRVEIKREMLPGALHGELHPSEGPWGAPREDMTPLNLSSRAEPVRDIRCEFCGEFFENRKGLSSHARSHLRQMGVTEWSVNGSPIDTLREILKKKSKPCLIKKEPPAGDLAPALAEDGPPTVAPGPVQSPLPLSPLAGRPGKPGAGPAQVPRELSLTPITGAKPSATGYLGSVAAKRPLQEDRLLPAEVKAKTYIQTELPFKAKTLHEKTSHSSTEACCELCGLYFENRKALASHARAHLRQFGVTEWCVNGSPIETLSEWIKHRPQKVGAYRSYIQGGRPFTKKFRSAGHGRDSDKRPSLGLAPGGLAVVGRSAGGEPGPEAGRAADGGERPLAASPPGTVKAEEHQRQNINKFERRQARPPDASAARGGEDTNDLQQKLEEVRQPPPRVRPVPSLVPRPPQTSLVKFVGNIYTLKCRFCEVEFQGPLSIQEEWVRHLQRHILEMNFSKADPPPEESQAPQAQTAAAEAP

SEQ ID NO: 44776 - protein, 123 aa, Homo sapiens
MLVYDITNEKSFDNIRNWIRNIEEHASADVEKMILGNKCDVNDKRQVSKERGEKLALDYGIKFMETSAKANINVENAFFTLARDIKAKMDKKLEGNSPQGSNQGVKITPDQQKRSSFFRCVLL

SEQ ID NO: 44777 - protein, 72 aa, Homo sapiens
MGTSKKNEEEKRRGLDKRTPAQAAFEKMQEKRQMERILKKASKTHKQRVEDFNRHLDTLTEHYDIPKVSWTK

SEQ ID NO: 44778 - protein, 1062 aa, Homo sapiens [sequence omitted]

SEQ ID NO: 44779 - protein, 1094 aa, Homo sapiens
MKEFKSQSIDTPGVIRRVSQLFHEHPDLIVGFNAFLPLGYRIDIPKNGKLNIQSPLTSQENSHNHGDGAEDFKQQVPYKEDKPQVPLESDSVEFNNAISYVNKIKTRFLDHPEIYRSFLEILHTYQKEQLNTRGRPFRGMSEEEVFTEVANLFRGQEDLLSEFGQFLPEAKRSLFTGNGPCEMHSVQKNEHDKTPEHSRKRSRPSLLRPVSAPAKKKMKLRGTKDLSIAAVGKYGTLQEFSFFDKVRRVLKSQEVYENFLRCIALFNQELVSGSELLQLVSPFLGKFPELFAQFKSFLGVKELSFAPPMSDRSGDGISREIDYASCKRIGSSYRALPKTYQQPKCSGRTAICKELDHWTLLQGSWTDDYCMSKFKNTCWIPGYSAGVLNDTWVSFPSWSEDSTFVSSKKTPYEEQLHRCEDERFELDVVLETNLATIRVLESVQKKLSRMAPEDQEKFRLDDSLGGTSEVIQRRAIYRIYGDKAPEIIESLKKNPVTAVPVVLKRLKAKEEEWREAQQGFNKIWREQYEKAYLKSLDHQAVNFKQNDTKALRSKSLLNEIESVYDEHQEQHSEGRSAPSSEPHLIFVYEDRQILEDAAALISYYVKRQPAIQKEDQGTIHQLLHQFVPSLFFSQQLDLGASEESADEDRDSPQGQTTDPSERKKPAPGPHSSPPEEKGAFGDAPATEQPPLPPPAPHKPLDDVYSLFFANNNWYFFLRLHQTLCSRLLKIYRQAQKQLLEYRTEKEREKLLCEGRREKGSDPAMELRLKQPSEVELEEYYPAFLDMVRSLLEGSIDPTQYEDTLREMFTIHAYVGFTMDKLVQNIARQLHHLVSDDVCLKVVELYLNEKKRGAAGGNLSSRCVRAARETSYQWKAERCMADENCFKVMFLQRKGQVIMTIELLDTEEAQTEDPVEVQHLARYVEQYVGTEGASSSPTEGFLLKPVFLQRNLKKFRRRWQSEQARALRGEARSSWKRLVGVESACDVDCRFKLSTHKMVFIVNSEDYMYRRGTLCRAKQVQPLVLLRHHQHFEEWHSRWLEDNVTVEAASLVQDWLMGEEDEDMVPCKTLCETVHVHGLPVTRYRVQYSRRPASP

SEQ ID NO: 44780 - protein, 1821 aa, Homo sapiens
MYENQQLGKLEPHVFALADVAYYTMLRKRVNQCIVISGESGSGKTQSTNFLIHCLTALSQKGYASGVERTILGAGPVLEAFGNAKTAHNNNSSRFGKFIQVSYLESGIVRGAVVEKYLLEKSRLVSQEKDERNYHVFYYLLLGVSEEERQEFQLKQPEDYFYLNQHNLKIEDGEDLKHDFERLKQAMEMVGFLPATKKQIFAVLSAILYLGNVTYKKRATGREEGLEVGPPEVLDTLSQLLKVKREILVEVLTKRKTVTVNDKLILPYSLSEAITARDSMAKSLYSALFDWIVLRINHALLNKKDVEEAVSCLSIGVLDIFGFEDFERNSFEQFCINYANEQLQYYFNQHIFKLEQEEYQGEGITWHNIGYTDNVGCIHLISKKPTGLFYLLDEESNFPHATSQTLLAKFKQQHEDNKYFLGTPVMEPAFIIQHFAGKVKYQIKDFREKNMDYMRPDIVALLRGSDSSYVRELIGMDPVAVFRWAVLRAAIRAMAVLREAGRLRAERAEKAAGMSSPGAQSHPEELPRGASTPSEKLYRDLHNQMIKSIKGLPWQGEDPRSLLQSLSRLQKPRAFILKSKGIKQKQIIPKNLLDSKSLKLIISMTLHDRTTKSLLHLHKKKKPPSISAQFQTSLNKLLEALGKAEPFFIRCIRSNAEKKELCFDDELVLQQLRYTGMLETVRIRRSGYSAKYTFQDFTEQFQVLLPKDAQPCREVISTLLEKMKIDKRNYQIGKTKVFLKETERQALQETLHREVVRKILLLQSWFRMVLERRHFLQMKRAAVTIQACWRSYRVRRALERTQAAVYLQASWRGYWQRKLYRHQKQSIIRLQSLCRGHLQRKSFSQMISEKQKAEEKEREALEAARAGAEEGGQGQAAGGQQVAEQGPEPAEDGGHLASEPEVQPSDRSPLEHSSPEKEAPSPEKTLPPQKTVAAESHEKVPSSREKRESRRQRGLEHVKFQNKHIQSCKEESALREPSRRVTQEQGVSLLEDKKESREDETLLVVETEAENTSQKQPTEQPQAMAVGKVSEETEKTLPSGSPRPGQLERPTSLALDSRVSPPAPGSAPETPEDKSKPCGSPRVQEKPDSPGGSTQIQRYLDAERLASAVELWRGKKLVAAASPSAMLSQSLDLSDRHRATGAALTPTEERRTSFSTSDVSKLLPSLAKAQPAAETTDGERSAKKPAVQKKKPGDASSLPDAGLSPGSQVDSKSTFKRLFLHKTKDKKYSLEGAEELENAVSGHVVLEATTMKKGLEAPSGQQHRHAAGEKRTKEPGGKGKKNRNVKIGKITVSEKWRESVFRQITNANELKYLDEFLLNKINDLRSQKTPIESLFIEATEKFRSNIKTMYSVPNGKIHVGYKDLMENYQIVVSNLATERGQKDTNLVLNLFQSLLDEFTRGYTKNDFEPVKQSKAQKKKRKQERAVQEHNGHVFASYQVSIPQSCEQCLSYIWLMDKALLCSVCKMTCHKKCVHKIQSHCSYTYGRKGEPGVEPGHFGVCVDSLTSDKASVPIVLEKLLEHVEMHGLYTEGLYRKSGAANRTRELRQALQTDPAAVKLENFPIHAITGVLKQWLRELPEPLMTFAQYGDFLRAVELPEKQEQLAAIYAVLEHLPEANHNSLERLIFHLVKVALLEDVNRMSPGALAIIFAPCLLRCPDNSDPLTSMKDVLKITTCVEMLIKEQMRKYKVKMEEISQLEAAESIAFRRLSLLRQNAPWPLKLGFSSPYEGVLNKSPKTRDIQEEELEVLLEEEAAGGDEDREKEILIERIQSIKEEKEDITYRLPELDPRGSDEENLDSETSASTESLLEERAGRGASEGQY

SEQ ID NO: 44781 - protein, 225 aa, Homo sapiens [sequence omitted]

SEQ ID NO: 44782 - protein, 168 aa, Homo sapiens
MEDGDKRCKLLLGIGILVLLIIVILGVPLIIFTIKANSEACRDGLRAVMECRNVTHLLQQELTEAQKGFQDVEAQAATCNHTVMALMASLDAEKAQGQKKVEELEGEITTLNHKLQDASAEVERLRRENQVLSVRIADKKYYPSSQDSSSAAAPQLLIVLLGLSALLQ

SEQ ID NO: 44783 - protein, 206 aa, Homo sapiens [sequence omitted]

SEQ ID NO: 44784 - protein, 672 aa, Homo sapiens
MPGLNERTRQRGDFPGTYVEFLGPVALARPGPRPRGPRPLPARPRDGAPEPGLTLPDLPEQFSPPDVAPPLLVKLVEAIERTGLDSESHYRPELPAPRTDWSLSDVDQWDTAALADGIKSFLLALPAPLVTPEASAEARRALREAAGPVGPALEPPTLPLHRALTLRFLLQHLGRVASRAPALGPAVRALGATFGPLLLRAPPPPSSPPPGGAPDGSEPSPDFPALLVEKLLQEHLEEQEVAPPALPPKPPKAKPASTVLANGGSPPSLQDAEWYWGDISREEVNEKLRDTPDGTFLVRDASSKIQGEYTLTLRKGGNNKLIKVFHRDGHYGFSEPLTFCSVVDLINHYRHESLAQYNAKLDTRLLYPVSKYQQDQIVKEDSVEAVGAQLKVYHQQYQDKSREYDQLYEEYTRTSQELQMKRTAIEAFNETIKIFEEQGQTQEKCSKEYLERFRREGNEKEMQRILLNSERLKSRIAEIHESRTKLEQQLRAQASDNREIDKRMNSLKPDLMQLRKIRDQYLVWLTQKGARQKKINEWLGIKNETEDQYALMEDEDDLPHHEERTWYVGKINRTQAEEMLSGKRDGTFLIRESSQRGCYACSVVVDGDTKHCVIYRTATGFGFAEPYNLYGSLKELVLHYQHASLVQHNDALTVTLAHPVRAPGPGPPPAAR

SEQ ID NO: 44785 - protein, 303 aa, Homo sapiens
MKKDALTLSLSEQVAAALKPAAAPPPTPLRADGAPSAAPPDGLLASPDLGLLKLASPELERLIIQSNGLVTTTPTSSQFLYPKVAASEEQEFAEGFVKALEDLHKQNQLGAGAAAAAAAAAAGGPSGTATGSAPPGELAPAAAAPEAPVYANLSSYAGGAGGAGGAATVAFAAEPVPFPPPPPPGALGPPRLAALKDEPQTVPDVPSFGESPPLSPIDMDTQERIKAERKRLRNRIAASKCRKRKLERISRLEEKVKTLKSQNTELASTASLLREQVAQLKQKVLSHVNSGCQLLPQHQVPAY

SEQ ID NO: 44786 - protein, 370 aa, Homo sapiens
MSAKDGTCTLQDCMYKDVQKDWPGYSEGDQQLLKRVLVRKLCQPQSTGSLLGDPAASSPPGERGRSASPPQKRLQPPDFIDPLANKKPRISHFTQRAQPAVNGKLGVPNGREALLPTPGPPASTDTLSSSTHLPPRLEPPRAHDPLADVSNDLGHSGRDCEHGEAAAPAPTVRLGLPLLTDCAQPSRPHGSPSRSKPKKKSKKHKDKERAAEDKPRAQLPDCAPATHATPGAPADTPGLNGTCSVSSVPTSTSETPDYLLKYAAISSSEQRQSYKNDFNAEYSEYRDLHARIERITRRFTQLDAQLRQLSQGSEEYETTRGQILQEYRKIKKTNTNYSQEKHRCEYLHSKLAHIKRLIAEYDQRQLQAWP

SEQ ID NO: 44787 - protein, 355 aa, Homo sapiens
MGQPPAEEAEQPGALAREFLAAMEPEPAPAPAPEEWLDILGNGLLRKKTLVPGPPGSSRPVKGQVVTVHLQTSLENGTRVQEEPELVFTLGDCDVIQALDLSVPLMDVGETAMVTADSKYCYGPQGRSPYIPPHAALCLEVTLKTAVDGPDLEMLTGQERVALANRKRECGNAHYQRADFVLAANSYDLAIKAITSSAKVDMTFEEEAQLLQLKVKCLNNLAASQLKLDHYRAALRSCSLVLEHQPDNIKALFRKGKVLAQQGEYSEAIPILRAALKLEPSNKTIHAELSKLVKKHAAQRSTETALYRKMLGNPSRLPAKCPGKGAWSIPWKWLFGATAVALGGVALSVVIAARN

SEQ ID NO: 44788 - protein, 356 aa, Homo sapiens
MGQPPAEEAEQPGALAREFLAAMEPEPAPAPAPEEWLDILGNGLLRKKTLVPGPPGSSRPVKGQVVTVHLQTSLENGTRVQEEPELVFTLGDCDVIQALDLSVPLMDVGETAMVTADSKYCYGPQGSRSPYIPPHAALCLEVTLKTAVDGPDLEMLTGQERVALANRKRECGNAHYQRADFVLAANSYDLAIKAITSSAKVDMTFEEEAQLLQLKVKCLNNLAASQLKLDHYRAALRSCSLVLEHQPDNIKALFRKGKVLAQQGEYSEAIPILRAALKLEPSNKTIHAELSKLVKKHAAQRSTETALYRKMLGNPSRLPAKCPGKGAWSIPWKWLFGATAVALGGVALSVVIAARN

SEQ ID NO: 44789 - protein, 143 aa, Homo sapiens [sequence omitted]

SEQ ID NO: 44790 - protein, 275 aa, Homo sapiens
MKDLTCRWTPGAHGETFLHTNYSLKYKLRWYGQDNTCEEYHTVGPHSCHIPKDLALFTPYEIWVEATNRLGSARSDVLTLDILDVVTTDPPPDVHVSRVGGLEDQLSVRWVSPPALKDFLFQAKYQIRYRVEDSVDWKVVDDVSNQTSCRLAGLKPGTVYFVQVRCNPFGIYGSKKAGIWSEWSHPTAASTPRSERPGPGGGACEPRGGEPSSGPVRRELKQFLGWLKKHAYCSNLSFRLYDQWRAWMQKSHKTRNQDEGILPSGRRGTARGPAR

SEQ ID NO: 44791 - protein, 286 aa, Homo sapiens
MAAVALMPPPLLLLLLLASPPAASAPSARDPFAPQLGDTQNCQLRCRDRDLGPQPSQAGLEGASESPYDRAVLISACERGCRLFSICRFVARSSKPNATQTECEAACVEAYVKEAEQQACSHGCWSQPAEPEPEQKRKVLEAPSGALSLLDLFSTLCNDLVNSAQGFVSSTWTYYLQTDNGKVVVFQTQPIVESLGFQGGRLQRVEVTWRGSHPEALEVHVDPVGPLDKVRKAKIRVKTSSKAKVESEEPQDNDFLSCMSRWVAGPWGWEGGGTGGTGLPGPGLGS

SEQ ID NO: 44792 - protein, 976 aa, Homo sapiens
MVVPDFSELFKERATAPFFVFQVFCVGLWCLDEYWYYSVFTLSMLVAFEASLVQQQMRNMSEIRKMGNKPHMIQVYRSRKWRPIASDEIVPGDIVSIGRSPQENLVPCDVLLLRGRCIVDEAMLTGESVPQMKEPIEDLSPDRVLDLQADSRLHVIFGGTKVVQHIPPQKATTGLKPVDSGCVAYVLRTGFNTSQGKLLRTILFGVKRVTANNLETFIFILFLLVFAIAAAAYVWIEGTKDPSRNRYKLFLECTLILTSVVPPELPIELSLAVNTSLIALAKLYMYCTEPFRIPFAGKVEVCCFDKTGTLTSDSLVVRGVAGLRDGKEVTPVSSIPVETHRALASCHSLMQLDDGTLVGDPLEKAMLTAVDWTLTKDEKVFPRSIKTQGLKIHQRFHFASALKRMSVLASYEKLGSTDLCYIAAVKGAPETLHSMFSQCPPDYHHIHTEISREGARVLALGYKELGHLTHQQAREVKREALECSLKFVGFIVVSCPLKADSKAVIREIQNASHRVVMITGDNPLTACHVAQELHFIEKAHTLILQPPSEKGRQCEWRSIDGSIVLPLARGSPKALALEYALCLTGDGLAHLQATDPQQLLRLIPHVQVFARVAPKQKEFVITSLKELGYVTLMCGDGTNDVGALKHADVGVALLANAPERVVERRRRPRDSPTLSNSGIRATSRTAKQRSGLPPSEEQPTSQRDRLSQVLRDLEDESTPIVKLGDASIAAPFTSKLSSIQCICHVIKQGRCTLVTTLQMFKILALNALILAYSQSVLYLEGVKFSDFQATLQGLLLAGCFLFISRSKPLKTLSRERPLPNIFNLYTILTVMLQFFVHFLSLVYLYREAQARSPEKQEQFVDLYKEFEPSLVNSTVYIMAMAMQMATFAINYKGPPFMESLPENKPLVWSLAVSLLAIIGLLLGSSPDFNSQFGLVDIPVEFKLVIAQVLLLDFCLALLADRVLQFFLGTPKLKVPS

SEQ ID NO: 44793 - protein, 625 aa, Homo sapiens
MLPHLAQHKIIHTRVNFCKCEKCGKAFNCPSIITKHKRINTGEKPYTCEECGKVFNWSSRLTTHKKNYTRYKLYKCEECGKAFNKSSILTTHKIIRTGEKFYKCKECAKAFNQSSNLTEHKKIHPGEKPYKCEECGKAFNWPSTLTKHKRIHTGEKPYTCEECGKAFNQFSNLTTHKRIHTAEKFYKCTECGEAFSRSSNLTKHKKIHTEKKPYKCEECGKAFKWSSKLTEHKLTHTGEKPYKCEECGKAFNWPSTLTKHNRIHTGEKPYKCEVCGKAFNQFSNLTTHKRIHTAEKPYKCEECGKAFSRSSNLTKHKKIHIEKKPYKCEECGKAFKWSSKLTEHKITHTGEKPYKCEECGKAFNHFSILTKHKRIHTGEKPYKCEECGKAFTQSSNLTTHKKIHTGEKFYKCEECGKAFTQSSNLTTHKKIHTGGKPYKCEECGKAFNQFSTLTKHKIIHTEEKPYKCEECGKAFKWSSTLTKHKIIHTGEKPYKCEECGKAFKLSSTLSTHKIIHTGEKPYKCEKCGKAFNRSSNLIEHKKIHTGEQPYKCEECGKAFNYSSHLNTHKRIHTKEQPYKCKECGKAFNQYSNLTTHNKIHTGEKLYKPEDVTVILTTPQTFSNIK

SEQ ID NO: 44794 - protein, 1036 aa, Homo sapiens [sequence omitted]

SEQ ID NO: 44795 - protein, 820 aa, Homo sapiens
MEASEDAAFNKITRSLQDLQQKDIGVKPEFSFNIPRAKRELAQLNKCTSPQQKLVCLRKVVQLITQSPSQRVNLETMCADDLLSVLLYLLVKTEIPNWMANLSYIKNFRFSSLAKDELGYCLTSFEAAIEYIRQGSLSAKPPESEGFGDRLFLKQRMSLLSQMTSSPTDCLFKHIASGNQKEVERLLSQEDHDKDTVQKMCHPLCFCDDCEKLVSGRLNDPSVVTPFSRDDRGHTPLHVAAVCGQASLIDLLVSKGAMVNATDYHGATPLHLACQKGYQSVTLLLLHYKASAEVQDNNGNTPLHLACTYGHEDCVKALVYYDVESCRLDIGNEKGDTPLHIAARWGYQGVIETLLQNGASTEIQNRLKETPLKCALNSKILSVMEAYHLSFERRQKSSEAPVQSPQRSVDSISQESSTSSFSSMSASSRQEETKKDYREVEKLLRAVADGDLEMVRYLLEWTEEDLEDAEDTVSAADPEFCHPLCQCPKCAPAQKRLAKVPASGLGVNVTSQDGSSPLHVAALHGRADLIPLLLKHGANAGARNADQAVPLHLACQQGHFQVVKCLLDSNAKPNKKDLSGNTPLIYACSGGHHELVALLLQHGASINASNNKGNTALHEAVIEKHVFVVELLLLHGASVQVLNKRQRTAVDCAEQNSKIMELLQVVPSCVASLDDVAETDRKEYVTVKIRKKWNSKLYDLPDEPFTRQFYFVHSAGQFKGKTSREIMARDRSVPNLTEGSLHEPGRQSVTLRQNNLPAQSGSHAAEKGNSDWPERPGLTQTGPGHRRMLRRHTVEDAVVSQGPEAAGPLSTPQEVSASRS

SEQ ID NO: 44796 - protein, 536 aa, Homo sapiens
MDLNNMNQSLTLELNTMKQAMKELQLKLKGMEKEKRKLKEAEKASSQEVAAPELLYLRKQAQELVDENDGLKMTVHRLNVELSRYQTKFRHLSKEESLNIEGLPSKGPIPPWLLDIKYLSPLLLAYEDMMKEKDELNATLKEEMRMFRMRVQEVVKENEELHQELNKSSAVTSEEWRQLQTQAKLVLEENKLLLEQLEIQQRKAKDSHQERLQEVSKLTKQLMLLEAKTHGQEKELAENREQLEILRAKCQELKTHSDGKIAVEVHKSIVNELKSQLQKEEEKERAEMEELMEKLTVLQAQKKSLLLEKNSLTEQNKALEAELERAQKINRKSQKKIEVLKKQVEKAMGNEMSAHQYLANLVGLAENITQERDSLMCLAKCLESEKDGVLNKVIKSNIRLGKLEEKVKGYKKQAALKLGDISHRLLEQQEDFAGKTAQYRQEMRHLHQVLKDKQEVLDQALQQNREMEGELEVIWESTFRENRRIRELLQDTLTRTGVQDNPRALVAPSLNGVSQADLLDGCDVCSYDLKSHAPTC

SEQ ID NO: 44797 - protein, 688 aa, Homo sapiens
MITISFRNFDVEESHQCSLDWLLLGPAAPPRQEAFRLCGSAIPPAFISARDHVWIFFHSDASSSGQAQGFRLSYIRGKLGQASCQADEFRCDNGKCLPGPWQCNTVDECGDGSDEGNCSAPASEPPGSLCPGGTFPCSGARSTRCLPVERRCDGLQDCGDGSDEAGCPDLACGRRLGSFYGSFASPDLFGAARGPSDLHCTWLVDTQDSRRVLLQLELRLGYDDYVQVYEGLGERGDRLLQTLSYRSNHRPVSLEAAQGRLTVAYHARARSAGHGFNATYQVKGYCLPWEQPCGSSSDSDGGSLGDQGCFSEPQRCDGWWHCASGRDEQGCPACPPDQYPCEGGSGLCYTPADRCNNQKSCPDGADEKNCFSCQPGTFHCGTNLCIFETWRCDGQEDCQDGSDEHGCLAAVPRKVITAALIGSLVCGLLLVIALGCAFKLYSLRTQEYRAFETQMTRLEAEFVRREAPPSYGQLIAQGLIPPVEDFPVYSASQASVLQNLRTAMRRQMRRHASRRGPSRRRLGRLWNRLFHRPRAPRGQIPLLTAARPSQTVLGDGFLQPAPGAAPDPPAPLMDTGSTRAAGDRPPSAPGRAPEVGPSGPPLPSGLRDPECRPVDKDRKVCREPLVDGPAPADAPREPCSAQDPHPQVSTASSTLGPHSPEPLGVCRNPPPPCSPMLEASDDEALLVC

SEQ ID NO: 44798 - protein, 77 aa, Homo sapiens [sequence omitted]

SEQ ID NO: 44799 - protein, 257 aa, Homo sapiens
MSRLSLTRSPVSPLAAQGIPLPAQLTKSNAPVHIDVGGHMYTSSLATLTKYPDSRISRLFNGTEPIVLDSLKQHYFIDRDGEIFRYVLSFLRTSKLLLPDDFKDFSLLYEEARYYQLQPMVRELERWQQEQEQRRRSRACDCLVVRVTPDLGERIALSGEKALIEEVFPETGDVMCNSVNAGWNQDPTHVIRFPLNGYCRLNSVQVLERLFQRGFSVAASCGGGVDSSQFSEYVLCREERRPQPTPTAVRIKQEPLD

SEQ ID NO: 44800 - protein, 1037 aa, Homo sapiens [sequence omitted]

SEQ ID NO: 44801 - protein, 420 aa, Homo sapiens
MRMLVDLAKSRGVEAARERMFNGEKINYTEGRAVLHVALRNRSNTPILVDGKDVMPEVNKVLDKMKSFCQRVRSGDWKGYTGKTITDVINIGIGGSDLGPLMVTEALKPYSSGGPRVWYVSNIDGTHIAKTLAQLNPESSLFIIASKTFTTQETITNAETAKEWFLQAAKDPSAVAKHFVALSTNTTKVKEFGIDPQNMFEFWDWVGGRYSLWSAIGLSIALHVGFDNFEQLLSGAHWMDQHFRTTPLEKNAPVLLALLGIWYINCFGCETHAMLPYDQYLHRFAAYFQQGDMESNGKYITKSGTRVDHQTGPIVWGEPGTNGQHAFYQLIHQGTKMIPCDFLIPVQTQHPIRKGLHHKIFVQGIIWDINSFDQWGVELGKQLAKKIEPELDGSAQVTSHDASTNGLINFIKQQREARVQ

SEQ ID NO: 44802 - protein, 446 aa, Homo sapiens
MVQNYENLVSVAGLSVTKPYVIMLLEDGKEPWMMEKKLSKAYPFPLSHSVPASVNFGFSALFEHCSEVTEIFELSELCVFWVLHFLSNSPNSTVEAFFKKKKKKKKKKKRQCFAFLIYFRLGIKMGKQGIINKEGYLEDSPQPVTMEKVVKQSYEFSNSNKNLEYTECDTFRSTFHSKSTLSEPQNNSAEGNSHKYDILKKNLSKKSVIKSERINGGKKLLNSNKSGAAFNQSKSLTLPQTCNREKIYTCSECGKAFGKQSILSRHWRIHTGEKPYECRECGKTFSHGSSLTRHQISHSGEKPYKCIECGKAFSHGSSLTNHQSTHTGEKPYECMNCGKSFSRVSLLIQHLRIHTQEKRYECRICGKAFIHSSSLIHHQKSHTGEKPYECRECGKAFCCSSHLTQHQRIHSMKKKYECNKCLKVFSSFSFLVQHQSIHTEEKPFEV

SEQ ID NO: 44803 - protein, 498 aa, Homo sapiens
MIPDWESRWENKELSTKKDNYDEDSPQTVIIEKVVKQSYEFSNSKKNLEYIEKLEGKHGSQVDHFRPAILTSRESPTADSVYKYNIFRSTFHSKSTLSEPQKISAEGNSHKYDILKKNLPKKSVIKNEKVNGGKKLLNSNKSGAAFSQGKSLTLPQTCNREKIYTCSECGKAFGKQSILNRHWRIHTGEKPYECRECGKTFSHGSSLTRHLISHSGEKPYKCIECGKAFSHVSSLTNHQSTHTGEKPYECMNCGKSFSRVSHLIEHLRIHTQEKLYECRICGKAFIHRSSLIHHQKIHTGEKPYECRECGKAFCCSSHLTRHQRIHTMEKQYECNKCLKVFSSLSFLVQHQSIHTEEKPFECQKCRKSFNQLESLNMHLRNHIRLKPYECSICGKAFSHRSSLLQHHRIHTGEKPYECIKCGKTFSCSSNLTVHQRIHTGEKPYKCNECGKAFSKGSNLTAHQRVHNGEKPNSVVSVEKPLDYMNHYTCEKSYRRETV

SEQ ID NO: 44804 - protein, 728 aa, Homo sapiens
MPDPQSLSQDSTTPHSGRSTPSSSPSLRKRLQLLPPSRPPPEPEPGTMVEKGSDSSSEKGGVPGTPSTQSLGSRNFIRNSKKMQSWYSMLSPTYKQRNEDFRKLFSKLPEAERLIVDYSCALQREILLQGRLYLSENWICFYSNIFRWETTISIQLKEVTCLKKEKTAKLIPNAIQICTESEKHFFTSFGARDRCFLLIFRLWQNALLEKTLSPRELWHLVHQCYGSELGLTSEDEDYVSPLQLNGLGTPKEVGDVIALSDITSSGAADRSQEPSPVGSRRGHVTPNLSRASSDADHGAEEDKEEQVDSQPDASSSQTVTPVAEPPSTEPTQPDGPTTLGPLDLLPSEELLTDTSNSSSSTGEEADLAALLPDLSGRLLINSVFHVGAERLQQMLFSDSPFLQGFLQQCKFTDVTLSPWSGDSKCHQRRVLTYTIPISNPLGPKSASVVETQTLFRRGPQAGGCVVDSEVLTQGIPYQDYFYTAHRYCILGLARNKARLRVSSEIRYRKQPWSLVKSLIEKNSWSGIEDYFHHLERELAKAEKLSLEEGGKDARGLLSGLRRRKRPLSWRAHGDGPQHPDPDPCARAGIHTSGSLSSRFSEPSVDQGPGAGIPSALVLISIVLIILIALNVLLFYRLWSLERTAHTFESWHSLALAKGKFPQTATEWAEILALQKQFHSVEVHKWRQILRASVELLDEMKFSLEKLHQGITVSDPPFDTQPRPDDSFS

SEQ ID NO: 44805 - protein, 50 aa, Homo sapiens
MQETFKEAERLQMDNELLRQQIEELKNENALLRAQLQQHNLEMVGEGTRQ

SEQ ID NO: 44806 - protein, 153 aa, Homo sapiens
MKASVDVADLIGLNLVMSRNAGKGEYKIMVAALGWATAELIMSRCIPLWVGARGIEFDWKYIQMSIDSNISLVHYIVASAQVWMITRYDLYHTFRPAVLLLMFLSVYKAFVMETFVHLCSLGSWAALLARAVVTGLLALSTLALYVAVVNVHS

SEQ ID NO: 44807 - protein, 440 aa, Homo sapiens
MALFEQEVLGAPVPGIPTAVPAVPTVPTVPTVEAMQVPAAPVIRPIIATNTYQQVQQTLEARAAAAATVVPPMVGGPPFVGPVGFGPGDRSHLDSPEAREAMFLRRAAVAPQRAPILRPAFVPHVLQRADSALSSAAAGPRPMALRPPHQALVGPPLPGPPGPPMMLPPMARAPGPPLGSMAALRPPLEEPAAPRELGLGLGLGLKEKEEAVVAAAAGLEEASAAVAVGAGGAPAGPAVIGPSLPLALAMPLPEPEPLPLPLEVVRGLLPPLRIPELLSLRPRPRPPRPEPPPGLMALEVPEPLGEDKKKGKPEKLKRCIRTAAGSSWEDPSLLEWDADDFRIFCGDLGNEVNDDILARAFSRFPSFLKAKVIRDKRTGKTKGYGFVSFKDPSDYVRAMREMNGKYVGSRPIKLRKSMWKDRNLDVVRKKQKEKKKLGLR

SEQ ID NO: 44808 - protein, 103 aa, Homo sapiens
MRWGNVPEVASATSCICGPFPRTSRGSSMGGDPGAGHPRGSILATIPERGTIGVPLITGMAASEALAPLPFTPNRDRCSWQDLSSKPPSLSCPILPRLPGSIM

SEQ ID NO: 44809 - protein, 102 aa, Homo sapiens
MNVCDNLGDHLVGNVYVKFRREEDGERAVAELSNRWFNGQAVHGNVPEVASATSCICGPFPRTSRGSSMGGDPGAGTSGPACYVSSCPKAPISSDEPNPKPQ

SEQ ID NO: 44810 - protein, 59 aa, Homo sapiens
MQALRVSQALIRSFSSTARNRFQNRVREKQKLFQVGGRGGWGSDAPAGSAPSRGRRGAL

SEQ ID NO: 44811 - protein, 434 aa, Homo sapiens
MIANDVTGPWCPDLESRCEKFLQKDIFEIGAFNWEIMESLKCSDLEGSDFRADWECEGQFERQVNEECYFKQVNVTYGHMPVFQHHTSHTVRQSRETGEKLMECHECGKAFSRGSHLIQHQKIHTGEKPFGCKECGKAFSRASHLVQHQRIHTGEKPYDCKDCGKAFGRTSELILHQRLHTGVKPYECKECGKTFRQHSQLILHQRTHTGEKPYVCKDCGKAFIRGSQLTVHRRIHTGARPYECKECGKAFRQHSQLTVHQRIHTGEKPYECKECGKGFIHSSEVTRHQRIHSGEKPYECKECGKAFRQHAQLTRHQRVHTGDRPYECKDCGKAFSRSSYLIQHQRIHTGDKPYECKECGKAFIRVSQLTHHQRIHTCEKPYECRECGMAFIRSSQLTEHQRIHPGIKPYECRECGQAFILGSQLIEHYRIHTG

SEQ ID NO: 44812 - protein, 450 aa, Homo sapiens
MQYQKTETPAQSFGYNDCEKSFLQRGGLITHSRPYKGENPSVYNKKRRATNIEKKHTCNECGKSFCRKSVLILHQGIHSEEKPYQCHQCGNAFRRKSYLIDHQRTHTGEKPFVCNECGKSFRLKTALTDHQRTHTGEKSYECLQCRNAFRLKSHLIRHQRTHTGEKPYECNDCGKSFRQKTTLSLHQRIHTGEKPYICKECGKSFHQKANLTVHQRTHTGEKPYICNECGKSFSQKTTLALHEKTHNEEKPYICSECGKSFRQKTTLVAHQRTHTGEKSYECPHCGKAFRMKSYLIDHHRTHTGEKPYECNECGKSFSQKTNLNLHQRIHTGEKPYVCNECGKSFRQKATLTVHQKIHTGQKSYECPQCGKAFSRKSYLIHHQRTHTGEKPYKCSECGKCFRQKTNLIVHQRTHTGEKPYVCNECGKSFSYKRNLIVHQRTHKGENIEMQ

SEQ ID NO: 44813 - protein, 469 aa, Homo sapiens
MFSDVSIDFSQEEWDCLDPVQRDLYRDVMLENYGNLVSMGLYTPKPQVISLLEQGKEPWMVGRELTRGLCSDLESMCETKLLSLKKEVYEIELCQREIMGLTKHGLEYSSFGDVLEYRSHLAKQLGYPNGHFSQEIFTPEYMPTFIQQTFLTLHQIINNEDRPYECKKCGKAFSQNSQFIQHQRIHIGEKSYECKECGKFFSCGSHVTRHLKIHTGEKPFECKECGKAFSCSSYLSQHQRIHTGKKPYECKECGKAFSYCSNLIDHQRIHTGEKPYECKVCGKAFTKSSQLFQHARIHTGEKPYECKECGKAFTQSSKLVQHQRIHTGEKPYECKECGKAFSSGSALTNHQRIHTGEKPYDCKECGKAFTQSSQLRQHQRIHAGEKPFECLECGKAFTQNSQLFQHQRIHTDEKPYECNECGKAFNKCSNLTRHLRIHTGEKPYNCKECGKAFSSGSDLIRHQGIHTNK

SEQ ID NO: 44814 - protein, 599 aa, Homo sapiens
MLETYNHLVSLEIPSSKPKLIAQLERGEAPWREERKCPLDLCPAESKPEIQLSPSCPLIFSSQQALSQHVWLSHLSQLFSSLWAGNPLHLGKHYPEDQKQQQDPFCFSGKAEWIQEGEDSRLLFGRVSKNGTSKALSSPPEEQQPAQSKEDNTVVDIGSSPERRADLEETDKVLHGLEVSGFGEIKYEEFGPGFIKESNLLSLQKTQTGETPYMYTEWGDSFGSMSVLIKNPRTHSGGKPYVCRECGRGFTWKSNLITHQRTHSGEKPYVCKDCGRGFTWKSNLFTHQRTHSGLKPYVCKECGQSFSLKSNLITHQRAHTGEKPYVCRECGRGFRQHSHLVRHKRTHSGEKPYICRECEQGFSQKSHLIRHLRTHTGEKPYVCTECGRHFSWKSNLKTHQRTHSGVKPYVCLECGQCFSLKSNLNKHQRSHTGEKPFVCTECGRGFTRKSTLSTHQRTHSGEKPFVCAECGRGFNDKSTLISHQRTHSGEKPFMCRECGRRFRQKPNLFRHKRAHSGAFVCRECGQGFCAKLTLIKHQRAHAGGKPHVCRECGQGFSRQSHLIRHQRTHSGEKPYICRKCGRGFSRKSNLIRHQRTHSG

SEQ ID NO: 44815 - protein, 1665 aa, Homo sapiens
MRSIQNGQPPTSTPASSGSKAFHRLSRRRSKDVEFQDGWPRSPGRAFLPLRHRSSSEITLSECDAEDAGEPRGARHTGALPLFREYGSTSSIDVQGMPEQSFFDILNEFRSEQPDARGCQALTELLRADPGPHLMGGGGGAKGDSHNGQPAKDSLLPLQPTKEKEKARKKPARGLGGGDTVDSSIFRKLRSSKPEGEAGRSPGEADEGRSPPEASRPWVCQKSFAHFDVQSMLFDLNEAAANRVSVSQRRNTTTGASAASAASAMASLTASRAHSLGGLDPAFTSTEDLNCKENLEQDLGDDNSNDLLLSCPHFRNEIGGECERNVSFSRASVGSPSSGEGHLAEPALSAYRTNASISVLEVPKEQQRTQSRPRQYSIEHVDLGARYYQDYFVGKEHANYFGVDEKLGPVAVSIKREKLEDHKEHGPQYQYRIIFRTRELITLRGSILEDATPTATKHGTGRGLPLKDALEYVIPELNIHCLRLALNTPKVTEQLLKLDEQGLCRKHKVGILYCKAGQSSEEEMYNNEEAGPAFEEFLSLIGEKVCLKGFTKYAAQLDVKTDSTGTHSLYTMYQDYEIMFHVSTLLPYTPNNRQQLLRKRHIGNDIVTIIFQEPGALPFTPKNIRSHFQHVFIIVRVHNPCTDNVCYSMAVTRSKDAPPFGPPIPSGTTFRKSDVFRDFLLAKVINAENAAHKSDKFHTMATRTRQEYLKDLAENCVSNTPIDSTGKFNLISLTSKKKEKTKARAGAEQHSAGAIAWRVVAQDYAQGVEIDCILGISNEFVVLLDLRTKEVVFNCYCGDVIGWTPDSSTLKIFYGRGDHIFLQATEGSVEDIREIVQRLKVMTSGWETVDMTLRRNGLGQLGFHVKYDGTVAEVEDYGFAWQAGLRQGSRLVEICKVAVVTLTHDQMIDLLRTSVTVKVVIIPPFEDGTPRRGWPETYDMNTSEPKTEQESITPGGRPPYRSNAPWQWSGPASHNSLPASKWATPTTPGHAQSLSRPLKQTPIVPFRESQPLHSKRPVSFPETPYTVSPAGADRVPPYRQPSGSFSTPGSATYVRYKPSPERYTAAPHPLLSLDPHFSHDGTSSGDSSSGGLTSQESTMERQKPEPLWHVPAQARLSAIAGSSGNKHPSRQDAAGKDSPNRHSKGEPQYSSHSSSNTLSSNASSSHSDDRWFDPLDPLEPEQDPLSKGGSSDSGIDTTLYTSSPSCMSLAKAPRPAKPHKPPGSMGLCGGGREAAGRSHHADRRREVSPAPAVAGQSKGYRPKLYSSGSSTPTGLAGGSRDPPRQPSDMGSRVGYPAQVYKTASAETPRPSQLAQPSPFQLSASVPKSFFSKQPVRNKHPTGWKRTEEPPPRPLPFSDPKKQVDTNTKNVFGQPRLRASLRDLRSPRKNYKSTIEDDLKKLIIMDNLGPEQERDTGQSPQKGLQRTLSDESLCSGRREPSFASPAGLEPGLPSDVLFTSTCAFPSSTLPARRQHQHPHPPVGPGATPAAGSGFPEKKSTISASELSLADGRDRPLRRLDPGLMPLPDTAAGLEWSSLVNAAKAYEVQRAVSLFSLNDPALSPDIPPAHSPVHSHLSLERGPPTPRTTPTMSEEPPLDLTGKVYQLEVMLKQLHTDLQKEKQDKVVLQSEVASLRQNNQRLQEESQAASEQLRKFAEIFCREKKEL

SEQ ID NO: 44816 - protein, 81 aa, Homo sapiens
MEADMPDEINIDELLELESEEERSRKIQGLLKSCGKPVEDFIQELLAKLQGLHRQPGLRQPSPSHDGSLSPLQDRARTAHP

SEQ ID NO: 44817 - protein, 263 aa, Homo sapiens
MADPHQLFDDTSSAQSRGYGAQRAPGGLSYPAASPTPHAAFLADPVSNMAMAYGSSLAAQGKELVDKNIDRFIPITKLKYYFAVDTMYVGRKLGLLFFPYLHQDWEVQYQQDTPVAPRFDVNAPDLYIPAMAFITYVLVAGLALGTQDRFSPDLLGLQASSALAWLTLEVLAILLSLYLVTVNTDLTTIDLVAFLGYKYVGMIGGVLMGLLFGKIGYYLVLGWCCVAIFVFMFPLLPGAVAHACNPSTLGGRGGRITRSGRCG

SEQ ID NO: 44818 - protein, 179 aa, Homo sapiens
MLLLTASAQRLSLLLTHVPLSWLSMRWGWDPRRAACWHLVALLGVVVTVCFLVPAVIFAHLEEAWSFLDAFYFCFISLSTIGLGDYVPGEAPGQPYRALYKVLVTVYLFLGLVAMVLVLQTFRHVSDLHGLTELILLPPPCPASFNADEDDRVDILGPQPESHQQLSASSHTDYASIPR

SEQ ID NO: 44819 - protein, 880 aa, Homo sapiens
MAQEDDWDRDLLLDPAWEKQQRKTFTAWCNSHLRKAGTQIENIDEDFRDGLKLMLLLEVISGERLPKPERGKMRVHKINNVNKALDFIASKGVKLVSIGAEEIVDGNAKMTLGMIWTIILRFAIQDISVEETSAKEGLLLWCQRKTAPYKNVNVQNFHISWKDGLAFNALIHRHRPELIEYDKLRKDDPVTNLNNAFEVAEKYLDIPKMLDAEDIVNTARPDEKAIMTYVSSFYHAFSGAQKAETAANRICKVLAVNQENEHLMEDYEKLASDLLEWIRRTIPWLEDRVPQKTIQEMQQKLEDFRDYRRVHKPPKVQEKCQLEINFNTLQTKLRLSNRPAFMPSEGKMVSDINNGWQHLEQAEKGYEEWLLNEIRRLERLDHLAEKFRQKASIHEAWTDGKEAMLKHRDYETATLSDIKALIRKHEAFESDLAAHQDRVEQIAAIAQELNELDYYDSHNVNTRCQKICDQWDALGSLTHSRREALEKTEKQLEAIDQLHLEYAKRAAPFNNWMESAMEDLQDMFIVHTIEEIEGLISAHDQFKSTLPDADREREAILAIHKEAQRIAESNHIKLSGSNPYTTVTPQIINSKWEKVQQLVPKRDHALLEEQSKQQSNEHLRRQFASQANVVGPWIQTKMEEIGRISIEMNGTLEDQLSHLKQYERSIVDYKPNLDLLEQQHQLIQEALIFDNKHTNYTMEHIRVGWEQLLTTIARTINEVENQILTRDAKGISQEQMQEFRASFNHFDKDHGGALGPEEFKACLISLGYDVENDRQGEAEFNRIMSLVDPNHSGLVTFQAFIDFMSRETTDTDTADQVIASFKVLAGDKNFITAEELRRELPPDQAEYCIARMAPYQGPDAVPGALDYKSFSTALYGESDL

SEQ ID NO: 44820 - protein, 263 aa, Homo sapiens
MGTRFSAGTEYMDLQNDLGQTALHLAAILGETSTVEKLYAAGAGLCVAERRGHTALHLACRVGAHACARALLQPRPRRPREAPDTYLAQGPDRTPDTNHTPVALYPDSDLEKEEEESEEDWKLQLEAENYEGHTPLHVAVIHKDVEMVRLLRDAGADLDKPEPTCGRSPLHLAVEAQAADVLELLLRAGANPAARMYGGRTPLGSAMLRPNPILARLLRAHGAPEPEGEDEKSGPCSSSSDSDSGDEGVSQEERQGSPAGGSG

SEQ ID NO: 44821 - protein, 245 aa, Homo sapiens
MTPNANPSQIYNIDPARFKDLNLAGTAEVGLAGYFMDHTVAFRDLPVRMVCSSTCYRAETNTGQEPRGLYRVHHFTKVEMFGVTGPGLEQSSQLLEEFLSLQMEILTELGLHFRVLDMPTQELGLPAYRKFDIEAWMPGRGRFGEVTSASNCTDFQSRRLHIMFQTEAGELQFAHTVNATACAVPRLLIALLESNQQKDGSVLVPPALQSYLGTDRITAPTHVPLQYIGPNQPRKPGLPGQPAVS

SEQ ID NO: 44822 - protein, 103 aa, Homo sapiens
MHRLGPPKRPPRKLGPTEGRPQLKGVVLCTFTRKPKKPNSANRKCCRVRLSTGREAVCFIPGEGHTLQEHQIVLVEGGRTQDLPGVKLTVVRGKYDCGHVQKK

SEQ ID NO: 44823 - protein, 458 aa, Homo sapiens [sequence omitted]

SEQ ID NO: 44824 - protein, 401 aa, Homo sapiens [sequence omitted]

SEQ ID NO: 44825 - protein, 139 aa, Homo sapiens
MLIPQLKESLQTLMKVAAQNLIQNTNIDNGQKSSDGPIQRFDKCLEEFYALCDQLELCLRLAHECLSQSCDSAKHSPTLVPTATKPDAVQPDSLPYPQYLAVIKAQISCAKDIHTALLDCANKVTGKTPAPPAGPGGTL

SEQ ID NO: 44826 - protein, 1193 aa, Homo sapiens
MNYPSSLALLRELSLSPPAALWLQERQAQLRHSLPLQSFLLKPVQRILKYHLLLQELGKHWAEGPGTGGREMVEEAIVSMTAVAWYINDMKRKQEHAARLQEVQRRLGGWTGPELSAFGELVLEGAFRGGGGGGPRLRGGERLLFLFSRMLLVAKRRGLEYTYKGHIFCCNLSVSESPRDPLGFKVSDLTIPKHRHLLQAKNQEEKRLWIHCLQRLFFENHPASIPAKAKQVLLENSLHCAPKSKPVLEPLTPPLGSPRPRDARSFTPGRRNTAPSPGPSVIRRGRRQSEPVKDPYVMFPQNAKPGFKHAGSEGELYPPESQPPVSGSAPPEDLEDAGPPTLDPSGTSITEEILELLNQRGLRDPGPSTHDIPKFPGDSQVPGDSETLTFQALPSRDSSEEEEEEEEGLEMDERGPSPLHVLEGLESSIAAEMPSIPCLTKIPDVPNLPEIPSRCEIPEGSRLPSLSDISDVFEMPCLPAIPSVPNTPSLSSTPTLSCDSWLQGPLQEPAEAPATRRELFSGSNPGKLGEPPSGGKAGPEEDEEGVSFTDFQPQDVTQHQGFPDELAFRSCSEIRSAWQALEQGQLARPGFPEPLLILEDSDLGGDSGSGKAGAPSSERTASRVRELARLYSERIQQMQRAETRASANAPRRRPRVLAQPQPSPCLPQEQAEPGLLPAFGHVLVCELAFPLTCAQESVPLGPAVWVQAAIPLSKQGGSPDGQGLHVSNLPKQDLPGIHVSAATLLPEQGGSRHVQAPAATPLPKQEGPLHLQVPALTTFSDQGHPEIQVPATTPLPEHRSHMVIPAPSTAFCPEQGHCADIHVPTTPALPKEICSDFTVSVTTPVPKQEGHLDSESPTNIPLTKQGGSRDVQGPDPVCSQPIQPLSWHGSSLDPQGPGDTLPPLPCHLPDLQIPGTSPLPAHGSHLDHRIPANAPLSLSQELPDTQVPATTPLPLPQVLTDIWVQALPTSPKQGSLPDIQGPAAAPPLPEPSLTDTQVQKLTPSLEQKSLIDAHVPAATPLPERGGSLDIQGLSPTPVQTTMVLSKPGGSLASHVARLESSDLTPPHSPPPSSRQLLGPNAAALSRYLAASYISQSLARRQGPGGGAPAASRGSWSSAPTSRASSPPPQPQPPPPPARRLSYATTVNIHVGGGGRLRPAKAQVRLNHPALLASTQESMGLHRAQGAPDAPFHM

SEQ ID NO: 44827 - protein, 229 aa, Homo sapiens
MIIEPTSPCLLPDPLQEPYYQPPYTLVLELTGVLLHPEWSLATGWRFKKRPGIETLFQQLAPLYEIVIFTSETGMTAFPLIDSVDPHGFISYRLFRDATRYMDGHHVKDISCLNRDPARVVVVDCKKEAFRLQPYNGVALRPWDGNSDDRVLLDLSAFLKTIALNGVEDVRTVLEHYALEDDPLAAFKQRQSRLEQEEQQRLAELSKSNKQNLFLGSLTSRLWPRSKQP

SEQ ID NO: 44828 - protein, 336 aa, Homo sapiens
MNELGVTVVGDIIAILKHAKVVHRQDMCKAATESVPCSPSPLAGEIRRGTSAASRMITNSLNHDSPPSTPPRRPDTSTSKISVTVSNKMAAKSAKATAALARREEESLAVPAKRRRVTAEMEGKYVINMPKGTTPRTRKILEQQQAAKGLHRTSVFDRLGAETKADTTTGSKPTGVFSRLGATPETDEDLAWDSDNDSSSSVLQYAGVLKKLGRGPAKASPQPALTVKAKATSSATTAAAPTLRRLALSSRSGLERKPESLSKVSIIKRLGAAALVPEAQDSQVTSTKSKSSAEVKVTIKRTLVGPRGSSSSEGLGAQMDHAGTVSVFKRLGRRTF

SEQ ID NO: 44829 - protein, 156 aa, Homo sapiens [sequence omitted]

SEQ ID NO: 44830 - protein, 242 aa, Homo sapiens
MEEALPSAPERLALDYIVPCMRYYGICVKDSFLGAALGGRVLAEVEALKRGGRLRDGQLVSQRAIPPRSIRGDQIAWVEGHEPGCRSIGALMAHVDAVIRHCAGRLGSYVINGRTKAMVACYPGNGLGYVRHVDNPHGDGRCITCIYYLNQNWDVKVHGGLLQIFPEGRPVVANIEPLFDRLLIFWSDRRNPHEVKPAYATRYAITVWYFDAKERAAAKDKYQLASGQKGVQVPVSQPPTPT

SEQ ID NO: 44831 - protein, 726 aa, Homo sapiens
MKTEMKQGAPTSFLPPEASQLKPDRQQFQSRKRPYEENRGRGYFEHREDRRGRSPQPPAEEDEDDFDDTLVAIDTYNCDLHFKVARDRSSGYPLTIEGFAYLWSGARASYGVRRGRVCFEMKINEEISVKHLPSTEPDPHVVRIGWSLDSCSTQLGEEPFSYGYGGTGKKSTNSRFENYGDKFAENDVIGCFADFECGNDVELSFTKNGKWMGIAFRIQKEALGGQALYPHVLVKNCAVEFNFGQRAEPYCSVLPGFTFIQHLPLSERIRGTVGPKSKAECEILMMVGLPAAGKTTWAIKHAASNPSKKYNILGTNAIMDKMRVMGLRRQRNYAGRWDVLIQQATQCLNRLIQIAARKKRNYILDQTNVYGSAQRRKMRPFEGFQRKAIVICPTDEDLKDRTIKRTDEEGKDVPDHAVLEMKANFTLPDVGDFLDEVLFIELQREEADKLVRQYNEEGRKAGPPPEKRFDNRGGGGFRGRGGGGGFQRYENRGPPGGNRGGFQNRGGGSGGGGNYRGGFNRSGGGGYSQNRWGNNNRDNNNSNNRGSYNRAPQQQPPPQQPPPPQPPPQQPPPPPSYSPARNPPGASTYNKNSNIPGSSANTSTPTVSSYSPPQSFGFFPSTFQPSYSQPPYNQGGYSQGYTAPPPPPPPPPAYNYGSYGGYNPAPYTPPPPPTAQTYPQPSYNQYQQYAQQWNQYYQNQGQWPPYYGNYDYGSYSGNTQGGTSTQ

SEQ ID NO: 44832 - protein, 278 aa, Homo sapiens
MLHAVAASRLPVCSQQQGEPDLTEHEKVAILAQLYHEKPLVFLERFRTGLREEHLACFGHVRGDHRADFYCAEVARQGTARPRTLRTRLRNRRYAALRELIQGGEYFSDEQMRFRAPLLYEQYIGQYLTQEELSARTPTHQPPKPGSPGRPACPLSNLLLQSYEERELQQRLLQQQEEEEACLEEEEEEEDSDEEDQRSGKDSEAWVPDSEERLILREEFTSRMHQRFLDGKDGDFDYSTVDDNPDFDNLDIVARDEEERYFDEEEPEDAPSPELDGD

SEQ ID NO: 44833 - protein, 258 aa, Homo sapiens
MFFNTSELREAVPEPVLLSRAELRLLRLKLKVEQHVELYQKYSNNSWRYLSNRLLAPSDSPEWLSFDVTGVVRQWLSRGGEIEGFRLSAHCSCDSRDNTLQVDINGFTTGRRGDLATIHGMNRPFLLLMATPLERAQHLQSSRHRRALDTNYCFSSTEKNCCVRQLYIDFRKDLGWKWIHEPKGYHANFCLGPCPYIWSLDTQYSKVLALYNQHNPGASAAPCCVPQALEPLPIVYYVGRKPKVEQLSNMIVRSCKCS

SEQ ID NO: 44834 - protein, 122 aa, Homo sapiens
MAYWSHPIDLHFATKGLQGWPRLHFQVWSQDSFGRCQLAGYGFCHVPSSPGTHQLACPTWRPLGSWREQLARAFVGGGPQLLHGDTIYSGADRYRLHTAAGGTVHLEIGLLLRNFDRYGVEC

SEQ ID NO: 44835 - protein, 645 aa, Homo sapiens [sequence omitted]

SEQ ID NO: 44836 - protein, 2511 aa, Homo sapiens
MKKACTGLSGPGSGSKSPPATRAKALRRRGAGEGDKPEEEDDEAQQPQPQSGPEEAEEGEEEEAERGPGAEGPPLELHPGDPAPGPAEDPKGDGEAGRWEPSLSRKTATFKSRAPKKKYVEEHGAGSSGVAGAPEERVRTPEEASGLGVPPRPPTSTRSSSTDTASEHSADLEDEPAEACGPGPWPPGSTSGSYDLRQLRSQRVLARRGDGLFLPAVVRQVRRSQDLGVQFPGDRALTFYEGVPGAGVDVVLDATPPPGALVVGTAVCTCVEPGVAAYREGVVVEVATKPAAYKVRLSPGPSSQPGLPGSLPQPPQPLHREPEEAVWVARSSLRLLRPPWEPETMLRKPPTGPEEEQAEPGATLPPCPAALDPKQPEDAEVSKISFGGNLGTHCEEGEEKHPPALGTPALLPLPPPQLLSPPPKSPAFVGPGRPGEQPSPCQEGSQGGSRSSSVASLEKGTAPAARARTPLTAAQQKYKKGDVVCTPSGIRKKFNGKQWRRLCSRDGCMKESQRRGYCSRHLSMRTKEMEGLADSGPGGAGRPAAVAAREGSTEFDWGDETSRDSEASSVAARGDSRPRLVAPADLSRFEFDECEAAVMLVSLGSSRSGTPSFSPVSTQSPFSPAPSPSPSPLFGFRPANFSPINASPVIQRTAVRSRHLSASTPKAGVLTPPDLGPHPPPPAPRERHSSGILPTFQTNLTFTVPISPGRRKTELLPHPGALGAPGAGGGGAAPDFPKSDSLDSGVDSVSHTPTPSTPAGFRAVSPAVPFSRSRQPSPLLLLPPPAGLTSDPGPSVRRVPAVQRDSPVIVRNPDVPLPSKFPGEVGTAGEVRAGGPGRGCRETPVPPGVASGKPGLPPPLPAPVPITVPPAAPTAVAQPMPAFGLASSPFQPVAFHPSPAALLPVLVPSSYTSHPAPKKEVIMGRPGTVWTNVEPRSVAVFPWHSLVPFLAPSQPDPSVQPSEAQQPASHPVASNQSKEPAESAAVAHERPPGGTGSADPERPPGATCPESPGPGPPHPLGVVESGKGPPPTTEEEASGPPGEPRLDSETESDHDDAFLSIMSPEIQLPLPPGKRRTQSLSALPKERDSSSEKDGRSPNKREKDHIRRPMNAFMIFSKRHRALVHQRHPNQDNRTVSKILGEWWYALGPKEKQKYHDLAFQVKEAHFKAHPDWKWCNKDRKKSSSEAKPTSLGLAGGHKETRERSMSETGTAAAPGVSSELLSVAAQTLLSSDTKAPGSSSCGAERLHTVGGPGSARPRAFSHSGVHSLDGGEVDSQALQELTQMVSGPASYSGPKPSTQYGAPGPFAAPGEGGALAATGRPPLLPTRASRSQRAASEDMTSDEERMVICEEEGDDDVIADDGFGTTDIDLKCKERVTDSESGDSSGEDPEGNKGFGRKVFSPVIRSSFTHCRPPLDPEPPGPPDPPVAFGKGYGSAPSSSASSPASSSASAATSFSLGSGTFKAQESGQGSTAGPLRPPPPGAGGPATPSKATRFLPMDPATFRRKRPESVGGLEPPGPSVIAAPPSGGGNILQTLVLPPNKEEQEGGGARVPSAPAPSLAYGAPAAPLSRPAATMVTNVVRPVSSTPVPIASKPFPTSGRAEASPNDTAGARTEMGTGSRVPGGSPLGVSLVYSDKKSAAATSPAPHLVAGPLLGTVGKAPATVTNLLVGTPGYGAPAPPAVQFIAQGAPGGGTTAGSGAGAGSGPNGPVPLGILQPGALGKAGGITQVQYILPTLPQQLQVAPAPAPAPGTKAAAPSGPAPTTSIRFTLPPGTSTNGKVLAATAPTPGIPILQSVPSAPPPKAQSVSPVQAPPPGGSAQLLPGKVLVPLAAPSMSVRGGGAGQPLPLVSPPFSVPVQNGAQPPSKIIQLTPVPVSTPSGLVPPLSPATLPGPTSQPQKVLLPSSTRITYVQSAGGHALPLGTSPASSQAGTVTSYGPTSSVALGFTSLGPSGPAFVQPLLSGQAPLLAPGQVGVSPVPSPQLPPACAAPGGPVITAFYSGSPAPTSSAPLAQPSQAPPSLVYTVATSTTPPAATILPKGPPAPATATPAPTSPFPSATGSMTYSLVAPKAQRPSPKAPQKVKAAIASIPVGSFEAGASGRPGPAPRQPLEPGPVREPTAPESELEGQPTPPAPPPLPETWTPTARSSPPLPPPAEERTSAKGPETMASKFPSSSSDWRVPGQGLENRGEPPTPPSPAPAPAVAPGGSSESSSGRAAGDTPERKEAAGTGKKVKVRPPPLKKTFDSVDKVLSEVDFEERFAELPEFRPEEVLPSPTLQSLATSPRAILGSYRKKRKNSTDLDSAPEDPTSPKRKMRRRSSCSSEPNTPKSAKCEGDIFTFDRTGTEAEDVLGELEYDKVPYSSLRRTLDQRRALVMQLFQDHGFFPSAQATAAFQARYADIFPSKVCLQLKIREVRQKIMQAATPTEQPPGAEAPLPVPPPTGTAAAPAPTPSPAGGPDPTSPSSDSGTAQAAPPLPPPPESGPGQPGWEGAPQPSPPPPGPSTAATGR

SEQ ID NO: 44837 - protein, 1586 aa, Homo sapiens
MFVWTNVEPRSVAVFPWHSLVPFLAPSQPDPSVQPSEAQQPASHPVASNQSKEPAESAAVAHERPPGGTGSADPERPPGATCPESPGPGPPHPLGVVESGKGPPPTTEEEASGPPGEPRLDSETESDHDDAFLSIMSPEIQLPLPPGKRRTQSLSALPKERDSSSEKDGRSPNKREKDHIRRPMNAFMIFSKRHRALVHQRHPNQDNRTVSKILGEWWYALGPKEKQKYHDLAFQVKEAHFKAHPDWKWCNKDRKKSSSEAKPTSLGLAGGHKETRERSMSETGTAAAPGVSSELLSVAAQTLLSSDTKAPGSSSCGAERLHTVGGPGSARPRAFSHSGVHSLDGGEVDSQALQELTQMVSGPASYSGPKPSTQYGAPGPFAAPGEGGALAATGRPPLLPTRASRSQRAASEDMTSDEERMVICEEEGDDDVIADDGFGTTDIDLKCKERVTDSESGDSSGEDPEGNKGFGRKVFSPVIRSSFTHCRPPLDPEPPGPPDPPVAFGKGYGSAPSSSASSPASSSASAATSFSLGSGTFKAQESGQGSTAGPLRPPPPGAGGPATPSKATRFLPMDPATFRRKRPESVGGLEPPGPSVIAAPPSGGGNILQTLVLPPNKEEQEGGGARVPSAPAPSLAYGAPAAPLSRPAATMVTNVVRPVSSTPVPIASKPFPTSGRAEASPNDTAGARTEMGTGSRVPGGSPLGVSLVYSDKKSAAATSPAPHLVAGPLLGTVGKAPATVTNLLVGTPGYGAPAPPAVQFIAQGAPGGGTTAGSGAGAGSGPNGPVPLGILQPGALGKAGGITQVQYILPTLPQQLQVAPAPAPAPGTKAAAPSGPAPTTSIRFTLPPGTSTNGKVLAATAPTPGIPILQSVPSAPPPKAQSVSPVQAPPPGGSAQLLPGKVLVPLAAPSMSVRGGGAGQPLPLVSPPFSVPVQNGAQPPSKIIQLTPVPVSTPSGLVPPLSPATLPGPTSQPQKVLLPSSTRITYVQSAGGHALPLGTSPASSQAGTVTSYGPTSSVALGFTSLGPSGPAFVQPLLSGQAPLLAPGQVGVSPVPSPQLPPACAAPGGPVITAFYSGSPAPTSSAPLAQPSQAPPSLVYTVATSTTPPAATILPKGPPAPATATPAPTSPFPSATGSMTYSLVAPKAQRPSPKAPQKVKAAIASIPVGSFEAGASGRPGPAPRQPLEPGPVREPTAPESELEGQPTPPAPPPLPETWTPTARSSPPLPPPAEERTSAKGPETMASKFPSSSSDWRVPGQGLENRGEPPTPPSPAPAPAVAPGGSSESSSGRAAGDTPERKEAAGTGKKVKVRPPPLKKTFDSVDNRVLSEVDFEERFAELPEFRPEEVLPSPTLQSLATSPRAILGSYRKKRKNSTDLDSAPEDPTSPKRKMRRRSSCSSEPNTPKSAKCEGDIFTFDRTGTEAEDVLGELEYDKVPYSSLRRTLDQRRALVMQLFQDHGFFPSAQATAAFQARYADIFPSKVCLQLKIREVRQKIMQAATPTEQPPGAEAPLPVPPPTGTAAAPAPTPSPAGGPDPTSPSSDSGTAQAAPPLPPPPESGPGQPGWEGAPQPSPPPPGPSTAATGR

SEQ ID NO: 44838 - protein, 806 aa, Homo sapiens
MSGYSGTSPHEKTSARNHRHYQDTASRLIHNMDLRTMTQSLVTLAEDNIAFFSSQGPGETAQRLSGVFAGVREQALGLEPALGRLLGVAHLFDLDPETPANGYRSLVHTARCCLAHLLHKSRYVASNRRSIFFRTSHNLAELEAYLAALTQLRALVYYAQRLLVTNRPGVLFFEGDEGLTADFLREYVTLHKGCFYGRCLGFQFTPAIRPFLQTISIGLVSFGEHYKRNETGLSVAASSLFTSGRFAIDPELRGAEFERITQNLDVHFWKAFWNITEMEVLSSLANMASATVRVSRLLSLPPEAFEMPLTADPTLTVTISPPLAHTGPGPVLVRLISYDLREGQDSEELSSLIKSNGQRSLELWPRPQQAPRSRSLIVHFHGGGFVAQTSRSHEPYLKSWAQELGAPIISIDYSLAPEAPFPRALEECFFAYCWAIKHCALLGSTGERICLAGDSAGGNLCFTVALRAAAYGVRVPDGIMAAYPATMLQPAASPSRLLSLMDPLLPLSVLSKCVSAYAGAKTEDHSNSDQKALGMMGLVRRDTALLLRDFRLGASSWLNSFLELSGRKSQKMSEPIAEPMRRSVSEAALAQPQGPLGTDSLKNLTLRDLSLRGNSETSSDTPEMSLSAETLSPSTPSDVNFLLPPEDAGEEAEAKNELSPMDRGLGVRAAFPEGFHPRRSSQGATQMPLYSSPIVKNPFMSPLLAPDSMLKSLPPVHIVACALDPMLDDSVMLARRLRNLGQPVTLRVVEDLPHGFLTLAALCRETRQAAELCVERIRLVLTPPAGAGPSGETGAAGVDGGCGGRH

SEQ ID NO: 44839 - protein, 460 aa, Homo sapiens
MQKTPIILSKPPAERSKQPPPPTAPAAPPAPAPLEKPIVLMKPREEGKGPVAVTGASTPEGTAPPPPAAPAPPKGEKEGQRPTQPVYQIQNRGMGTAAPAAMDPVVGQAKLLPPERMKHSIKLVDDQMNWCDSAIEYLLDQTDVLVVGVLGLQGTGKSMVMSLLSANTPEEDQRTYVFRAQSAEMKERGGNQTSGIDFFITQERIVFLDTQPILSPSILDHLINNDRKLPPEYNLPHTYVEMQSLQIAAFLFTVCHVVIVVQDWFTDLSLYRFLQTAEMVKPSTPSPSHESSSSSGSDEGTEYYPHLVFLQNKARREDFCPRKLRQMHLMIDQLMAHSHLRYKGTLSMLQCNVFPGLPPDFLDSEVNLFLVPFMDSEAESENPPRAGPGSSPLFSLLPGYRGHPSFQSLVSKLRSQVMSMARPQLSHTILTEKNWFHYAARIWDGVRKSSALAEYSRLLA

SEQ ID NO: 44840 - protein, 68 aa, Homo sapiens
MFESCSGFSGFCASPIEESHGALISSCNSRTMTDGLVTFRDVAIDFSQEEWECLDPAQRDFRDEVSPC

SEQ ID NO: 44841 - protein, 40 aa, Homo sapiens
MFSLPCGPSDAYQDSSACCSPSHSPHICMAFLHCELFLAL

SEQ ID NO: 44842 - protein, 784 aa, Homo sapiens [sequence omitted]

SEQ ID NO: 44843 - protein, 640 aa, Homo sapiens
MVDYKKRAERRREYYEKIKKDPAQFLQVHGRACKVHLDSAVALAAESPVNMMPWQGDTNNMIDRFDVRAHLDHIPDYTPPLLTTISPEQESDERKCNYERYRGLVQNDFAGISEEQCLYQIYIDELYGGLQRPSEDEKKKLAEKKASIGYTYEDSTVAEVEKAAEKPEEEESAAEEESNSDEDEVIPDIDVEVDVDELNQEQVADLNKQATTYGMADGDFVRMLRKDKEEAEAIKHAKALEEEKAMYSGRRSRRQRREFREKRLRGRKISPPSYARRDSPTYDPYKRSPSESSSESRSRSRSPTPGREEKITFITSFGGSDEEAAAAAAAAAASGVTTGKPPAPPQPGGPAPGRNASARRRSSSSSSSSSASRTSSSRSSSRSSSRSRRGGGYYRSGRHARSRSRSWSRSRSRSRRYSRSRSRGRRHSGGGSRDGHRYSRSPARRGGYGPRRRSRSRSHSGDRYRRGGRGLRHHSSSRSRSSWSLSPSRSRSLTRSRSHSPSPSQSRSRSRSRSQSPSPSPAREKLTRPAASPAVGEKLKKTEPAAGKETGAAKVIKADKKAAQEKMIQQEHERQEREDELRAMARKIRMKERERREKEREEWERQYSRQSRSPSPRYSREYSSSRRRSRSRSRSPHYRH

SEQ ID NO: 44844 - protein, 257 aa, Homo sapiens
MPETTATEPQPDDEPAAGVQNGAPSPAPSPDSDSDSDSDGEEEEEEEGERDETPCPALVPPTDSLGPGDRSPPGSPSTPTEQRISVSSPGRGHKVFVVTRVESPPERAEPPASPTPPSPPPPPSPPASPSLPPAGAIDTRDTGSSEPQPPPEPPRSGPPLPNGLKPEFALALPPEPPPGPEVKGGSCGLEHGERGPRAGVEGPWVLYVTPGKPLPVVDLSFPLFKMVLAGASKVGLSSHLHPASLGSWELFLGWGGM

SEQ ID NO: 44845 - protein, 751 aa, Homo sapiens
MFLRGRPVPMMIPDELAPTYSLDTRSELPSCRLKLEWVYGYRGRDCRANLYLLPTGEIVYFVASVAVLYSVEEQRQRHYLGHNDDIKCLAIHPDMVTIATGQVAGTTKEGKPLPPHVRIWDSVSLSTLHVLGLGVFDRAVCCVGFSKSNGGNLLCAVDESNDHMLSVWDWAKETKVVDVKCSNEAVLVATFHPTDPTVLITCGKSHIYFWTLEGGSLSKRQGLFEKHEKPKYVLCVTFLEGGDVVTGDSGGNLYVWGKGGNRITQAVLGAHDGGVFGLCALRDGTLVSGGGRDRRVVLWGSDYSKLQEVEVPEDFGPVRTVAEGHGDTLYVGTTRNSILQGSVHTGFSLLVQGHVEELWGLATHPSRAQFVTCGQDKLVHLWSSDSHQPLWSRIIEDPARSAGFHPSGSVLAVGTVTGRWLLLDTETHDLVAIHTDGNEQISVVSFSPDGAYLAVGSHDNLVYVYTVDQGGRKVSRLGKCSGHSSFITHLDWAQDSSCFVTNSGDYEILYWDPATCKQITSADAVRNMEWATATCVLGFGVFGIWSEGADGTDINAVARSHDGKLLASADDFGKVHLFSYPCCQPRVLGKWPSAAEAALSSGIRVLFRPLVASLGPAWKNVPRKFCWKSAGDSPRDPPPRPQGHSQPSFPSSGPWETAVCKFYRQGRWREVRVFASWAPPCIPHSQWLWFPSSEPQFLWELELSLETGNRLPPCPFCPRLAMASCPLRMVPWGRPILCGFLHSAHPSINCP

SEQ ID NO: 44846 - protein, 627 aa, Homo sapiens
MFLRGRPVPMMIPDELAPTYSLDTRSELPSCRLKLEWVYGYRGRDCRANLYLLPTGEIVYFVASVAVLYSVEEQRQRHYLGHNDDIKCLAIHPDMVTIATGQVAGTTKEGKPLPPHVRIWDSVSLSTLHVLGLGVFDRAVCCVGFSKSNGGNLLCAVDESNDHMLSVWDWAKETKVVDVKCSNEAVLVATFHPTDPTVLITCGKSHIYFWTLEGGSLSKRQGLFEKHEKPKYVLCVTFLEGGDVVTGDSGGNLYVWGKGGNRITQAVLGAHDGGVFGLCALRDGTLVSGGGRDRRVVLWGSDYSKLQEVEVPEDFGPVRTVAEGHGDTLYVGTTRNSILQGSVHTGFSLLVQGHVEELWGLATHPSRAQFVTCGQDKLVHLWSSDSHQPLWSRIIEDPARSAGFHPSGSVLAVGTVTGRWLLLDTETHDLVAIHTDGNEQISVVSFSPDGAYLAVGSHDNLVYVYTVDQGGRKVSRLGKCSGHSSFITHLDWAQDSSCFVTNSGDYEILYWDPATCKQITSADAVRNMEWATATCVLGFGVFGIWSEGADGTDINAVARSHDGKLLASADDFGKVHLFSYPCCQPRALSHKYGGHSSHVTNVAFLWDDSMALTTGGKDTSVLQWRVV

SEQ ID NO: 44847 - protein, 423 aa, Homo sapiens
MFLRGRPVPMMIPDELAPTYSLDTRSELPSCRLKLEWVYGYRGRDCRANLYLLPTGEIVYFVASVAVLYSVEEQRQRHYLGHNDDIKCLAIHPDMVTIATGQVAGTTKEGKPLPPHVRIWDSVSLSTLHVLGLGVFDRAVCCVGFSKSNGGNLLCAVDESNDHMLSVWDWAKETKVVDVKCSNEAVLVATFHPTDPTVLITCGKSHIYFWTLEGGSLSKRQGLFEKHEKPKYVLCVTFLEGGDVVTGDSGGNLYVWGKGGNRITQAVLGAHDGGVFGLCALRDGTLVSGGGRDRRVVLWGSDYSKLQEVEVPEDFGPVRTVAEGHGDTLYVGTTRNSILQGSVHTGFSLLVQGHVEELWGLATHPSRAQFVTCGQDKLVHLWSSDSHQPLWSRIIEVESRSVTQAGGQWHDLGSLQPPPPGFK

SEQ ID NO: 44848 - protein, 1245 aa, Homo sapiens [sequence omitted]

SEQ ID NO: 44849 - protein, 475 aa, Homo sapiens
MRAYKPPAQTSPAGSPDSEPPLQCLVLICEAIPHPGSLEPPLGRGAFLSRHSLDMKFTYCDDRIAEVAGYSPDDLIGCSAYEYIHALDSDAVSKSIHTLLSKGQAVTGQYRFLARSGGYLWTQTQATVVSGGRGPQSESIVCVHFLISQVEETGVVLSLEQTEQHSRRPIQRGAPSQKDTPNPGDSLDTPGPRILAFLHPPSLSEAALAADPRRFCSPDLRRLLGPILDGASVAATPSTPLATRHPQSPLSADLPDELPVGTENVHRLFTSGKDTEAVETDLDIAQDADALDLEMLAPYISMDDDFQLNASEQLPRAYHRPLGAVPRPRARSFHGLSPPALEPSLLPRWGSDPRLSCSSPSRGDPSASSPMAGARKRTLAQSSEDEDEGVELLGVRPPKRSPSPEHENFLLFPLSLSFLLTGGPAPGSLQDPSTPLLNLNEPLGLGPSLLSPYSDEDTTQPGGPFQPRAGSAQAD

SEQ ID NO: 44850 - protein, 497 aa, Homo sapiens [sequence omitted]

SEQ ID NO: 44851 - protein, 633 aa, Homo sapiens
MSLLQDWCRSLDVDAHRALLVTGIPEGLEQADVEAVLQPTLLPLGTFRLRHMKALMNEKAQAALVEFVEDVNHAAIPREIPGKDGVWRVLWKDRAQDTRVLRQMRRLLLDDGPTQAAEAGTPGEAPTPPASETQAQDSGEVTGQAGSLLGAARNPRRGRRGRRNRTRRNRLTQKGKKRSRGGRPSAPARSEAEDSSDESLGIVIEEIDQGDLSGEEDQSALYATLQAAARELVRQWAPCNSEGEEDGPREFLALVTVTDKSKKEEAEKEPAGAESIRLNTKEDKNGVPDLVALLAVRDTPDEEPVDSDTSESDSQESGDQETEELDNPEFVAIVAYTDPSDPWAREEMLKIASVIESLGWSDEKDKRDPLRQVLSVMSKDTNGTRVKVEEAGREVDAVVLRKAGDDGDLRECISTLAQPDLPPQAKKAGRGLFGGWSEHREDEGGLLELVALLAAQDMAEVMKEEKENAWEGGKYKYPKGKLGEVLALLAARENMGSNEGSEEASDEQSEEESEDTESEASEPEDRASRKPRAKRARTAPRGLTPAGAPPTASGARKTRAGGRGRGRGVTPEKKAGSRGSAQDDAAGSRKKKGSAGAGAHARAGEAKGQAPTGSKAARGKKARRGRRLPPKCR

SEQ ID NO: 44852 - protein, 78 aa, Homo sapiens
MMARKMKDTDSEEEIREAFRVFDKDGNGYISAAELRHVMTNLGEKLTDEEVDEMIREADIDGDGQVNYEEFVQMMTAK

SEQ ID NO: 44853 - protein, 641 aa, Homo sapiens
MLEYALKQERAKYHKLKFGTDLNQGEKKADVSEQVSNGPVESVTLENSPLVWKEGRQLLRQYLEEVGYTDTILDMRSKRVRSLLGRSLELNGAVEPSEGAPRAPPGPAGLSGGESLLVKQIEEQIKRNAAGKDGKERLGGSVLGQIPFLQNCEDEDSDEDDELDSVQHKKQRVKLPSKALVPEMEDEDEEDDSEDAINEFDFLGSGEDGEGAPDPRRCTVDGSPHELESRRVKLQGILADLRDVDGLPPKVTGPPPGTPQPRPHEGSFGFSSDVFIMDTIGGGEVSLGDLADLTVTNDNDLSCDLSDSKDAFKKTWNPKFTLRSHYDGIRSLAFHHSQSALLTASEDGTLKLWNLQKAVTAKKNAALDVEPIHAFRAHRGPVLAVAMGSNSEYCYSGGADACIHSWKIPDLSMDPYDGYDPSVLSHVLEGHGDAVWGLAFSPTSQRLASCSADGTVRIWDPSSSSPACLCTFPTASEHGVPTSVAFTSTEPAHIVASFRSGDTVLYDMEVGSALLTLESRGSSGPTQINQVVSHPNQPLTITAHDDRGIRFLDNRTGKPVHSMVAHLDAVTCLAVDPNGAFLMSGSHDCSLRLWSLDNKTCVQEITAHRKKHEEAIHAVACHPSKALIASAGADALAKVFV

SEQ ID NO: 44854 - protein, 69 aa, Homo sapiens
MLEYALKQERAKYHKLKFGTDLNQGEKKADVSEQVSNGPVESVTLENSPLVWKEGRQLLRHPVPAGFSF

SEQ ID NO: 44855 - protein, 282 aa, Homo sapiens
MLDHEQVTPEDPGAQFLIRTGSVGRNRAEASLERAQNLNPMVDVKVDTEDIEKKPESFFTQFDAVCLTCCSRDVIVKVDQICHKNSIKFFTGDVFGYHGYTFANLGEHEFVEEKTKVAKVSQGVEDGPDTKRAKLDSSETTMVKKKVVFCPVKEALEVDWSSEKAKAALKRTTSDYFLLQVLLKFRTDKGRDPSSDTYEEDSELLLQIRNDVLDSLGISPDLLPEDFVRYCFSEMAPVCAVVGGILAQEIVKALSQRDPPHNNFFFFDGMKGNGIVECLGPK

SEQ ID NO: 44856 - protein, 202 aa, Homo sapiens
MLDHEQVTPEDPGAQFLIRTGSVGRNRAEASLERAQNLNPMVDVKVDTEDIEKKPESFFTQFDAVCLTCCSRDVIVKVDQICHKNSIKFFTGDVFGYHGYTFANLGEHEFVEEKTKVAKVSQGVEDGPDTKRAKLDSSETTMVKKKVVFCPVKEALEVDWSSEKAKAALKRTTSDYFLLQGTASPRWPQCVRWLEGFWHRKL

SEQ ID NO: 44857 - protein, 435 aa, Homo sapiens [sequence omitted]

SEQ ID NO: 44858 - protein, 285 aa, Homo sapiens [sequence omitted]

SEQ ID NO: 44859 - protein, 1321 aa, Homo sapiens [sequence omitted]

SEQ ID NO: 44860 - protein, 430 aa, Homo sapiens [sequence omitted]

SEQ ID NO: 44861 - protein, 384 aa, Homo sapiens
MELENIRRRKQELLVEIQRLREELSEAMSEVEGLEANEGSKTLQRNRKMAMGRKKFNMDPKKGIQFLVENELLQNTPEEIARFLYKGEGLNKTAIGDYLGEREELNLAVLHAFVDLHEFTDLNLVQALRQFLWSFRLPGEAQKIDRMMEAFAQRYCLCNPGVFQSTDTCYVLSFAVIMLNTSLHNPNVRDKPGLERFVAMNRGINEGGDLPEELLRNLYDSIRNEPFKIPEDDGNDLTHTFFNPDREGWLLKLGGGRVKTWKRRWFILTDNCLYYFEYTTDKEPRGIIPLENLSIREVDDPRKPNCFELYIPNNKGQLIKACKTEADGRVVEGNHMVYRISAPTQEEKDEWIKSIQAAVSVDPFYEMLAARKKRISVKKKQEQP

SEQ ID NO: 44862 - protein, 85 aa, Homo sapiens
MKKARKIQVPEEQKDEKYWSRRYKNNEAAKRSRDARRLKENQISVRAAFLEKENALLRQEVVAVRQELSHYRAVLSRYQAQHGAL

SEQ ID NO: 44863 - protein, 652 aa, Homo sapiens [sequence omitted]

SEQ ID NO: 44864 - protein, 199 aa, Homo sapiens
MKTGALLLQGFIQDRAGRMGGEAPELALDPVPQDASTKKLSECLKRIGDELDSNMELQRMIAAVDTDSPREVFFRVAADMFSDGNFNWGRVVALFYFASKLVLKALCTKVPELIRTIMGWTLDFLRERLLGWIQDQGGWVRLLKPPHPHHRALTTAPAPPSLPPATPLGPWAFWSRSQWCPLPIFRSSDVVYNAFSLRV

SEQ ID NO: 44865 - protein, 729 aa, Homo sapiens [sequence omitted]

SEQ ID NO: 44866 - protein, 44 aa, Homo sapiens [sequence omitted]

SEQ ID NO: 44867 - protein, 1915 aa, Homo sapiens
MHTPGPTELFISGALPGSSTFPSSSALSAYQHPASFGSRPFPVPSSLSLQDPPFSPPANGLLSPHDVLHLKPSQAPTVPSSLGFERLAGGGVLGPAGLGPAQTPPYRPGPPDPPPPPRHLPTQFNLLASSSAAAAAAEQSSPQLYNFSGAAPGPPPPERALPRQDTVIKHYQRPASAQPPPPPPPAHALQHYLSCGGSYPSMGHRANLACSPLGGGEPSPGAGEPSKAGPSGATAGASGRATGPEAAGGGGAGGGGGGYRPIIQSPGYKTGKGGYGAAAGGATRPPPPRSTATPKCQSLGGPAAAYATGKASGAGGAGGQAYSPGQPQGLLGPQAYGQGFGGGQAQDLSKAPSYSGGPPQPPSGPPPPGLATCQSYSPDQLQGQLYGVQGEPYPGPAAHSQGLPTASPSLSYSTGHSPALSGHGGGWGPSSLGGGGEASPSHIIRPLQSPPATGRPPGVGSPGAPGKYLSSVLASAPFLAPPGAGSYAAGAGGYKGKGDGSELLAGPGGPPAERTEDEEFLIQHLLQAPSPPRTSGADGLVGEDGAADASKGLGGSGGAGGPPGTPYELAKEDPQRYHLQSVIRTSASLDEGATAALELGLGRLKEKKKGPERGGETPEGLATSVVHYGAGAKELGAFLQKSPPPPPPTAQSTQPTPHGLLLEAGGPDLPLVLPPPPPQLLPSVLSHAPSPSPSASKVGVHLLEPATRDGAPQPPPPPPPPPPPMPLQLEAHLRSHGLEPAAPSPRLRPEESLDPPGAMQELLGALEPLPPAPGDTGVGPPNSEGKDPAGAYRSPSPQGTKAPRFVPLTSICFPDSLLQDEERSFFPTMEEMFGGGAADDYGKAGPPEDEGDPKAGAGPPPGPPAYDPYGPYCPGRASGAGPETPGLGLDPNKPPELPSTVNAEPLGLIQSGPHQAAPPPPPPPPPPPAPASEPKGGLTSPIFCSTKPKKLLKTSSFHLLRRRDPPFQTPKKLYAQEYEFEADEDKADVPADIRLNPRRLPDLVSSCRSRPALSPLGDIDFCPPNPGPDGPRRRGRKPTKAKRDGPPRPRGRPRIRPLEVPTTAGPASASTPTDGAKKPRGRGRGRGRKAEEAGGTRLEPLKPLKIKLSVPKAGEGLGTSSGDAISGTDHNSLDSSLTREKIEAKIKEVEEKQPEMKSGFMASFLDFLKSGKRHPPLYQAGLTPPLSPPKSVPPSVPARGLQPQPPATPAVPHPPPSGAFGLGGALEAAESEGLGLGCPSPCKRLDEELKRNLETLPSFSSDEEDSVAKNRDLQESISSAISALDDPPLAGPKDTSTPDGPPLAPAAAVPGPPPLPGLPSANSNGTPEPPLLEEKPPPTPPPAPTPQPQPPPPPPPPQPALPSPPPLVAPTPSSPPPPPLPPPPPPAMPSPPPPPPPAAAPLAAPPEEPAAPSPEDPELPDTRPLHLAKKQETAAVCGETDEEAGESGGEGIFRERDEFVIRAEDIPSLKLALQTGREPPPIWRVQKALLQKFTPEIKDGQRQFCATSNYLGYFGDAKNRYQRLYVKFLENVNKKDYVRVCARKPWHRPPVPVRRSGQAKNPVSAGGSSAPPPKAPAPPPKPETPEKTTSEKPPEQTPETAMPEPPAPEKPSLLRPVEKEKEKEKVTRGERPLRGERATSGRQTRPERSLATGQPATSRLPKARPTKVKAEPPPKKRKKWLKEAGGNATAGGGPPGSSSDSESSPGAPSEDERAVPGRLLKTRAMREMYRSYVEMLVSTALDPDMIQALEDTHDELYLPPMRKIDGLLNEHKKKVLKRLSLSPALQDALHTFPQLQVEQSGEGSPEEGAVRLRPAGEPYNRKTLSKLKRSVVRAQEFKVELEKSGYYTLYHSLHHYKYHTFLRCRDQTLAIEGGAEDLGQEEVVQQCMRNQPWLEQLFDSFSDLLAQAQAHSRCG

SEQ ID NO: 44868 - protein, 360 aa, Homo sapiens
MEGARVFGALGPIGPSSPGLTLGGLAVSEHRLSNKLLAWSGVLEWQEKRRPYSDSTAKLKRTLPCQAYVNQGENLETDQWPQKLIMQLIPQQLLTTLGPLFRNSQLAQFHFTNRDCDSLKGLCRIMGNGFAGCMLFPHISPCEVRVLMLLYSSKKKIFMGLIPYDQSGFVSAIRQVITTRKQAVGPGGVNSGPVQIVNNKFLAWSGVMEWQEPRPEPNSRSKRWLPSHVYVNQGEILRTEQWPRKLYMQLIPQQLLTTLVPLFRNSRLVQFHFTKDLETLKSLCRIMDNGFAGCVHFSYKASCEIRVLMLLYSSEKKIFIGLIPHDQGNFVNGIRRVIANQQQVLQRNLEQEQQQRGMGG

SEQ ID NO: 44869 - protein, 126 aa, Homo sapiens
MDEDATLQDLPPFCESDPESTDDGSLSEETPAGPPTCSVPPASALPTQQYAKSLPVSVPVWGFKEKRTEARSSDEENGPPSSPDLDRIAASMRALVLREAEDTQVFGDLPRPRLNTSDFQKLKRKY

SEQ ID NO: 44870 - protein, 1835 aa, Homo sapiens
MYRGKKRHEVPPHVYAVTEGAYRSMLQDREDQSILCTGESGAGKTENTKKVIQYLAHVASSPKGRKEPGVPGELERQLLQANPILEAFGNAKTVKNDNSSRFGKFIRINFDVAGYIVGANIETYLLEKSRAIRQAKDECSFHIFYQLLGGAGEQLKADLLLEPCSHYRFLTNGPSSSPGQERELFQETLESLRVLGFSHEEIISMLRMVSAVLQFGNIALKRERNTDQATMPDNTAAQKLCRLLGLGVTDFSRALLTPRIKVGRDYVQKAQTKEQADFALEALAKATYERLFRWLVLRLNRALDRSPRQGASFLGILDIAGFEIFQLNSFEQLCINYTNEKLQQLFNHTMFVLEQEEYQREGIPWTFLDFGLDLQPCIDLIERPANPPGLLALLDEECWFPKATDKSFVEKVAQEQGGHPKFQRPRHLRDQADFSVLHYAGKVDYKANEWLMKNMDPLNDNVAALLHQSTDRLTAEIWKDVEGIVGLEQVSSLGDGPPGGRPRRGMFRTVGQLYKESLSRLMATLSNTNPSFVRCIVPNHEKRAGKLEPRLVLDQLRCNGVLEGIRICRQGFPNRILFQEFRQRYEILTPNAIPKGFMDGKQACEKMIQALELDPNLYRVGQSKIFFRAGVLAQLEEERDLKVTDIIVSFQAAARGYLARRAFQKRQQQQSALRVMQRNCAAYLKLRHWQWWRLFTKVKPLLQVTRQDEVLQARAQELQKVQELQQQSAREVGELQGRVAQLEEERARLAEQLRAEAELCAEAEETRGRLAARKQELELVVSELEARVGEEEECSRQMQTEKKRLQQHIQELEAHLEAEEGARQKLQLEKVTTEAKMKKFEEDLLLLEDQNSKLSKERKLLEDRLAEFSSQAAEEEEKVKSLNKLRLKYEATIADMEDRLRKEEKGRQELEKLKRRLDGESSELQEQMVEQQQRAEELRAQLGRKEEELQAALARAEDEGGARAQLLKSLREAQAALAEAQEDLESERVARTKAEKQRRDLGEELEALRGELEDTLDSTNAQQELRSKREQEVTELKKTLEEETRIHEAAVQELRQRHGQALGELAEQLEQARRGKGAWEKTRLALEAEVSELRAELSSLQTARQEGEQRRRRLELQLQEVQGRAGDGERARAEAAEKLQRAQAELENVSGALNEAESKTIRLSKELSSTEAQLHDAQELLQEETRAKLALGSRVRAMEAEAAGLREQLEEEAAARERAGRELQTAQAQLSEWRRRQEEEAGALEAGEEARRRAAREAEALTQRLAEKTETVDRLERGRRRLQQELDDATMDLEQQRQLVSTLEKKQRKFDQLLAEEKAAVLRAVEERERAEAEGREREARALSLTRALEEEQEAREELERQNRALRAELEALLSSKDDVGKSVHELERACRVAEQAANDLRAQVTELEDELTAAEDAKLRLEVTVQALKTQHERDLQGRDEAGEERRRQLAKQLRDAEVERDEERKQRTLAVAARKKLEGELEELKAQMASAGQGKEEAVKQLRKMQAQMKELWREVEETRTSREEIFSQNRESEKRLKGLEAEVLRLQEELAASDRARRQAQQDRDEMADEVANGNLSKAAILEEKRQLEGRLGQLEEELEEEQSNSELLNDRYRKLLLQVESLTTELSAERSFSAKAESGRQQLERQIQELRGRLGEEDAGARARHKMTIAALESKLAQAEEQLEQETRERILSGKLVRRAEKRLKEVVLQVEEERRVADQLRDQLEKGNLRVKQLKRQLEEAEEEASRAQAGRRRLQRELEDVTESAESMNREVTTLRNRLRRGPLTFTTRTVRQVFRLEEGVASDEEAEEAQPGSGPSPEPEGSPPAHPQ

SEQ ID NO: 44871 - protein, 1040 aa, Homo sapiens
MEAEHRLQEQEEEELQSVLEGVADGQVPPSAIDPRWLRPTPPALDPQTEPLIFQQLEIDHYVGPAQPVPGGPPPSRGSVPVLRAFGVTDEGFSVCCHIHGFAPYFYTPAPPGFGPEHMGDLQRELNLAISRDSRGGRELTGPAVLAVELCSRESMFGYHGHGPSPFLRITVALPRLVAPARRLLEQGIRVAGLGTPSFAPYEANVDFEIRFMVDTDIVGCNWLELPAGKYALRLKEKATQCQLEADVLWSDVVSHPPEGPWQRIAPLRVLSFDIECAGRKGIFPEPERDPVIQICSLGLRWGEPEPFLRLALTLRPCAPILGAKVQSYEKEEDLLQAWSTFIRIMDPDVITGYNIQNFDLPYLISRAQTLKVQTFPFLGRVAGLCSNIRDSSFQSKQTGRRDTKVVSMVGRVQMDMLQVLLREYKLRSYTLNAVSFHFLGEQKEDVQHSIITDLQNGNDQTRRRLAVYCLKDAYLPLRLLERLMVLVNAVEMARVTGVPLSYLLSRGQQVKVVSQLLRQAMHEGLLMPVVKSEGGEDYTGATVIEPLKGYYDVPIATLDFSSLYPSIMMAHNLCYTTLLRPGTAQKLGLTEDQFIRTPTGDEFVKTSVRKGLLPQILENLLSARKRAKAELAKETDPLRRQVLDGRQLALKSVTGFGRQMIEKTKQLVESKYTVENGYSTSAKVVYGDTDSVMCRFGVSSVAEAMALGREAADWVSGHFPSPIRLEFEKVYFPYLLISKKRYAGLLFSSRPDAHDRMDCKGLEAVRRDNCPLVANLVTASLRRLLIDRDPEGAVAHAQDVISDLLCNRIDISQLVITKELTRAASDYAGKQAHVELAERMRKRDPGSAPSLGDRVPYVIISAAKGVAAYMKSEDPLFVLEHSLPIDTQYYLEQQLAKPLLRIFEPILGEGRAEAVLLRGDHTRCKTVLTGKVGGLLAFAKRRNCCIGCRTVLSHQGAVCEFCQPRESELYQKEVSHLNALEERFSRLWTQCQRCQGSLHEDVICTSRDCPIFYMRKKVRKDLEDQEQLLRRFGPPGPEAW

SEQ ID NO: 44872 - protein, 246 aa, Homo sapiens
MEEDQGEEEEEEATPTPSSGPSPSPTPEDIVTYILGRLAGLDAGLHQLHVRLHALDTRVVELTQGLRQLRNAAGDTRDAVQALQEAQGRAEREHGRLEGCLKGLRLGHKCFLLSRDFEAQAAAQARCTARGGSLAQPADRQQMEALTRYLRAALAPYNWPVWLGVHDRRAEGLYLFENGQRVSFFAWHRSPRPELGAQPSASPHPLSPDQPNGGTLENCVAQASDDGSWWDHDCQRRLYYVCEFPF

SEQ ID NO: 44873 - protein, 419 aa, Homo sapiens
MSVRREQGSSSGEGSLSFEDVAVGFTREEWQFLDQSQKVLYKEVMLENYINLVSIGYRGTKPDSLFKLEQGEPPGIAEGAAHSQICPGGKPHECSVCGRAFSRKAQLIQHQRTERGEKPHGCGECGKTFMRKIQLTEHQRTHTGEKPHECSECGKAFSRKSQLMVHQRTHTGEKPYRCSKCGKAFSRKCRLNRHQRSHTGEKLYGCSVCGKAFSQKAYLTAHQRLHTGDKPYKCSDCGRTFYFKSDLTRHQRIHTGEKPYECSECEKAFRSKSKLIQHQRTHTGERPYSCRECGKAFAHMSVLIKHEKTHIRETAINSLTVEKPSSRSHTSLYMSELIQEQKTVNTVPIEMPSSGTPPLLNKSERLVGRNVVIVEQPFPRNQAFVVNQEFEQRISLTNEVNVAPSVINYILYLTDIVSE

SEQ ID NO: 44874 - protein, 741 aa, Homo sapiens
MQAQESLTLEDVAVDFTWEEWQFLSPAQKDLYRDVMLENYSNLVAVGYQASKPDALSKLERGEETCTTEDEIYSRICSDSGGASGGAYAEIRKIDDPLQHHLQNQSIQKSVKQCHEQNMFGNIVNQNKGHFLLKQDCDTFDLHEKPLKSNLSFENQKRSSGLKNSAEFNRDGKSLFHANHKQFYTEMKFPAIAKPINKSQFIKQQRTHNIENAHVCSECGKAFLKLSQFIDHQRVHTGEKPHVCSMCGKAFSRKSRLMDHQRTHTELKHYECTECDKTFLKKSQLNIHQKTHMGGKPYTCSQCGKAFIKKCRLIYHQRTHTGEKPHGCSVCGKAFSTKFSLTTHQKTHTGEKPYICSECGKGFIEKRRLTAHHRTHTGEKPFICNKCGKGFTLKNSLITHQQTHTGEKLYTCSECGKGFSMKHCLMVHQRTHTGEKPYKCNECGKGFALKSPLIRHQRTHTGEKPYVCTECRKGFTMKSDLIVHQRTHTAEKPYICNDCGKGFTVKSRLIVHQRTHTGEKPYVCGECGKGFPAKIRLMGHQRTHTGEKPYICNECGKGFTEKSHLNVHRRTHTGEKPYVCSECGKGLTGKSMLIAHQRTHTGEKPYICNECGKGFTMKSTLSIHQQTHTGEKPYKCNECDKTFRKKTCLIQHQRFHTGKTSFACTECGKFSLRKNDLITHQRIHTGEKPYKCSDCGKAFTTKSGLNVHQRKHTGERPYGCSDCGKAFAHLSILVKHRRIHR

SEQ ID NO: 44875 - protein, 730 aa, Homo sapiens
MQAQESLTLEDVAVDFTWEEWQFLSPAQKDLYRDVMLENYSNLVAVGYQASKPDALSKLERGEETCTTEDEIYSRICSEIRKIDDPLQHHLQNQSIQKSVKQCHEQNMFGNIVNQNKGHFLLKQDCDTFDLHEKPLKSNLSFENQKRSSGLKNSAEFNRDGKSLFHANHKQFYTEMKFPAIAKPINKSQFIKQQRTHNIENAHVCSECGKAFLKLSQFIDHQRVHTGEKPHVCSMCGKAFSRKSRLMDHQRTHTELKHYECTECDKTFLKKSQLNIHQKTHMGGKPYTCSQCGKAFIKKCRLIYHQRTHTGEKPHGCSVCGKAFSTKFSLTTHQKTHTGEKPYICSECGKGFIEKRRLTAHHRTHTGEKPFICNKCGKGFTLKNSLITHQQTHTGEKLYTCSECGKGFSMKHCLMVHQRTHTGEKPYKCNECGKGFALKSPLIRHQRTHTGEKPYVCTECRKGFTMKSDLIVHQRTHTAEKPYICNDCGKGFTVKSRLIVHQRTHTGEKPYVCGECGKGFPAKIRLMGHQRTHTGEKPYICNECGKGFTEKSHLNVHRRTHTGEKPYVCSECGKGLTGKSMLIAHQRTHTGEKPYICNECGKGFTMKSTLSIHQQTHTGEKPYKCNECDKTFRKKTCLIQHQRFHTGKTSFACTECGKFSLRKNDLITHQRIHTGEKPYKCSDCGKAFTTKSGLNVHQRKHTGERPYGCSDCGKAFAHLSILVKHRRIHR

SEQ ID NO: 44876 - protein, 644 aa, Homo sapiens
MIHTTEKPYRCNESGKAFHRGSLLTVHQIVHTRGKPYQCDVCGRIFRQNSDLVNHRRSHTGDKPYICNECGKSFSKSSHLAVHQRIHTGEKPYKCNRCGKCFSQSSSLATHQTVHTGDKPYKCNECGKTFKRNSSLTAHHIIHAGKKPYTCDVCGKVFYQNSQLVRHQIIHTGETPYKCNECGKVFFQRSRLAGHRRIHTGEKPYKCNECGKVFSQHSHLAVHQRVHTGEKPYKCNECGKAFNWGSLLTVHQRIHTGEKPYKCNVCGKVFNYGGYLSVHMRCHTGEKPLHCNKCGMVFTYYSCLARHQRMHTGEKPYKCNVCGKVFIDSGNLSIHRRSHTGEKPFQCNECGKVFSYYSCLARHRKIHTGEKPYKCNDCGKAYTQRSSLTKHLVIHTGENPYHCNEFGEAFIQSSKLARYHRNPTGEKPHKCSECGRTFSHKTSLVYHQRRHTGEMPYKCIECGKVFNSTTTLARHRRIHTGEKPYKCNECGKVFRYRSGLARHWSIHTGEKPYKCNECGKAFRVRSILLNHQMMHTGEKPYKCNECGKAFIERSNLVYHQRNHTGEKPYKCMECGKAFGRRSCLTKHQRIHSSEKPYKCNECGKSYISRSGLTKHQIKHAGENLTTKLNVERPLDVVLTSGIPK

SEQ ID NO: 44877 - protein, 502 aa, Homo sapiens
MLQRHESYHTGDFCFQEIEKDIHDFEFQSQKDERNGHEASMPKIKELMGSTDRHDQRHAGNKPIKDQLGLSFHLHLPELHIFQPEEKIANQVEKSVNDASSISTSQRISCRPETHTPNNYGNNFFHSSLLTQKQEVHMREKSFQCNETGEAFNCSSFVRKHQIIHLGEKQYKFDICGKVFNEKRYLARHRRCHTSEKPYKCNECGKSFSYKSSLTCHRRCHTGEKPYKCNECGKSFSYKSSLTCHHRCHTGEKPYKCNECGKSFSYKSSLRCHRRLHTGIKPYKCNECGKMFGQNSTLVIHKAIHTGEKPYKCNECGKAFNQQSHLSRHHRLHTGEKPYKCNDCGKAFIHQSSLARHHRLHTGEKSYKCEECDRVFSQKSNLERHKIIHTGEKPYKCNECHKTFSHRSSLPCHRRLHSGEKPYKCNECGKTFNVQSHLSRHHRLHTGEKPYKCKVCDKAFMCHSYLANHTRIHSGEKPYKCNECGKAHNHLIDSSIKPCMSS

SEQ ID NO: 44878 - protein, 32 aa, Homo sapiens
MLERHESHDIQDFCFRETQKNVHDSQCLWKHD

SEQ ID NO: 44879 - protein, 469 aa, Homo sapiens
MLKTLSSTGQGNTEVIHTGTLHRQASHHIGEFCFHEIEKDIHGFEFQWKEDETNGHAAPMTEIKELAGSTGQHDQRHAGNKRIKDQLGSSFHLHLPEPHIFQSEGKIGNQVEKSINNASSVSTSQRICCRPKTHISNKYGNNSLHSSLLTQKWEVHMREKSFECIQSFKSFNCSSLLKKHQIIHLEEKQCKCDVCGKVFNQKRYLACHRRCHTGEKPYKCNECGKTFGHNSSLFIHKALHTGEKPYECEECDKVFSRKSHLERHKRIHTGEKPYKCKVCDEAFAYNSYLAKHTILHTGEKPYTCNECGKVFNRLSTLARHHRLHTGEKPYKCEECDKVFSRKSHLERHRRIHSGEKPYKCEECCKVFSRKSNLERHRRIHTGEKPYKCKVCDKAFQRDSHLAQHQRVHTGEKPYKCNECGKTFGQTSSLIIHRRLHTGEKPYKCNECGKTFSQMSSLVYHHRLHSGEKP

SEQ ID NO: 44880 - protein, 258 aa, Homo sapiens [sequence omitted]

SEQ ID NO: 44881 - protein, 103 aa, Homo sapiens
MKLDYILGLKIEDFLERRLQTQVFKLGLAKSIHHARVLIRQRHIRVRKQVVNIPSFIVRLDSQKHIDFSLRSPYGGGRPGRVKRKNAKKGQGGAGAGDDEEED

SEQ ID NO: 44882 - protein, 130 aa, Homo sapiens [sequence omitted]

SEQ ID NO: 44883 - protein, 178 aa, Homo sapiens
MLKVARLLEVPVMLTEQYPQGLGPTVPELGTEGLRPLAKTCFSMVPALQQELDSRPQLRSVLLCGIEAQACILDPRSYPGLALTSLYPQNTTLDLLDRGLQVHVVVDACSSRSQVDRLVALARMRQSGAFLSTSEGLILQLVGDAVHPQFKEIQKLIKEPAPDSGLLGLFQGQNSLLH

SEQ ID NO: 44884 - protein, 162 aa, Homo sapiens
MLKVARLLEVPVMLTEQYPQGLGPTVPELGTEGLRPLAKTCFSMVPALQQELDSRPQLRSVLLCGIEAQACILNTTLDLLDRGLQVHVVVDACSSRSQVDRLVALARMRQSGAFLSTSEGLILQLVGDAVHPQFKEIQKLIKEPAPDSGLLGLFQGQNSLLH

SEQ ID NO: 44885 - protein, 92 aa, Homo sapiens [sequence omitted]

SEQ ID NO: 44886 - protein, 178 aa, Homo sapiens [sequence omitted]

SEQ ID NO: 44887 - protein, 270 aa, Homo sapiens [sequence omitted]

SEQ ID NO: 44888 - protein, 422 aa, Homo sapiens
MLENFTLLASLGCWHGAEAEEAPEQIASVGLLSSNIQQHQKQHCGEKPLKRQEGRVPVLRSCKVHLSEKSLQSREVGKALLISSGVLKHQVTHTGEKSHRSSKSREAFHAGKRHYKCSECGKAFGQKYLLVQHQRLHAGKKTYECSECGKLFRDMSNLFIHQIVHTGERPYGCSNCGKSFSRNAHLIEHQRVHTGEKPFTCSECGKAFRHNSTLVQHHKIHTGVRPYECSECGKLFSFNSSLMKHQRIHTGERPYKCSECGKFYSHKSNLIKHWRVHTGERPYKCSDCGKFFTQCSSLMQHQKVHTGEKPFKCNECGRFFRENSTLVRHQRVHTGAKPYECRECGKFFSQSSTLMQHRKVHIGEKPFKCNECGRLFRENSSLVKHQRVHTGAKPYECRECGKFFRHNSSLFKHRRIHTGEMQ

SEQ ID NO: 44889 - protein, 382 aa, Homo sapiens
MLETCGLLVSLGHRVPKPELVHLLEHGQELWIVKRGLSHATCAGDRAQVHTREPTTYPPVLSERAFLRGSLTLESSTSSDSRLGRARDEEGLLEMQKGKVTPETDLHKETHLGKVSLEGEGLGTDDGLHSRALQEWLSADVLHECDSQQPGKDALIHAGTNPYKCKQCGKGFNRKWYLVRHQRVHTGMKPYECNACGKAFSQSSTLIRHYLIHTGEKPYKCLECGKAFKRRSYLMQHHPIHTGEKPYECSQCRKAFTHRSTFIRHNRTHTGEKPFECKECEKAFSNRAHLIQHYIIHTGEKPYDCMACGKAFRCSSELIQHQRIHTGEKPYECTQCGKAFHRSTYLIQHSVIHTGEMPYKCIECGKAFKRRSHLLQHQRVHT

SEQ ID NO: 44890 - protein, 367 aa, Homo sapiens
MRFLHQDATQTGEKPNNSNKCAVAFYSGKSHHNWGKCSKAFSHIDTLVQDQRILTREGLFECSKCGKACTRRCNLIQHQKVHSEERPYECNECGKFFTYYSSFIIHQRVHTGERPYACPECGKSFSQIYSLNSHRKVHTGERPYECGECGKSFSQRSNLMQHRRVHTGERPYECSECGKSFSQNFSLIYHQRVHTGERPHECNECGKSFSRSSSLIHHRRLHTGERPYECSKCGKSFKQSSSFSSHRKVHTGERPYVCGECGKSFSHSSNLKNHQRVHTGERPVECSECSKSFSCKSNLIKHLRVHTGERPYECSECGKSFSQSSSLIQHRRVHTGKRPYQCSQCGKSFGCKSVLIQHQRVHIGEKP

SEQ ID NO: 44891 - protein, 374 aa, Homo sapiens
MKRGKKSYEGKNFENIFTLSSSLNENQRNLPGEKQYRCTECGKCFKRNSSLVLHHRTHTGEKPYTCNECGKSFSKNYNLIVHQRIHTGEKPYECSKCGKAFSDGSALTQHQRIHTGEKPYECLECGKTFNRNSSLILHQRTHTGEKPYRCNECGKPFTDISHLTVHLRIHTGEKPYECSKCGKAFRDGSYLTQHERTHTGEKPFECAECGKSFNRNSHLIVHQKIHSGEKPYECKECGKTFIESAYLIRHQRIHTGEKPYGCNQCQKLFRNIAGLIRHQRTHTGEKPYECNQCGKAFRDSSCLTKHQRIHTKETPYQCPECGKSFKQNSHLAVHQRLHSREGPSRCPQCGKMFQKSSSLVRHQRAHLGEQPMET

SEQ ID NO: 44892 - protein, 33 aa, Homo sapiens
MGQLSHLVPVVGNSKKSMWQRSCSNAVTVGRCS

SEQ ID NO: 44893 - protein, 449 aa, Homo sapiens
MTTSVFPVAGACHSVKSLQRQRGASPSRERKPTGVSVIYWERLLLGSGSGQASVSLRLTSPLRPPEGVRLREKTLTEHALLGRQPRTPERQKPCAQEVPGRTFGSAQDLEAAGGRGHHRMGAVWQEPHRLLGGQEPSTWDELGEALHAGEKSFECRACSKVFVKSSDLLKHLRTHTGERPYECAQCGKAFSQTSHLTQHQRIHSGETPYACPVCGKAFRHSSSLVRHQRIHTAEKSFRCSECGKAFSHGSNLSQHRKIHAGGRPYACAQCGRRFCRNSHLIQHERTHTGEKPFVCALCGAAFSQGSSLFKHQRVHTGEKPFACPQCGRAFSHSSNLTQHQLLHTGERPFRCVDCGKAFAKGAVLLSHRRIHTGEKPFVCTQCGRAFRERPALFHHQRIHTGEKTVRRSRASLHPQARSVAGASSEGAPAKETEPTPASGPAAVSQPAEV

SEQ ID NO: 44894 - protein, 701 aa, Homo sapiens
MRDSGSKAATDAQDANQCCTSCEDNAPATSYCVECSEPLCETCVEAHQRVKYTKDHTVRSTGPAKSRDGERTVYCNVHKHEPLVLFCESCDTLTCRDCQLNAHKDHQYQFLEDAVRNQRKLLASLVKRLGDKHATLQKSTKEVRSSIRQVSDVQKRVQVDVKMAILQIMKELNKRGRVLVNDAQKVTEGQQERLERQHWTMTKIQKHQEHILRFASWALESDNNTALLLSKKLIYFQLHRALKMIVDPVEPHGEMKFQWDLNAWTKSAEAFGKIVAERPGTNSTGPAPMAPPRAPGPLSKQGSGSSQPMEVQEGYGFGSGDDPYSSAEPHVSGVKRSRSGEGEVSGLMRKVPRVSLERLDLDLTADSQPPVFKVFPGSTTEDYNLIVIERGAAAAATGQPGTAPAGTPGAPPLAGMAIVKEEETEAAIGAPPTATEGPETKPVLMALAEGPGAEGPRLASPSGSTSSGLEVVAPEGTSAPGGGPGTLDDSATICRVCQKPGDLVMCNQCEFCFHLDCHLPALQDVPGEEWSCSLCHVLPDLKEEDGSLSLDGADSTGVVAKLSPANQRKCERVLLALFCHEPCRPLHQLATDSTFSLDQPGGTLDLTLIRARLQEKLSPPYSSPQEFAQDVGRMFKQFNKLTEDKADVQSIIGLQRFFETRMNEAFGDTKFSAVLVEPPPMSLPGAGLSSQELSGGPGDGP

SEQ ID NO: 44895 - protein, 68 aa, Homo sapiens
MTFYLEIHRGLLKPKIFMKFLIPLLKSMKMKDNESMQEKQQGSRGSLLLKNYLQSHCQDHSSHLHQSS

SEQ ID NO: 44896 - protein, 112 aa, Homo sapiens [sequence omitted]

SEQ ID NO: 44897 - protein, 1430 aa, Homo sapiens
MHLLLEAVPAVAPQTSILDLRFNRIREIQPGAFRRLRNLNTLLLNNNQIKRIPSGAFEDLENLKYLYLYKNEIQSIDRQAFKGLASLEQLYLHFNQIETLDPDSFQHLPKLERLFLHNNRITHLVPGTFNHLESMKRLRLDSNTLHCDCEILWLADLLKTYAESGNAQAAAICEYPRRIQGRSVATITPEELNCERPRITSEPQDADVTSGNTVYFTCRAEGNPKPEIIWLRNNNELSMKTDSRLNLLDDGTLMIQNTQETDQGIYQCMAKNVAGEVKTQEVTLRYFGSPARPTFVIQPQNTEVLVGESVTLECSATGHPPPRISWTRGDRTPLPVDPRVNITPSGGLYIQNVVQGDSGEYACSATNNIDSVHATAFIIVQALPQFTVTPQDRVVIEGQTVDFQCEAKGNPPPVIAWTKGGSQLSVDRRHLVLSSGTLRISGVALHDQGQYECQAVNIIGSQKVVAHLTVQPRVTPVFASIPSDTTVEVGANVQLPCSSQGEPEPAITWNKDGVQVTESGKFHISPEGFLTINDVGPADAGRYECVARNTIGSASVSMVLSVNVPDVSRNGDPFVATSIVEAIATVDRAINSTRTHLFDSRPRSPNDLLALFRYPRDPYTVEQARAGEIFERTLQLIQEHVQHGLMVDLNGTSYHYNDLVSPQYLNLIANLSGCTAHRRVNNCSDMCFHQKYRTHDGTCNNLQHPMWGASLTAFERLLKSVYENGFNTPRGINPHRLYNGHALPMPRLVSTTLIGTETVTPDEQFTHMLMQWGQFLDHDLDSTVVALSQARFSDGQHCSNVCSNDPPCFSVMIPPNDSRARSGARCMFFVRSSPVCGSGMTSLLMNSVYPREQINQLTSYIDASNVYGSTEHEARSIRDLASHRGLLRQGIVQRSGKPLLPFATGPPTECMRDENESPIPCFLAGDHRANEQLGLTSMHTLWFREHNRIATELLKLNPHWDGDTIYYETRKIVGAEIQHITYQHWLPKILGEVGMRTLGEYHGYDPGINAGIFNAFATAAFRFGHTLVNPLLYRLDENFQPIAQDHLPLHKAFFSPFRIVNEGGIDPLLRGLFGVAGKMRVPSQLLNTELTERLFSMAHTVALDLAAINIQRGRDHGIPPYHDYRVYCNLSAAHTFEDLKNEIKNPEIREKLKRLYGSTLNIDLFPALVVEDLVPGSRLGPTLMCLLSTQFKRLRDGDRLWYENPGVFSPAQLTQIKQTSLARILCDNADNITRVQSDVFRVAEFPHGYGSCDEIPRVDLRVWQDCCEDCRTRGQFNAFSYHFRGRRSLEFSYQEDKPTKKTRPRKIPSVGRQGEHLSNSTSAFSTRSDASGTNDFREFVLEMQKTITDLRTQIKKLESRLSTTECVDAGGESHANNTKWKKDACTICECKDGQVTCFVEACPPATCAVPVNIPGACCPVCLQKRAEEKP

SEQ ID NO: 44898 - protein, 260 aa, Homo sapiens
MFYAVRRGRKTGVFLTWNECRAQVDRFPAARFKKFATEDEAWAFVRKSASPEVSEGHENQHGQESEAKASKRLREPLDGDGHESAEPYAKHMKPSVEPAPPVSRDTFSYMGDFVVVYTDGCCSSNGRRRPRAGIGVYWGPGHPLNVGIRLPGRQTNQRAEIHAACKAIEQAKTQNINKLVLYTDSMFTINGITNWVQGWKKNGWKTSAGKEVINKEDFVALERLTQGMDIQWMHVPGHSGFIGNEEADRLAREGAKQSED

SEQ ID NO: 44899 - protein, 1710 aa, Homo sapiens [sequence omitted]

SEQ ID NO: 44900 - protein, 60 aa, Homo sapiens
MVSSVMKMPEDESTPEKRTDKIFRQMDTNNDVSLGKPPMVTRCPNLPPGLALPTSSEGIF

SEQ ID NO: 44901 - protein, 332 aa, Homo sapiens
MMTFDSEVELMKVARAHPKAKLVLRIATDDSKAVCRLSVKFGATLRTSRLLLERAKELNIDVVGVSFHVGSGCTDPETFVQAISDARCVFDMGAEVGFSMYLLDIGGGFPGSEDVKLKFEEITGVINPALDKYFPSDSGVRIIAEPGRYYVASAFTLAVNIIAKKIVLKEQTGSDDEDESSEQTFMYYVNDGVYGSFNCILYDHAHVKPLLQKRPKPDEKYYSSSIWGPTCDGLDRIVERCDLPEMHVGDWMLFENMGAYTVAAASTFNGFQRPTIYYVMSGPAWQLMQQFQNPDFPPEVEEQDASTLPVSCAWESGMKRHRAACASASINV

SEQ ID NO: 44902 - protein, 23 aa, Homo sapiens
MSIKILNFSDLERKTAMNSLGFR

SEQ ID NO: 44903 - protein, 2210 aa, Homo sapiens
MGSELFVISPASSFIGDLSYAIAGLIFLEYKASAQWSAELLVINYRGELRSYLVSVGTNQSYQESHCFSFSSHYPHGINTAIYHPGHRLLLVGGCETAEVGMSKASSCGLSAWRVLSGSPYYKQVTNGGDGVTAVPKTLGLLRMLSVKFYSRQGQEQDGIFKMSLSPDGMLLAAIHFSGKLSIWAIPSLKQQGEWGQNEQPGYDDLNPDWRLSTEKRKKIKDKESFYPLIDVNWWADSAVTLARCSGALTVSSVKTLKNLLGKSCEWFEPSPQVTATHDGGFLSLECEIKLAPKRSRLETRAGEEDEGEEDSDSDYEISAKARYFGYIKQGLYLVTEMERFAPPRKRPRTITKNYRLVSLRSTTPEELYQRKIESEEYEEALSLAHTYGLDTDLVYQRQWRKSAVNVASIQNYLSKIKKRSWVLHECLERVPENVDAAKELLQYGLKGTDLEALLAIGKGADDGRFTLPGEIDIDSISYEELSPPDEEPAKNKKEKELKKRQELLKLVNFSKLTLEQKELCRCRRKLLTYLDRLATYEEILGVPHASEQRYDAEFFKKFRNQNIVLSARTYAQESNVQALEILFTYHGSDLLPHRLAILSNFPETTSPHEYSVLLPEACFNGDSLMIIPWHEHKHRAKDWCEELACRMVVEPNLQDESEFLYAAQPELLRFRMTQLTVEKVMDWYQTRAEEIEHYARQVDCALSLIRLGMERNIPGLLVLCDNLVTLETLVYEARCDVTLTLKELQQMKDIEKLRLLMNSCSEDKYVTSAYQWMVPFLHRCEKQSPGVANELLKEYLVTLAKGDLKFPLKIFQHSKPDLQQKIIPDQDQLMAIALECIYTCERNDQLCLCYDLLECLPERGYGDKTEATTKLHDMVDQLEQILSVSELLEKHGLEKPISFVKNTQSSSEEARKLMVRLTRHTGRKQPPVSESHWRTLLQDMLTMQQNVYTCLDSDACYEIFTESLLCSSRLENIHLAGQMMHCSACSENPPAGIAHKGKPHYRVSYEKSIDLVLAASREYFNSSTNLTDSCMDLARCCLQLITDRPPAIQEELDLIQAVGCLEEFGVKILPLQVRLCPDRISLIKECISQSPTCYKQSTKLLGLAELLRVAGENPEERRGQVLILLVEQALRFHDYKAASMHCQELMATGYPKSWDVCSQLGQSEGYQDLATRQELMAFALTHCPPSSIELLLAASSSLQTEILYQRVNFQIHHEGGENISASPLTSKAVQEDEVGVPGSNSADLLRWTTATTMKVLSNTTTTTKAVLQAVSDGQWWKKSLTYLRPLQGQKCGGAYQIGTTANEDLEKQGCHPFYESVISNPFVAESEGTYDTYQHVPVESFAEVLLRTGKLAEAKNKGEVFPTTEVLLQLASEALPNDMTLALAYLLALPQVLDANRCFEKQSPSALSLQLAAYYYSLQIYARLAPCFRDKCHPLYRADPKELIKMVTRHVTRHEHEAWPEDLISLTKQLHCYNERLLDFTQAQILQGLRKGVDVQRFTADDQYKRETILGLAETLEESVYSIAISLAQRYSVSRWEVFMTHLEFLFTDSGLSTLEIENRAQDLHLFETLKTDPEAFHQHMVKYIYPTIGGFDHERLQYYFTLLENCGCADLGNCAIKPETHIRLLKKFKVVASGLNYKKLTDENMSPLEALEPVLSSQNILSISKLVPKIPEKDGQMLSPSSLYTIWLQKLFWTGDPHLIKQVPGSSPEWLHAYDVCMKYFDRLHPGDLITVVDAVTFSPKAVTKLSVEARKEMTRKAIKTVKHFIEKPRKRNSEDEAQEAKDSKVTYADTLNHLEKSLAHLETLSHSFILSLKNSEQETLQKYSHLYDLSRSEKEKLHDEAVAICLDGQPLAMIQQLLEVAVGPLDISPKDIVQSAIMKIISALSGGSADLGGPRDPLKVLEGVVAAVHASVDKGEELVSPEDLLEWLRPFCADDAWPVRPRIHVLQILGQSFHLTEEDSKLLVFFRTEAILKASWPQRQVDIADIENEENRYCLFMELLESSHHEAEFQHLVLLLQAWPPMKSEYVITNNPWVRLATVMLTRCTMENKEGLGNEVLKMCRSLYNTKQMLPAEGVKELCLLLLNQSLLLPSLKLLLESRDEHLHEMALEQITAVTTVNDSNCDQELLSLLLDAKLLVKCVSTPFYPRIVDHLLASLQQGRWDAEELGRHLREAGHEAEAGSLLLAVRGTHQAFRTFSTALRAAQHWV

SEQ ID NO: 44904 - protein, 734 aa, Homo sapiens
MGVMPEIAQAVEEMDWLLPTDIQAESIPLILGGGDVLMAAETGSGKTGAFSIPVIQIVYETLKDQQEGKKGKTTIKTGASVLNKWQMNPYDRGSAFAIGSDGLCCQSREVKEWHGCRATKGLMKGKHYYEVSCHDQGLCRVGWSTMQASLDLGTDKFGFGFGGTGKKSHNKQFDNYGEEFTMHDTIGCYLDIDKGHVKFSKNGKDLGLAFEIPPHMKNQALFPACVLKNAELKFNFGEEEFKFPPKDGFVALSKAPDGYIVKSQHSGNAQVTQTKFLPNAPKALIVEPSRELAEQTLNNIKQFKKYIDNPKLRELLIIGGVAARDQLSVLENGVDIVVGTPGRLDDLVSTGKLNLSQVRFLVLDEADGLLSQGYSDFINRMHNQIPQVTSDGKRLQVIVCSATLHSFDVKKLSEKIMHFPTWVDLKGEDSVPDTVHHVVVPVNPKTDRLWERLGKSHIRTDDVHAKDNTRPGANSPEMWSEAIKILKGEYAVRAIKEHKMDQAIIFCRTKIDCDNLEQYFIQQGGGPDKKGHQFSCVCLHGDRKPHERKQNLERFKKGDVRFLICTDVAARGIDIHGVPYVINVTLPDEKQNYVHRIGRVGRAERMGLAISLVATEKEKVWYHVCSSRGKGCYNTRLKEDGGCTIWYNEMQLLSEIEEHLNCTISQVEPDIKVPVDEFDGKVTYGQKRAAGGGSYKGHVDILAPTVQELAALEKEAQTSFLHLGYLPNQLFRTF

SEQ ID NO: 44905 - protein, 358 aa, Homo sapiens [sequence omitted]

SEQ ID NO: 44906 - protein, 4533 aa, Homo sapiens
MLENVSLVCPKDATRFKHLRKYTYNYEAESSSGVPGTADSRSATRINCKVELEVPQLCSFILKTSQCTLKEVYGFNPEGKALLKKTKNSEEFAAAMSRYELKLAIPEGKQVFLYPEKDEPTYILNIKRGIISALLVPPETEEAKQVLFLDTVYGNCSTHFTVKTRKGNVATEISTERDLGQCDRFKPIRTGISPLALIKGMTRPLSTLISSSQSCQYTLDAKRKHVAEAICKEQHLFLPFSYKNKYGMVAQVTQTLKLEDTPKINSRFFGEGTKKMGLAFESTKSTSPPKQAEAVLKTLQELKKLTISEQNIQRANLFNKLVTELRGLSDEAVTSLLPQLIEVSSPITLQALVQCGQPQCSTHILQWLKRVHANPLLIDVVTYLVALIPEPSAQQLREIFNMARDQRSRATLYALSHAVNNYHKTNPTGTQELLDIANYLMEQIQDDCTGDEDYTYLILRVIGNMGQTMEQLTPELKSSILKCVQSTKPSLMIQKAAIQALRKMEPKDKDQEVLLQTFLDDASPGDKRLAAYLMLMRSPSQADINKIVQILPWEQNEQVKNFVASHIANILNSEELDIQDLKKLVKEALKESQLPTVMDFRKFSRNYQLYKSVSLPSLDPASAKIEGNLIFDPNNYLPKESMLKTTLTAFGFASADLIEIGLEGKGFEPTLEALFGKQGFFPDSVNKALYWVNGQVPDGVSKVLVDHFGYTKDDKHEQDMVNGIMLSVEKLIKDLKSKEVPEARAYLRILGEELGFASLHDLQLLGKLLLMGARTLQGIPQMIGEVIRKGSKNDFFLHYIFMENAFELPTGAGLQLQISSSGVIAPGAKAGVKLEVANMQAELVAKPSVSVEFVTNMGIIIPDFARSGVQMNTNFFHESGLEAHVALKAGKLKFIIPSPKRPVKLLSGGNTLHLVSTTKTEVIPPLIENRQSWSVCKQVFPGLNYCTSGAYSNASSTDSASYYPLTGDTRLELELRPTGEIEQYSVSATYELQREDRALVDTLKFVTQAEGAKQTEATMTFKYNRQSMTLSSEVQIPDFDVDLGTILRVNDESTEGKTSYRLTLDIQNKKITEVALMGHLSCDTKEERKIKGVISIPRLQAEARSEILAHWSPAKLLLQMDSSATAYGSTVSKRVAWHYDEEKIEFEWNTGTNVDTKKMTSNFPVDLSDYPKSLHMYANRLLDHRVPQTDMTFRHVGSKLIVAMSSWLQKASGSLPYTQTLQDHLNSLKEFNLQNMGLPDFHIPENLFLKSDGRVKYTLNKNSLKIEIPLPFGGKSSRDLKMLETVRTPALHFKSVGFHLPSREFQVPTFTIPKLYQLQVPLLGVLDLSTNVYSNLYNWSASYSGGNTSTDHFSLRARYHMKADSVVDLLSYNVQGSGETTYDHKNTFTLSCDGSLRHKFLDSNIKFSHVEKLGNNPVSKGLLIFDASSSWGPQMSASVHLDSKKKQHLFVKEVKIDGQFRVSSFYAKGTYGLSCQRDPNTGRLNGESNLRFNSSYLQGTNQITGRYEDGTLSLTSTSDLQSGIIKNTASLKYENYELTLKSDTNGKYKNFATSNKMDMTFSKQNALLRSEYQADYESLRFFSLLSGSLNSHGLELNADILGTDKINSGAHKATLRIGQDGISTSATTNLKCSLLVLENELNAELGLSGASMKLTTNGRFREHNAKFSLDGKAALTELSLGSAYQAMILGVDSKNIFNFKVSQEGLKLSNDMMGSYAEMKFDHTNSLNIAGLSLDFSSKLDNIYSSDKFYKQTVNLQLQPYSLVTTLNSDLKYNALDLTNNGKLRLEPLKLHVAGNLKGAYQNNEIKHIYAISSAALSASYKADTVAKVQGVEFSHRLNTDIAGLASAIDMSTNYNSDSLHFSNVFRSVMAPFTMTIDAHTNGNGKLALWGEHTGQLYSKFLLKAEPLAFTFSHDYKGSTSHHLVSRKSISAALEHKVSALLTPAEQTGTWKLKTQFNNNEYSQDLDAYNTKDKIGVELTGRTLADLTLLDSPIKVPLLLSEPINIIDALEMRDAVEKPQEFTIVAFVKYDKNQDVHSINLPFFETLQEYFERNRQTIIVVLENVQRNLKHINIDQFVRKYRAALGKLPQQANDYLNSFNWERQVSHAKEKLTALTKKYRITENDIQIALDDAKINFNEKLSQLQTYMIQFDQYIKDSYDLHDLKIAIANIIDEIIEKLKSLDEHYHIRVNLVKTIHDLHLFIENIDFNKSGSSTASWIQNVDTKYQIRIQIQEKLQQLKRHIQNIDIQHLAGKLKQHIEAIDVRVLLDQLGTTISFERINDILEHVKHFVINLIGDFEVAEKINAFRAKVHELIERYEVDQQIQVLMDKLVELAHQYKLKETIQKLSNVLQQVKIKDYFEKLVGFIDDAVKKLNELSFKTFIEDVNKFLDMLIKKLKSFDYHQFVDETNDKIREVTQRLNGEIQALELPQKAEALKLFLEETKATVAVYLESLQDTKITLIINWLQEALSSASLAHMKAKFRETLEDTRDRMYQMDIQQELQRYLSLVGQVYSTLVTYISDWWTLAAKNLTDFAEQYSIQDWAKRMKALVEQGFTVPEIKTILGTMPAFEVSLQALQKATFQTPDFIVPLTDLRIPSVQINFKDLKNIKIPSRFSTPEFTILNTFHIPSFTIDFVEMKVKIIRTIDQMLNSELQWPVPDIYLRDLKVEDIPLARITLPDFRLPEIAIPEFIIPTLNLNDFQVPDLHIPEFQLPHISHTIEVPTFGKLYSILKIQSPLFTLDANADIGNGTTSANEAGIAASITAKGESKLEVLNFDFQANAQLSNPKINPLALKESVKFSSKYLRTEHGSEMLFFGNAIEGKSNTVASLHTEKNTLELSNGVIVKINNQLTLDSNTKYFHKLNIPKLDFSSQADLRNEIKTLLKAGHIAWTSSGKGSWKWACPRFSDEGTHESQISFTIEGPLTSFGLSNKINSKHLRVNQNLVYESGSLNFSKLEIQSQVDSQHVGHSVLTAKGMALFGEGKAEFTGRHDAHLNGKVIGTLKNSLFFSAQPFEITASTNNEGNLKVRFPLRLTGKIDFLNNYALFLSPSAQQASWQVSARFNQYKYNQNFSAGNNENIMEAHVGINGEANLDFLNIPLTIPEMRLPYTIITTPPLKDFSLWEKTGLKEFLKTTKQSFDLSVKAQYKKNKHRHSITNPLAVLCEFISQSIKSFDRHFEKNRNNALDFVTKSYNETKIKFDKYKAEKSHDELPRTFQIPGYTVPVVNVEVSPFTIEMSAFGYVFPKAVSMPSFSILGSDVRVPSYTLILPSLELPVLHVPRNLKLSLPDFKELCTISHIFIPAMGNITYDFSFKSSVITLNTNAELFNQSDIVAHLLSSSSSVIDALQYKLEGTTRLTRKRGLKLATALSLSNKFVEGSHNSTVSLTTKNMEVSVATTTKAQIPILRMNFKQELNGNTKSKPTVSSSMEFKYDFNSSMLYSTAKGAVDHKLSLESLTSYFSIESSTKGDVKGSVLSREYSGTIASEANTYLNSKSTRSSVKLQGTSKIDDIWNLEVKENFAGEATLQRIYSLWEHSTKNHLQLEGLFFTNGEHTSKATLELSPWQMSALVQVHASQPSSFHDFPDLGQEVALNANTKNQKIRWKNEVRIHSGSFQSQVELSNDQEKAHLDIAGSLEGHLRFLKNIILPVYDKSLWDFLKLDVTTSIGRRQHLRVSTAFVYTKNPNGYSFSIPVKVLADKFIIPGLKLNDLNSVLVMPTFHVPFTDLQVPSCKLDFREIQIYKKLRTSSFALNLPTLPEVKFPEVDVLTKYSQPEDSLIPFFEITVPESQLTVSQFTLPKSVSDGIAALDLNAVANKIADFELPTIIVPEQTIEIPSIKFSVPAGIVIPSFQALTARFEVDSPVYNATWSASLKNKADYVETVLDSTCSSTVQFLEYELNVLGTHKIEDGTLASKTKGTFAHRDFSAEYEEDGKYEGLQEWEGKAHLNIKSPAFTDLHLRYQKDKKGISTSAASPAVGTVGMDMDEDDDFSKWNFYYSPQSSPDKKLTIFKTELRVRESDEETQIKVNWEEEAASGLLTSLKDNVPKATGVLYDYVNKYHWEHTGLTLREVSSKLRRNLQNNAEWVYQGAIRQIDDIDVRFQKAASGTTGTYQEWKDKAQNLYQELLTQEGQASFQGLKDNVFDGLVRVTQEFHMKVKHLIDSLIDFLNFPRFQFPGKPGIYTREELCTMFIREVGTVLSQVYSKVHNGSEILFSYFQDLVITLPFELRKHKLIDVISMYRELLKDLSKEAQEVFKAIQSLKTTEVLRNLQDLLQFIFQLIEDNIKQLKEMKFTYLINYIQDEINTIFSDYIPYVFKLLKENLCLNLHKFNEFIQNELQEASQELQQIHQYIMALREEYFDPSIVGWTVKYYELEEKIVSLIKNLLVALKDFHSEYIVSASNFTSQLSSQVEQFLHRNIQEYLSILTDPDGKGKEKIAELSATAQEIIKSQAIATKKIISDYHQQFRYKLQDFSDQLSDYYEKFIAESKRLIDLSIQNYHTFLIYITELLKKLQSTTVMNPYMKLAPGELTIIL

SEQ ID NO: 44907 - protein, 204 aa, Homo sapiens
MQRQGQYDPPPGASNILGLEASGHVAELGPGCQGHWKIGDTAMALLPGGGQAQYVTVPEGLLMPIPEGLTLTQAAAIPEAWLTAFQLLHLVGNVQAGDYVLIHAGLSGVGTAAIQLTRMAGAIPLVTAGSQKKLQMAEKLGAAAGFNYKKEDFSEATLKFTKVQANAGECFHGANSASLLHGGPPTSAAGSGQNLPSDRNPGGP

SEQ ID NO: 44908 - protein, 47 aa, Homo sapiens
MLLYGRIAKHAGTGWFGFEDVDGGNSRFWPGCFSSLGKARDPSEQIP

SEQ ID NO: 44909 - protein, 150 aa, Homo sapiens
MENIIFVVCANKIDCTKHRCVDESEGRLWAESKGFLYFETSAQTGEGINEMFQTFYISIVDLCENGGKRPTTNSSASFTKEQADAIRRIRNSKDSWDMLGVKPGASRDEVNKAYRKLAVLLHPDKCVAPGSEDAFKAVVNARTALLKNIK

SEQ ID NO: 44910 - protein, 581 aa, Homo sapiens
MDKIVPSLLFNLQHVEEAESRSPSPLQAPEKEKESPAELAERCLRELLGRAAFGNIKNAIKPVLIHLDNHSLWEPKVFAIRCFKIIMYSIQPQHSHLVIQQLLGHLDANSRSAATVRAGIVEVLSEAAVIAATGSVGPTVLEMFNTLLRQLRLSIDYALTGSYDGAVSLGTKIIKEHEERMFQEAVIKTVGSFASTLPTYQRSEVILFIMSKVPRPSLHQAVDTGRTGENRNRLTQIMLLKSLLQVSTGFQCNNMMSALPSNFLDRLLSTALMEDAEIRLFVLEILISFIDRHGNRHKFSTISTLSDISVLKLKVDKCSRQDTVFMKKHSQQLYRHIYLSCKEETNVQKHYEALYGLLALISIELANEEVVVDLIRLVLAVQVIETRKKEAPYMLPEDVFVERPRLSQNLDGVVIELLFRQSKISEVLGGSGYNSDRLCLPYIPQLTDEDRLSKRRSIGETISLQVEVESRNSPEKEERVPAEEITYETLKKAIVDSVAVEEQERERRRQVVEKFQKAPFEEIAAHCGARASLLQSKLNQIFEITIRPPPSPSGTITAAYGQPQNHSIPVYEMKFPDLCVY

SEQ ID NO: 44911 - protein, 533 aa, Homo sapiens
MIEAFRDNGLNTLDHTTEISVSRLETVISSIYYQLNKRLPSTHQISVEQSISLLLNFMIAAYDSEGRGKLTVFSVKAMLATMCGGKMLDKLRYVFSQMSDSNGLMIFSKFDQFLKEVLKLPTAVFEGPSFGYTEHSVRTCFPQQRKIMLNMFLDTMMADPPPQCLVWLPLMHRLAHVENVFHPVECSYCRCESMMGFRYRCQQCHNYQLCQNCFWRGHAGGPHSNQHQMKEHSSWKSPAKKLSHAISKSLGCVPTREPPHPVFPEQPEKPLDLAHIVPPRPLTNMNDTMVSHMSSGVPTPTKSVLDSPSRLDEEHRLIARYAARLAAEAGNVTRPPTDLSFNFDANKQQRQLIAELENKNREILQEIQRLRLEHEQASQPTPEKAQQNPTLLAELRLLRQRKDELEQRMSALQESRRELMVQLEELMKLLKAQATGSPHTSPTHGGGRPMPMPVRSTSAGSTPTHCPQDSLSGVGGDVQEAFAQGTRRNLRNDLLVAADSITNTMSSLVKELHSAEEGAEEEEEKMQNGKDRG

SEQ ID NO: 44912 - protein, 59 aa, Homo sapiens
MGRVPAVAVAPHRRTPTPSIATHAPGETARWASPLAAQPPVPYPQPHSPARPPGPSQSL

SEQ ID NO: 44913 - protein, 507 aa, Homo sapiens
MKAELPPGPGAVGREMTKEEKLQLRKEKKQQKKKRKEEKGAEPETGSAVSAAQCQGPTRELPESGIQLGTPREKVPAGRSKAELRAERRAKQEAERALKQARKGEQGGPPPKASPSTAGETPSGVKRLPEYPQVDDLLLRRLVKKPERQQVPTRKDYGSKVSLFSHLPQYSRQNSLTQFMSIPSSVIHPAMVRLGLQYSQGLVSGSNARCIALLRALQQVIQDYTTPPNEELSRDLVNKLKPYMSFLTQCRPLSASMHNAIKFLNKEITSVGSSKREEEAKSELRAAIDRYVQEKIVLAAQAISRFAYQKISNGDVILVYGCSSLVSRILQEAWTEGRRFRVVVVDSRPWLEGRHTLRSLVHAGVPASYLLIPAASYVLPEVSKVLLGAHALLANGSVMSRVGTAQLALVARAHNVPVLVCCETYKFCERVQTDAFVSNELDDPDDLQCKRGEHVALANWQNHASLRLLNLVYDVTPPELVDLVITELGMIPCSSVPVVLRVKSSDQ

SEQ ID NO: 44914 - protein, 508 aa, Homo sapiens
MKAELPPGPGAVGREMTKEEKLQLRKEKKQQKKKRKEEKGAEPETGSAVSAAQCQVGPTRELPESGIQLGTPREKVPAGRSKAELRAERRAKQEAERALKQARKGEQGGPPPKASPSTAGETPSGVKRLPEYPQVDDLLLRRLVKKPERQQVPTRKDYGSKVSLFSHLPQYSRQNSLTQFMSIPSSVIHPAMVRLGLQYSQGLVSGSNARCIALLRALQQVIQDYTTPPNEELSRDLVNKLKPYMSFLTQCRPLSASMHNAIKFLNKEITSVGSSKREEEAKSELRAAIDRYVQEKIVLAAQAISRFAYQKISNGDVILVYGCSSLVSRILQEAWTEGRRFRVVVVDSRPWLEGRHTLRSLVHAGVPASYLLIPAASYVLPEVSKVLLGAHALLANGSVMSRVGTAQLALVARAHNVPVLVCCETYKFCERVQTDAFVSNELDDPDDLQCKRGEHVALANWQNHASLRLLNLVYDVTPPELVDLVITELGMIPCSSVPVVLRVKSSDQ

SEQ ID NO: 44915 - protein, 388 aa, Homo sapiens
MQAVRQDPLLGSSETFNSFLRRAQQETQQVPTEEVSLEVLLSNGQKVLVNVLTSDQTEDVLEAVAAKLDLPDDLIGYFSLFLVREKEDGAFSFVRKLQEFELPYVSVTSLRSQEYKIVLRKSYWDSAYDDDVMENRVGLNLLYAQTVSDIERGWILVTKEQHRQLKSLQEKVSKKEFLRLAQTLRHYGYLRFDACVADFPEKDCPVVVSAGNSELSLQLRLPGQQLREGSFRVTRMRCWRVTSSVPLPSGSTSSPGRGRGEVRLELAFEYLMSKDRLQWVTITSPQAIMMSICLQSMVDELMVKKSGGSIRKMLRRRVGGTLRRSDSQQAVKSPPLLESPDATRESMVKLSSKLSAVSLRGIGSPSTDASASDVHGNFAFEGIGDEDL

SEQ ID NO: 44916 - protein, 508 aa, Homo sapiens
MEDAHNCIPELDSETAMFSVYDGHGGEEVALYCAKYLPDIIKDQKAYKEGKLQKALEDAFLAIDAKLTTEEVIKELAQIAGRPTEDEDEKEKVADEDDVDNEEAALLHEEATMTIEELLTRYGQNCHKGPPHSKSGGGTGEEPGSQGLNGEAGPEDSTRETPSQENGPTAKAYTGFSSNSERGTEAGQVGEPGIPTGEAGPSCSSASDKLPRVAKSKFFEDSEDESDEAEEEEEDSEECSEEEDGYSSEEAENEEDEDDTEEAEEDDEEEEEEMMVPGMEGKEEPGSDSGTTAVVALIRGKQLIVANAGDSRCVVSEAGKALDMSYDHKPEDEVELARIKNAGGKVTMDGRVNGGLNLSRAIGDHFYKRNKNLPPEEQMISALPDIKVLTLTDDHEFMVIACDGIWNVMSSQEVVDFIQSKISQRDENGELRLLSSIVEELLDQCLAPDTSGDGTGCDNMTCIIICFKPRNTAELQPESGKRKLEEVLSTEGAEENGNSDKKKKAKRD

SEQ ID NO: 44917 - protein, 580 aa, Homo sapiens
MHLKHLRTLLSPQDGAAKVTCMAWSQNNAKFAVCTVDRVVLLYDEHGERRDKFSTKPADMKYGRKSYMVKGMAFSPDSTKIAIGQTDNIIYVYKIGEDWGDKKVICNKFIQTSAVTCLQWPAEYIIVFGLAEGKVRLANTKTNKSSTIYGTESYVVSLTTNCSGKGILSGHADGTIVRYFFDDEGSGESQGKLVNHPCPPYALAWATNSIVAAGCDRKIVAYGKEGHMLQTFDYSRDPQEREFTTAVSSPGGQSVVLGSYDRLRVFNWIPRRSIWEEAKPKEITNLYTITALAWKRDGSRLCVGTLCGGVEQFDCCLRRSIYKNKFELTYVGPSQVIVKNLSSGTRVVLKSHYGYEVEEVKILGKERYLVAHTSETLLLGDLNTNRLSEIAWQGSGGNEKYFFENENVCMIFNAGELTLVEYGNNDTLGSVRTEFMNPHLISVRINERCQRGTEDNKKLAYLIDIKTIAIVDLIGGYNIGTVSHESRVDWLELNETGHKLLFRDRKLRLHLYDIESCSKTMILNFCSYMQWVPGSDVLVAQNRNSLCVWYNIEAPERVTMFTIRVCWTLGALRCGIELIN

SEQ ID NO: 44918 - protein, 321 aa, Homo sapiens
MFTCHHCGKQLRSLAGMKYHVMANHNSLPILKAGDEIDEPSERERLRTVLKRLGKLRCMRESCSSSFTSIMGYLYHVRKCGKGAAELEKMTLKCHHCGKPYRSKAGLAYHLRSEHGPISFFPESGQPECLKEMNLESKSGGRVQRRSAKIAVYHLQELASAELAKEWPKRKVLQDLVPDDRKLKYTRPGLPTFSQEVLHKWKTDIKKYHRIQCPNQGCEAVYSSVSGLKAHLGSCTLGNFVAGKYKCLLCQKEFVSESGVKYHINSVHAEDWFVVNPTTTKSFEKLMKIKQRQQEEEKRRQQHRSRRGSQDTCMPKALHRM

SEQ ID NO: 44919 - protein, 269 aa, Homo sapiens
MKFIEKAQNMSKYVLIDTPGQIEVFTWSASGTIITEALASSFPTVVIYVMDTSRSTNPVTFMSNMLYACSILYKTKLPFIVVMNKTDIIDHSFAVEWMQDFEAFQDALNQETTYVSNLTRSMSLVLDEFYSSLRVVGVSAVLGTGLDELFVQVTSAAEEYEREYRPEYERLKKSLANAESQQQREQLERLRKDMGSVALDAGTAKDSLSPVLHPSDLILTRGTLDEEDEEADSDTDDIDHRVTEESHEEPAFQNFMQESMAQYWKRNNK

SEQ ID NO: 44920 - protein, 479 aa, Homo sapiens
MDTSERKINAGSQDDEMGCTWGMGEDAVEDDAEENPIVLEFQQEREAFYIKDPKKALQGFFDREGEELEYEFDEQGHSTWLCRVRLPVDDSTGKQLVAEAIHSGKKKEAMIQCSLEACRILDTLGLLRQEAVSRKRKAKNWEDEDFYDSDDDTFLDRTGLIEKKRLNRMKKAGKIDEKPETFESLVAKLNDAERELSEISERLKASSQVLSESPSQDSLDAFMSEMKSGSTLDGVSRKKLHLRTFELRKEQQRLKGLIKIVKPAEIPELKKTETQTTGAENKAKKLTLPLFGAMKGGSKFKLKTGTVGKLPPKRPELPPTLMRMKDEPEVEEEEEEEEEEEKEKEEHEKKKLEDGSLSRPQPEIEPEAAVQEMRPPTDLTHFKETQTHENMSQLSEEEQNKDYQDCSKTTSLCAGPSASKNEYEKSRGELKKKKTPGPGKLPPTLSSKYPEDDPDYCVWVPPEGQSGDGRTHLNDKYGY

SEQ ID NO: 44921 - protein, 354 aa, Homo sapiens [sequence omitted]

SEQ ID NO: 44922 - protein, 98 aa, Homo sapiens
MERDLLYTDSVLGKLFWKHFHAESLFTFDVCKPILVSLDQQPPCGNMAHPTCGIIGDHVWCKSDYNWGCICSWRKKCHYHEPSDKNGLDVPVELPDAI

SEQ ID NO: 44923 - protein, 146 aa, Homo sapiens [sequence omitted]

SEQ ID NO: 44924 - protein, 433 aa, Homo sapiens
MNCPYLSLTSGDVTKRLLIQKNCLLLLTYLISELEAARMLCVNAPPKKAQEGGGSEVFQELKGICIALGMSKPPANITMFQFFSGIEKKLKETLAKVPPNHVGKPLLKKPMGPAHWEKIEAINQAIANEYEVRRKLLIKRLDVTVQSFGWSDRAKSQTEKLAKVYQPKRSVLSPKTTISVAHLLAARQDLSKILRTSSGSIREKTACAINKVLMGRVPDRGGRPNEIEPPPPEMPPWQKRQDGPQQQTGGRGGGRGGYEHSSYGGRGGHEQGGGRGGRGGYDHGGRGGGRGNKHQGGWTDGGSGGGGGYQDGGYRDSGFQPGGYHGGHSSGGYQGGGYGGFQTSSSYTGSGYQGGGYQQDNRYQDGGHHGDRGGGRGGRGGRGGRGGRAGQGGGWGGRGSQNYHQGGQFEQHFQHGGYQYNHSGFGQGRHYTS

SEQ ID NO: 44925 - protein, 651 aa, Homo sapiens [sequence omitted]

SEQ ID NO: 44926 - protein, 454 aa, Homo sapiens [sequence omitted]

SEQ ID NO: 44927 - protein, 820 aa, Homo sapiens
MKAIVSSGTLGDRMAAMILLIQDDAVHTLQFVETLVNLVKKKGSKQQCLMALDTFKELLITDLLPDNRKLRIFSQRPFDKLEQLSSGNKDSRDRRLILWYFEHQLKHLVAEFVQVLETLSHDTLVTTKTRALTVAHELLCNKPEEEKALLVQVVNKLGDPQNRIATKASHLLETLLCKHPNMKGVVSGEVERLLFRSNISSKAQYYAICFLNQMALSHEESELANKLITVYFCFFRTCVKKKDVESKMLSALLTGVNRAYPYSQTGDDKVREQIDTLFKVLHIVNFNTSVQALMLLFQVMNSQQTISDRYYTALYRKMLDPGLMTCSKQAMFLNLVYKSLKADIVLRRVKAFVKRLLQVTCQQMPPFICGALYLVSEILKAKPGLRSQLDDHPESDDEENFIDANDDEDMEKFTDADKETEIVKKLETEETVPETDVETKKPEVASWVHFDNLKGGKQLNKYDPFSRNPLFCGAENTSLWELKKLSVHFHPSVALFAKTILQGNYIQYSGDPLQDFTLMRFLDRFVYRNPKPHKGKENTDSVVMQPKRKHFIKDIRHLPVNSKEFLAKEESQIPVDEVFFHRYYKKVAVKEKQKRDADEESIEDVDDEEFEELIDTFEDDNCFSSGKDDMDFAGNVKKRTKGAKDNTLDEDSEGSDDELGNLDDDEVSLGSMDDEEFAEVDEDGGTFMDVLDDESESVPELEVHSKVSTKKSKRKGTDDFDFAGSFQGPRKKKRNLNDSSLFVSAEEFGHLLDENMGSKFDNIGMNAMANKDNASLKQLRWEAERDDWLHNRDAKSIIKKKKHFKKKRIKTTQKTKKQRK

SEQ ID NO: 44928 - protein, 786 aa, Homo sapiens
MYDKILLFRHDMNSENILQLITSADEIHEGDLVEVVLSALATVEDFQIRPHTLYVHSYKAPTFCDYCGEMLWGLVRQGLKCEGCGLNYHKRCAFKIPNNCSGVRKRRLSNVSLPGPGLSVPRPLQPEYVALPSEESHVHQEPSKRIPSWSGRPIWMEKMVMCRVKVPHTFAVHSYTRPTICQYCKRLLKGLFRQGMQCKDCKFNCHKRCASKVPRDCLGEVTFNGEPSSLGTDTDIPMDIDNNDINSDSSRGLDDTEEPSPPEDKMFFLDPSDLDVERDEEAVKTISPSTSNNIPLMRVVQSIKHTKRKSSTMVKEGWMVHYTSRDNLRKRHYWRLDSKCLTLFQNESGSKYYKEIPLSEILRISSPRDFTNISQGSNPHCFEIITDTMVYFVGENNGDSSHNPVLAATGVGLDVAQSWEKAIRQALMPVTPQASVCTSPGQGKDHKDLSTSISVSNCQIQENVDISTVYQIFADEVLGSGQFGIVYGGKHRKTGRDVAIKVIDKMRFPTKQESQLRNEVAILQNLHHPGIVNLECMFETPERVFVVMEKLHGDMLEMILSSEKSRLPERITKFMVTQILVALRNLHFKNIVHCDLKPENVLLASAEPFPQVKLCDFGFARIIGEKSFRRSVVGTPAYLAPEVLRSKGYNRSLDMWSVGVIIYVSLSGTFPFNEDEDINDQIQNAAFMYPPNPWREISGEAIDLINNLLQVKMRKRYSVDKSLSHPWLQDYQTWLDLREFETRIGERYITHESDDARWEIHAYTHNLVYPKHFIMAPNPDDMEEDP

SEQ ID NO: 44929 - protein, 397 aa, Homo sapiens [sequence omitted]

SEQ ID NO: 44930 - protein, 155 aa, Homo sapiens
MEQVCGGDKPYIAPSDLERKHLDLKEVAIKQFRSVKKMGGDEFCRRYQDQLEAEIEETYANFIKHNDGKNIFYAARTPATLFAVMFAMYIISGLTGFIGLNSIAVLCNLVMGLALIFLCTWAYVKYSGEFREIGTVIDQIAETLWEQVGIYLLVF

SEQ ID NO: 44931 - protein, 1284 aa, Homo sapiens
MTSENQEKVKALLRDLQEQDADAGSERGLSGEEEDDEPDCCNDERYWPAGQEPSLVPDLDPLEYAGLASVEPYVPEFTVSPFAVQKLSRYGFNTERCQAVLRMCDGDVGASLEHLLTQCFSETFGERMKISEAVNQISLDECMEQRQEEAFALKSICGEKFIERIQNRVWTIGLELEYLTSRFRKSKPKESTKNVQENSLEICKFYLKGNCKFGSKCRFKHEVPPNQIVGRIERSVDDSHLNAIEDASFLYELEIRFSKDHKYPYQAPLVAFYSTNENLPLACRLHISEFLYDKALTFAETSEPVVYSLITLLEEESEIVKLLTNTHHKYSDPPVNFLPVPSRTRINNPACHKTVIPNNSFVSNQIPEVEKASESEESDEDDGPAPVIVENESYVNLKKKISKRYDWQAKSVHAENGKICKQFRMKQASRQFQSILQERQSLPAWEERETILNLLRKHQVVVISGMTGCGKTTQIPQFILDDSLNGPPEKVANIICTQPRRISAISVAERVAKERAERVGLTVGYQIRLESVKSSATRLLYCTTGVLLRRLEGDTALQGVSHIIVDEVHERTEESDFLLLVLKDIVSQRPGLQVILMSATLNAELFSDYFNSCPVITIPGRTFPVDQFFLEDAIAVTRYVLQDGSPYMRSMKQISKEKLKARRNRTAFEEVEEDLRLSLHLQDQDSVKDAVPDQQLDFKQLLARYKGVSKSVIKTMSIMDFEKVNLELIEALLEWIVDGKHSYPPGAILVFLPGLAEIKMLYEQLQSNSLFNNRRSNRCVIHPLHSSLSSEEQQAVFVKPPAGVTKIIISTNIAETSITIDDVVYVIDSGKMKEKRYDASKGMESLEDTFVSQANALQRKGRAGRVASGVCFHLFTSHHYNHQLLKQQLPEIQRVPLEQLCLRIKILEMFSAHNLQSVFSRLIEPPHTDSLRASKIRLRDLGALTPDERLTPLGYHLASLPVDVRIGKLMLFGSIFRCLDPALTIAASLAFKSPFVSPWDKKEEANQKKLEFAFANSDYLALLQAYKGWQLSTKEGVRASYNYCRQNFLSGRVLQEMASLKRQFTELLSDIGFAREGLRAREIEKRAQGGDGVLDATGEEANSNAENPKLISAMLCAALYPNVVQVKSPEGKFQKTSTGAVRMQPKSAELKFVTKNDGYVHIHPSSVNYQVRHFDSPYLLYHEKIKTSRVFIRDCSMVSVYPLVLFGGGQVNVQLQRGEFVVSLDDGWIRFVAASHQVAELVKELRCELDQLLQDKIKNPSIDLCTCPRGSRIISTIVKLVTTQ

SEQ ID NO: 44932 - protein, 444 aa, Homo sapiens [sequence omitted]

SEQ ID NO: 44933 - protein, 923 aa, Homo sapiens [sequence omitted]

SEQ ID NO: 44934 - protein, 902 aa, Homo sapiens
MSCITNGSGANRKPSHTSAVSIAGKETLSSAAKSGTEKKKEKPQGQREKKEESHSNDQSPQIRASPSPQPSSQPLQIHRQTPESKNATPTKSIKRPSPAEKSHNSWENSDDSRNKLSKIPSTPKLIPKVTKTADKHKDVIINQEGEYIKMFMRGRPITMFIPSDVDNYDDIRTELPPEKLKLEWAYGYRGKDCRANVYLLPTGKIVYFIASVVVLFNYEERTQRHYLGHTDCVKCLAIHPDKIRIATGQIAGVDKDGRPLQPHVRVWDSVTLSTLQIIGLGTFERGVGCLDFSKADSGVHLCIIDDSNEHMLTVWDWQKKAKGAEIKTTNEVVLAVEFHPTDANTIITCGKSHIFFWTWSGNSLTRKQGIFGKYEKPKFVQCLAFLGNGDVLTGDSGGVMLIWSKTTVEPTPGKGPKGVYQISKQIKAHDGSVFTLCQMRNGMLLTGGGKDRKIILWDHDLNPEREIEVPDQYGTIRAVAEGKADQFLVGTSRNFILRGTFNDGFQIEVQGHTDELWGLATHPFKDLLLTCAQDRQVCLWNSMEHRLEWTRLVDEPGHCADFHPSGTVVAIGTHSGRWFVLDAETRDLVSIHTDGNEQLSVMRYSIDGTFLAVGSHDNFIYLYVVSENGRKYSRYGRCTGHSSYITHLDWSPDNKYIMSNSGDYEILYWDIPNGCKLIRNRSDCKDIDWTTYTCVLGFQVFGVWPEGSDGTDINALVRSHNRKVIAVADDFCKVHLFQYPCSKAKAPSHKYSAHSSHVTNVSFTHNDSHLISTGGKDMSIIQWKLVEKLSLPQNETVADTTLTKAPVSSTESVIQSNTPTPPPSQPLNETAEEESRISSSPTLLENSLEQTVEPSEDHSEEESEEGSGDLGEPLYEEPCNEISKEQAKATLLEDQQDPSPSS

SEQ ID NO: 44935 - protein, 24 aa, Homo sapiens
MALTVGGTIYCLIALYMASQPKNK

SEQ ID NO: 44936 - protein, 1945 aa, Homo sapiens [sequence omitted]

SEQ ID NO: 44937 - protein, 353 aa, Homo sapiens [sequence omitted]

SEQ ID NO: 44938 - protein, 261 aa, Homo sapiens
MDRSGSTAVGVMISPKHIYFINCGDSRAVLYRNGQVCFSTQDHKPCNPREKERIQNAGGSVMIQRVNGSLAVSRALGDYDYKCVDGKGPTEQLVSPEPEVYEILRAEEDEFIILACDGIWDVMSNEELCEYVKSRLEVSDDLENVCNWVVDTCLHKGSRDNMSIVLVCFSNAPKVSDEAVKKDSELDKHLESRVEEIMEKSGEEGMPDLAHVMRILSAENIPNLPPGGGLAGKRNVIEAVYSRLNPHRESDGGAGDLEDPW

SEQ ID NO: 44939 - protein, 533 aa, Homo sapiens
MEASFPNVSSFEWVKDEEDEDVLFYTFQRNLRCHDVYRATFGDNKRNERFYTEKDPSYFVFLYLTKDSRFLTINIMNKTTSEVWLIDGLSPWDPPVLIQKRIHGVLYYVEHRDDELYILTNVGEPTEFKLMRTAADTPAIMNWDLFFTMKRNTKVIDLDMFKDHCVLFLKHSNLLYVNVIGLADDSVRSLKLPPWACGFIMDTNSDPKNCPFQLCSPIRPPKYYTYKFAEGKLFEETGHEDPITKTSRVLRLEAKSKDGKLVPMTVFHKTDSEDLQKKPLLVHVYGAYGMDLKMNFRPERRVLVDDGWILAYCHVRGGGELGLQWHADGRLTKKLNGLADLEACIKTLHGQGFSQPSLTTLTAFSAGGVLAGALCNSNPELVRAVTLEAPFLDVLNTMMDTTLPLTLEELEEWGNPSSDEKHKNYIKRYCPYQNIKPQHYPSIHITAYENDERVPLKGIVSYTEKLKEAIAEHAKDTGEGYQTPNIILDIQPGGNHVIEDSHKKITAQIKFLYEELGLDSTSVFEDLKKYLKF

SEQ ID NO: 44940 - protein, 144 aa, Homo sapiens
MRSLLRTPFLCGLLWAFCAPGARAEEPAASFSQPGSMGLDKNTVHDQEHIMEHLEGVINKPEAEMSPQELQLHYFKMHDYDGNNLLDGLELSTAITHVHKEEGSEQAPLMSEDELINIIDGVLRDDDKNNDGYIDYAEFAKSLQ

SEQ ID NO: 44941 - protein, 760 aa, Homo sapiens
MSEAKNYLSSILNHGRLSPQYMCEAMLILGKLHYVEGSYRDAISMYARAGIDDMSMENKPLYQMRLLSEAFVIKGLSLERLPNSIASRFRLTEREEEVITCFERASWIAQVFLQELEKTTNNSTSRHLKGCHPLDYELTYFLEAALQSAYVKNLKKGNIVKGMRELREVLRTVETKATQNFKVMAAKHLAGVLLHSLSEECYWSPLSHPLPEFMGKEESSFATQALRKPHLYEGDNLYCPKDNIEEALLLLLISESMATRDVVLSRVPEQEEDRTVSLQNAAAIYDLLSITLGRRGQYVMLSECLERAMKFAFGEFHLWYQVALSMVACGKSAYAVSLLRECVKLRPSDPTVPLMAAKVCIGSLRWLEEAEHFAMMVISLGEEAGEFLPKGYLALGLTYSLQATDATLKSKQDELHRKALQTLERAQQLAPSDPQVILYVSLQLALVRQISSAMEQLQEALKVRKDDAHALHLLALLFSAQKHHQHALDVVNMAITEHPENFNLMFTKVKLEQVLKGPEEALVTCRQVLRLWQTLYSFSQLGGLEKDGSFGEGLTMKKQSGMHLTLPDAHDADSGSRRASSIAASRLEEAMSELTMPSSVLKQGPMQLWTTLEQIWLQAAELFMEQQHLKEAGFCIQEAAGLFPTSHSVLYMRGRLAEVKGNLEEAKQLYKEALTVNPDGVRIMHSLGLMLSRLGHKSLAQKVLRDAVERQSTCHEAWQGLGEVLQAQGQNEAAVDCFLTALELEASSPVLPFSIIPREL

SEQ ID NO: 44942 - protein, 17 aa, Homo sapiens
MVSFVHSISLCTTTLQG

SEQ ID NO: 44943 - protein, 1185 aa, Homo sapiens
MQRADEALNKDKIKRLELAVCDEPSEPEEEEEMEVGTTYVTDKSEEDNEIESEEEVQPKTQGSRRSSRQIKKRRVISDSESDIGGSDVEFKPDTKEEGSSDEISSGVGDSESEGLNSPVKVARKRKRMVTGNGSLKRKSSRKETPSATKQATSISSETKNTLRAFSAPQNSESQAHVSGGGDDSSRPTVWYHETLEWLKEEKRRDEHRRRPDHPDFDASTLYVPEDFLNSCTPGMRKWWQIKSQNFDLVICYKVGKFYELYHMDALIGVSELGLVFMKGNWAHSGFPEIAFGRYSDSLVQKGYKVARVEQTETPEMMEARCRKMAHISKYDRVVRREICRIITKGTQTYSVLEGDPSENYSKYLLSLKEKEEDSSGHTRAYGVCFVDTSLGKFFIGQFSDDRHCSRFRTLVAHYPPVQVLFEKGNLSKETKTILKSSLSCSLQEGLIPGSQFWDASKTLRTLLEEEYFREKLSDGIGVMLPQVLKGMTSESDSIGLTPGEKSELALSALGGCVFYLKKCLIDQELLSMANFEEYIPLDSDTVSTTRSGAIFTKAYQRMVLDAVTLNNLEIFLNGTNGSTEGTLLERVDTCHTPFGKRLLKQWLCAPLCNHYAINDRLDAIEDLMVVPDKISEVVELLKKLPDLERLLSKIHNVGSPLKSQNHPDSRAIMYEETTYSKKKIIDFLSALEGFKVMCKIIGIMEEVADGFKSKILKQVISLQTKNPEGRFPDLTVELNRWDTAFDHEKARKTGLITPKAGFDSDYDQALADIRENEQSLLEYLEKQRNRIGCRTIVYWGIGRNRYQLEIPENFTTRNLPEEYELKSTKKGCKRYWTKTIEKKLANLINAEERRDVSLKDCMRRLFYNFDKNYKDWQSAVECIAVLDVLLCLANYSRGGDGPMCRPVILLPEDTPPFLELKGSRHPCITKTFFGDDFIPNDILIGCEEEEQENGKAYCVLVTGPNMGGKSTLMRQAGLLAVMAQMGCYVPAEVCRLTPIDRVFTRLGASDRIMSGESTFFVELSETASILMHATAHSLVLVDELGRGTATFDGTAIANAVVKELAETIKCRTLFSTHYHSLVEDYSQNVAVRLGHMACMVENECEDPSQETITFLYKFIKGACPKSYGFNAARLANLPEEVIQKGHRKAREFEKMNQSLRLFREVCLASERSTVDAEAVHKLLTLIKEL

SEQ ID NO: 44944 - protein, 438 aa, Homo sapiens
MEGSEDAYVGYMTIRFNPDDKSAQHHNAHHCLEITVNCSPIIDHCIIRSTCTVGSAVCVSGQGACPTIKHCNISDCENVGLYITDHAQGIYEDNEISNNALAGIWVKNHGNPIIRRNHIHHGRDVGVFTFDHGMGYFESCNIHRNRIAGFEVKAYANPTVVRCEIHHGQTGGIYVHEKGRGQFIENKIYANNFAGVWITSNSDPTIRGNSIFNGNQGGVYIFGDGRGLIEGNDIYGNALAGIQIRTNSCPIVRHNKIHDGQHGGIYVHEKGQGVIEENEVYSNTLAGVWVTTGSTPVLRRNRIHSGKQVGVYFYDNGHGVLEDNDIYNHMYSGVQIRTGSNPKIRRNKIWGGQNGGILVYNSGLGCIEDNEIFDNAMAGVWIKTDSNPTLRRNKIHDGRDGGICIFNGGRGIVVNFALVKNPVFHYSSISLMINDIAN

SEQ ID NO: 44945 - protein, 469 aa, Homo sapiens
MEVFEYTRPMMHPEPGKFYQINPEEYEHPNPWKESFQQLYKGAHVKPGFAEHFYSNPARYKGRENMLYYDTIEDALGGVQEAHFDGLIFVHSGIYTDEWIYIESPITMIGAAPGKVADKVIIENTRDSTFVFMEGSEDAYVGYMTIRFNPDDKSAQHHNAHHCLEITVNCSPIIDHCIIRSTCTVGSAVCVSGQGACPTIKHCNISDCENVGLYITDHAQGIYEDNEISNNALAGIWVKNHGNPIIRRNHIHHGRDVGVFTFDHGMGYFESCNIHRNRIAGFEVKAYANPTVVRCEIHHGQTGGIYVHEKGRGQFIENKIYANNFAGVWITSNSDPTIRGNSIFNGNQGGVYIFGDGRGLIEGNDIYGNALAGIQIRTNSCPIVRHNKIHDGQHGGIYVHEKGQGVIEENEVYSNTLAGVWVTTGSTPVLRRNRIHSGKQVGVYFYDNGHGVLEDNDIYNHMYSGVQIR

SEQ ID NO: 44946 - protein, 734 aa, Homo sapiens
MKDQSLRKLQQEMDSLTFRNLQLAKRVELLQDELALSEPRGKKNKKSGESSSQLSQEQKSVFDEDLQKKIEENERLHIQFFEADEQHKHVEAELRSRLATLETEAAQHQAVVDGLTRKYMETIEKLQNDKAKLEVKSQTLEKEAKECRLRTEECQLQLKTLHEDLSGRLEESLSIINEKVPFNDTKYSQYNALNVPLHNRRHQLKMRDIAGQALAFVQDLVTALLNFHTYTEQRIQIFPVDSAIDTISPLNQKFSQYLHENASYVRPLEEGMLHLFESITEDTVTVLETTVKLKTFSEHLTSYICFLRKILPYQLKSLEEECESSLCTSALRARNLELSQDMKKMTAVFEKLQTYIALLALPSTEPDGLLRTNYSSVLTNVGAALHGFHDVMKDISKHYSQKAAIEHELPTATQKLITTNDCILSSVVALTNGAGKIASFFSNNLDYFIASLSYGPKAASGFISPLSAECMLQYKKKAAAYMKSLRKPLLESVPYEEALANRRILLSSTESREGLAQQVQQSLEKISKLEQEKEHWMLEAQLAKIKLEKENQRIADKLKNTGSAQLVGLAQENAAVSNTAGQDEATAKAVLEPIQSTSLIGTLTRTSDSEVPDVESREDLIKNHYMARIVELTSQLQLADSKSVHFYAECRALSKRLALAEKSKEALTEEMKLASQNISRLQDELTTTKRSYEDQLSMMSDHLCSMNETLSKQREEIDTLKMSSKGNSKKNKSR

SEQ ID NO: 44947 - protein, 2061 aa, Homo sapiens
MRIHCLENVDKALQFLKEQRVHLENMGSHDIVDGNHRLTLGLIWTIILRFQIQDISVETEDNKEKKSAKDALLLWCQMKTAGYPNVNIHNFTTSWRDGMAFNALIHKHRPDLIDFDKLKKSNAHYNLQNAFNLAEQHLGLTKLLDPEDISVDHPDEKSIITYVVTYYHYFSKMKALAVEGKRIGKVLDNAIETEKMIEKYESLASDLLEWIEQTIIILNNRKFANSLVGVQQQLQAFNTYRTVEKPPKFTEKGNLEVLLFTIQSKMRANNQKVYMPREGKLISDINKAWERLEKAEHERELALRNELIRQEKLEQLARRFDRKAAMRETWLSENQRLVSQDNFGFDLPAVEAATKKHEAIETDIAAYEERVQAVVAVARELEAENYHDIKRITARKDNVIRLWEYLLELLRARRQRLEMNLGLQKIFQEMLYIMDWMDEMKVLVLSQDYGKHLLGVEDLLQKHTLVEADIGIQAERVRGVNASAQKFATDGEGYKPCDPQVIRDRVAHMEFCYQELCQLAAERRARLEESRRLWKFFWEMAEEEGWIREKEKILSSDDYGKDLTSVMRLLSKHRAFEDEMSGRSGHFEQAIKEGEDMIAEEHFGSEKIRERIIYIREQWANLEQLSAIRKKRLEEASLLHQFQADADDIDAWMLDILKIVSSSDVGHDEYSTQSLVKKHKDVAEEIANYRPTLDTLHEQASALPQEHAESPDVRGRLSGIEERYKEVAELTRLRKQALQDTLALYKMFSEADACELWIDEKEQWLNNMQIPEKLEDLEVIQHRFESLEPEMNNQASRVAVVNQIARQLMHSGHPSEKEIKAQQDKLNTRWSQFRELVDRKKDALLSALSIQNYHLECNETKSWIREKTKVIESTQDLGNDLAGVMALQRKLTGMERDLVAIEAKLSDLQKEAEKLESEHPDQAQAILSRLAEISDVWEEMKTTLKNREASLGEASKLQQFLRDLDDFQSWLSRTQTAIASEDMPNTLTEAEKLLTQHENIKNEIDNYEEDYQKMRDMGEMVTQGQTDAQYMFLRQRLQALDTGWNELHKMWENRQNLLSQSHAYQQFLRDTKQAEAFLNNQEYVLAHTEMPTTLEGAEAAIKKQEDFMTTMDANEEKINAVVETGRRLVSDGNINSDRIQEKVDSIDDRHRKNRETASELLMRLKDNRDLQKFLQDCQELSLWINEKMLTAQDMSYDEARNLHSKWLKHQAFMAELASNKEWLDKIEKEGMQLISEKPETEAVVKEKLTGLHKMWEVLESTTQTKAQRLFDANKAELFTQSCADLDKWLHGLESQIQSDDYGKDLTSVNILLKKQQMLENQMEVRKKEIEELQSQAQALSQEGKSTDEVDSKRLTVQTKFMELLEPLNERKHNLLASKEIHQFNRDVEDEILWVGERMPLATSTDHGHNLQTVQLLIKKNQTLQKEIQGHQPRIDDIFERSQNIVTDSSSLSAEAIRQRLADLKQLWGLLIEETEKRHRRLEEAHRAQQYYFDAAEAEAWMSEQELYMMSEEKAKDEQSAVSMLKKHQILEQAVEDYAETVHQLSKTSRALVADSHPESERISMRQSKVDKLYAGLKDLAEERRGKLDERHRLFQLNREVDDLEQWIAEREVVAGSHELGQDYEHVTMLQERFREFARDTGNIGQERVDTVNHLADELINSGHSDAATIAEWKDGLNEAWADLLELIDTRTQILAASYELHKFYHDAKEIFGRIQDKHKKLPEELGRDQNTVETLQRMHTTFEHDIQALGTQVRQLQEDAARLQAAYAGDKADDIQKRENEVLEAWKSLLDACESRRVRLVDTGDKFRFFSMVRDLMLWMEDVIRQIEAQEKPRDVSSVELLMNNHQGIKAEIDARNDSFTTCIELGKSLLARKHYASEEIKEKLLQLTEKRKEMIDKWEDRWEWLRLILEVHQFSRDASVAEAWLLGQEPYLSSREIGQSVDEVEKLIKRHEAFEKSAATWDERFSALERLTTLELLEVRRQQEEEERKRRPPSPEPSTKVSEEAESQQQWDTSKGEQVSQNGLPAEQGSPRVSYRSQTYQNYKNFNSRRTASDQPWSGL

SEQ ID NO: 44948 - protein, 581 aa, Homo sapiens
MKLKWSKLKQDKVRKNKDAVRRPQADPALLTPRSPVVTIMGHVDHGKTTLLDKFRKTQVAAVETGGITQHIGAFLVSLPSGEKITFLDTPGHAAFSAMRARGAQVTDIVVLVVAADDGVMKQTVESIQHAKDAQVPIILAVNKCDKAEADPEKVKKELLAYDVVCEDYGGDVQAVPVSALTGDNLMALAEATVALAEMLELKADPNGPVEGTVIESFTDKGRGLVTTAIIQRGTLRKGSVLVAGKCWAKVRLMFDENGKTIDEAYPSMPVGITGWRDLPSAGEEILEVESEPRAREVVDWRKYEQEQEKGQEDLKIIEEKRKEHKEAHQKAREKYGHLLWKKRSILRFLERKEQIPLKPKEKRERDSNVLSVIIKGDVDGSVEAILNIIDTYDASHECELELVHFGVGDVSANDVNLAETFDGVIYGFNVNAGNVIQQSAAKKGVKIKLHKIIYRLVEDLQEELSSRLPCAVEEHPVGEASILATFSVTEGKKKVPVAGCRVQKGQLEKQKKFKLTRNGHVIWKGSLTSLKHHKDDISIVKTGMDCGLSLDEDNMEFQVGDRIVCYEEKQIQAKTSWDPGF

SEQ ID NO: 44949 - protein, 1830 aa, Homo sapiens
MTSPLVTWVKTFGPLAAGNGTNLDEYVALVDGVFLNQVMLQINPKLESQRVNKKVNNDASLRMHNLSILVRQIKFYYQETLQQLIMMSLPNVLIIGKNPFSEQGTEEVKKLLLLLLGCAVQCQKKEEFIERIQGLDFDTKAAVAAHIQEVTHNQENVFDLQWMEVTDMSQEDIEPLLKNMALHLKRLIDERDEHSETIIELSEERDGLHFLPHASSSAQSPCGSPGMKRTESRQHLSVELADAKAKIRRLRQELEEKTEQLLDCKQELEQMEIELKRLQQENMNLLSDARSARMYRDELDALREKAVRVDKLESEVSRYKERLHDIEFYKARVEELKEDNQVLLETKTMLEDQLEGTRARSDKLHELEKENLQLKAKLHDMEMERDMDRKKIEELMEENMTLEMAQKQSMDESLHLGWELEQISRTSELSEAPQKSLGHEVNELTSSRLLKLEMENQSLTKTVEELRTTVDSVEGNASKILKMEKENQRLSKKVEILENEIVQEKQSLQNCQNLSKDLMKEKAQLEKTIETLRENSERQIKILEQENEHLNQTVSSLRQRSQISAEARVKDIEKENKILHESIKETSSKLSKIEFEKRQIKKELEHYKEKGERAEELENELHHLEKENELLQKKITNLKITCEKIEALEQENSELERENRKLKKTLDSFKNLTFQLESLEKENSQLDEENLELRRNVESLKCASMKMAQLQLENKELESEKEQLKKGLELLKASFKKTERLEVSYQGLDIENQRLQKTLENSNKKIQQLESELQDLEMENQTLQKNLEELKISSKRLEQLEKENKSLEQETSQLEKDKKQLEKENKRLRQQAEIKDTTLEENNVKIGNLEKENKTLSKEIGIYKESCVRLKELEKENKELVKRATIDIKTLVTLREDLVSEKLKTQQMNNDLEKLTHELEKIGLNKERLLHDEQSTDDSRYKLLESKLESTLKKSLEIKEEKIAALEARLEESTNYNQQLRQELKTVKKNYEALKQRQDEERMVQSSPPISGEDNKWERESQETTRELLKVKDRLIEVERNNATLQAEKQALKTQLKQLETQNNNLQAQILALQRQTVSLQEQNTTLQTQNAKLQVENSTLNSQSTSLMNQNAQLLIQQSSLENENESVIKEREDLKSLYDSLIKDHEKLELLHERQASEYESLISKHGTLKSAHKNLEVEHRDLEDRYNQLLKQKGQLEDLEKMLKVEQEKMLLENKNHETVAAEYKKLCGENDRLNHTYSQLLKETEVLQTDHKNLKSLLNNSKLEQTRLEAEFSKLKEQYQQLDITSTKLNNQCELLSQLKGNLEEENRHLLDQIQTLMLQNRTLLEQNMESKDLFHVEQRQYIDKLNELRRQKEKLEEKIMDQYKFYDPSPPRRRGNWITLKMRKLIKSKKDINRERQKSLTLTPTRSDSSEGFLQLPHQDSQDSSSVGSNSLEDGQTLGTKKSSTMNDLVQSMVLAGQWTGSTENLEVPDDISTGKRRKELGAMAFSTTAINFSTVNSSAGFRSKQLVNNKDTTSFEDISPQGVSDDSSTGSRVHASRPASLDSGRTSTSNSNNNASLHEVKAGAVNNQSRPQSHSSGEFSLLHDHEAWSSSGSSPIQYLKRQTRSSPVLQHKISETLESRHHKIKTGSPGSEVVTLQQFLEESNKLTSVQIKSSSQENLLDEVMKSLSVSSDFLGKDKPVSCGLARSVSGKTPGDFYDRRTTKPEFLRPGPRKTEDTYFISSAGKPTPGTQGKIKLVKESSLSRQSKDSNPYATLPRASSVISTAEGTTRRTSIHDFLTKDSRLPISVDSPPAAADSNTTAASNVDKVQESRNSKSRSREQQSS

SEQ ID NO: 44950 - protein, 1858 aa, Homo sapiens
MTSPLVTWVKTFGPLAAGNGTNLDEYVALVDGVFLNQVMLQINPKLESQRVNKKVNNDASLRMHNLSILVRQIKFYYQETLQQLIMMSLPNVLIIGKNPFSEQGTEEVKKLLLLLLGCAVQCQKKEEFIERIQGLDFDTKAAVAAHIQEVTHNQENVFDLQWMEVTDMSQEDIEPLLKNMALHLKRLIDERDEHSETIIELSEERDGLHFLPHASSSAQSPCGSPGMKRTESRQHLSVELADAKAKIRRLRQELEEKTEQLLDCKQELEQMEIELKRLQQENMNLLSDARSARMYRDELDALREKAVRVDKLESEVSRYKERLHDIEFYKARVEELKEDNQVLLETKTMLEDQLEGTRARSDKLHELEKENLQLKAKLHDMEMERDMDRKKIEELMEENMTLEMAQKQSMDESLHLGWELEQISRTSELSEAPQKSLGHEVNELTSSRLLKLEMENQSLTKTVEELRTTVDSVEGNASKILKMEKENQRLSKKVEILENEIVQEKQSLQNCQNLSKDLMKEKAQLEKTIETLRENSERQIKILEQENEHLNQTVSSLRQRSQISAEARVKDIEKENKILHESIKETSSKLSKIEFEKRQIKKELEHYKEKGERAEELENELHHLEKENELLQKKITNLKITCEKIEALEQENSELERENRKLKKTLDSFKNLTFQLESLEKENSQLDEENLELRRNVESLKCASMKMAQLQLENKELESEKEQLKKGLELLKASFKKTERLEVSYQGLDIENQRLQKTLENSNKKIQQLESELQDLEMENQTLQKNLEELKISSKRLEQLEKENKSLEQETSQLEKDKKQLEKENKRLRQQAEIKDTTLEENNVKIGNLEKENKTLSKEIGIYKESCVRLKELEKENKELVKRATIDIKTLVTLREDLVSEKLKTQQMNNDLEKLTHELEKIGLNKERLLHDEQSTDDSRYKLLESKLESTLKKSLEIKEEKIAALEARLEESTNYNQQLRQELKTVKKNYEALKQRQDEERMVQSSPPISGEDNKWERESQETTRELLKVKDRLIEVERNNATLQAEKQALKTQLKQLETQNNNLQAQILALQRQTVSLQEQNTTLQTQNAKLQVENSTLNSQSTSLMNQNAQLLIQQSSLENENESVIKEREDLKSLYDSLIKDHEKLELLHERQASEYESLISKHGTLKSAHKNLEVEHRDLEDRYNQLLKQKGQLEDLEKMLKVEQEKMLLENKNHETVAAEYKKLCGENDRLNHTYSQLLKETEVLQTDHKNLKSLLNNSKLEQTRLEAEFSKLKEQYQQLDITSTKLNNQCELLSQLKGNLEEENRHLLDQIQTLMLQNRTLLEQNMESKDLFHVEQRQYIDKLNELRRQKEKLEEKIMDQYKFYDPSPPRRRGNWITLKMRKLIKSKKDINRERQKSLTLTPTRSDSSEGFLQLPHQDSQDSSSVGSNSLEDGQTLGTKKSSMVALKRLPFLRNRPKDKDKMKACYRRSMSMNDLVQSMVLAGQWTGSTENLEVPDDISTGKRRKELGAMAFSTTAINFSTVNSSAGFRSKQLVNNKDTTSFEDISPQGVSDDSSTGSRVHASRPASLDSGRTSTSNSNNNASLHEVKAGAVNNQSRPQSHSSGEFSLLHDHEAWSSSGSSPIQYLKRQTRSSPVLQHKISETLESRHHKIKTGSPGSEVVTLQQFLEESNKLTSVQIKSSSQENLLDEVMKSLSVSSDFLGKDKPVSCGLARSVSGKTPGDFYDRRTTKPEFLRPGPRKTEDTYFISSAGKPTPGTQGKIKLVKESSLSRQSKDSNPYATLPRASSVISTAEGTTRRTSIHDFLTKDSRLPISVDSPPAAADSNTTAASNVDKVQESRNSKSRSREQQSS

SEQ ID NO: 44951 - protein, 692 aa, Homo sapiens
MKPFGVFEDEEELNHRLVVLGKLNNLVKEWISDVSESKNLPPSVVATVGGKIFTFGSYRLGVHTKGADIDALCVAPRHVERSDFFQSFFEKLKHQDGIRNLRAVEDAFVPVIKFEFDGIEIDLVFARLAIQTISDNLDLRDDSRLRSLDIRCIRSLNGCRVTDEILHLVPNKETFRLTLRAVKLWAKRRGIYSNMLGFLGGVSWAMLVARTCQLYPNAAASTLVHKFFLVFSKWEWPNPVLLKQPEESNLNLPVWDPRVNPSDRYHLMPIITPAYPQQNSTYNVSTSTRTVMVEEFKQGLAVTDEILQGKSDWSKLLEPPNFFQKYRHYIVLTASASTEENHLEWVGLVESKIRVLVGNLERNEFITLAHVNPQSFPGNKEHHKDNNYVSMWFLGIIFRRVENAESVNIDLTYDIQSFTDTVYRQANNINMLKEGMKIEATHVKKKQLHHYLPAEILQKKKKQSLSDVNRSSGGLQSKRLSLDSSCLDSSRDTDNGTPFNSPASKSDSPSVGETERNSAEPAAVIVEKPLSVPPAQGLSIPVIGAKVDSTVKTVSPPTVCTIPTVVGRNVIPRITTPHNPAQGQPHLNGMSNITKTVTPKRSHSPSIDGTPKRLKDVEKFIRLESTFKDPRTAEERKRKSVDAIGGESMPIPTIDTSRKKRLPSKELPDSSSPVPANNIRVIKNSIRLTLNR

SEQ ID NO: 44952 - protein, 3347 aa, Homo sapiens
MNDVEVPLHLLRYVCLFCGKNGLSLMKDCFEYGTPETLPFLIAHAFITVVSNIRIWLHIPAVMQHIIPFRTYVIRYLCKLSDQELRQSAARNMADLMWSTVKEPLDTTLCFDKESLDLAFKYFMSPTLTMRLAGLSQITNQLHTFNDVCNNESLVSDTETSIAKELADWLISNNVVEHIFGPNLHIEIIKQCQVILNFLAAEGRLSTQHIDCIWAAAQLKHCSRYIHDLFPSLIKNLDPVPLRHLLNLVSALEPSVHTEQTLYLASMLIKALWNNALAAKAQLSKQSSFASLLNTNIPIGNKKEEEELRRTAPSPWSPAASPQSSDNSDTHQSGGSDIEMDEQLINRTKHVQQRLSDTEESMQGSSDETANSGEDGSSGPGSSSGHSDGSSNEVNSSHASQSAGSPGSEVQSEDIADIEALKEEDEDDDHGHNPPKSSCGTDLRNRKLESQAGICLGDSQGMSERNGTSSGTGKDLVFNTESLPSVDNRMRMLDACSHSEDPEHDISGEMNATHIAQGSQESCITRTGDFLGETIGNELFNCRQFIGPQHHHHHHHHHHHHDGHMVDDMLSADDVSCSSSQVSAKSEKNMADFDGEESGCEEELVQINSHAELTSHLQQHLPNLASIYHEHLSQGPVVHKHQFNSNAVTDINLDNVCKKGNTLLWDIVQDEDAVNLSEGLINEAEKLLCSLVCWFTDRQIRMRFIEGCLENLGNNRSVVISLRLLPKLFGTFQQFGSSYDTHWITMWAEKELNMMKLFFDNLVYYIQTVREGRQKHALYSHSAEVQVRLQFLTCVFSTLGSPDHFRLSLEQVDILWHCLVEDSECYDDALHWFLNQVRSKDQHAMGMETYKHLFLEKMPQLKPETISMTGLNLFQHLCNLARLATSAYDGCSNSELCGMDQFWGIALRAQSGDVSRAAIQYINSYYINGKTGLEKEQEFISKCMESLMIASSSLEQESHSSLMVIERGLLMLKTHLEAFRRRFAYHLRQWQIEGTGISSHLKALSDKQSLPLRVVCQPAGLPDKMTIEMYPSDQVADLRAEVTHWYENLQKEQINQQAQLQEFGQSNRKGEFPGGLMGPVRMISSGHELTTDYDEKALHELGFKDMQMVFVSLGAPRRERKGEGVQLPASCLPPPQKDNIPMLLLLQEPHLTTLFDLLEMLASFKPPSGKVAVDDSESLRCEELHLHAENLSRRVWELLMLLPTCPNMLMAFQNISDEQSNDGFNWKELLKIKSAHKLLYALEIIEALGKPNRRIRRESTGSYSDLYPDSDDSSEDQVENSKNSWSCKFVAAGGLQQLLEIFNSGILEPKEQESWTVWQLDCLACLLKLICQFAVDPSDLDLAYHDVFAWSGIAESHRKRTWPGKSRKAAGDHAKGLHIPRLTEVFLVLVQGTSLIQRLMSVAYTYDNLAPRVLKAQSDHRSRHEVSHYSMWLLVSWAHCCSLVKSSLADSDHLQDWLKKLTLLIPETAVRHESCSGLYKLSLSGLDGGDSINRSFLLLAASTLLKFLPDAQALKPIRIDDYEEEPILKPGCKEYFWLLCKLVDNIHIKDASQTTLLDLDALARHLADCIRSREILDHQDGNVEDDGLTGLLRLATSVVKHKPPFKFSREGQEFLRDIFNLLFLLPSLKDRQQPKCKSHSSRAAAYDLLVEMVKGSVENYRLIHNWVMAQHMQSHAPYKWDYWPHEDVRAECRFVGLTNLGATCYLASTIQQLYMIPEARQAVFTAKYSEDMKHKTTLLELQKMFTYLMESECKAYNPRPFCKTYTMDKQPLNTGEQKDMTEFFTDLITKIEEMSPELKNTVKSLFGGVITNNVVSLDCEHVSQTAEEFYTVRCQVADMKNIYESLDEVTIKDTLEGDNMYTCSHCGKKVRAEKRACFKKLPRILSFNTMRYTFNMVTMMKEKVNTHFSFPLRLDMTPYTEDFLMGKSERKEGFKEVSDHSKDSESYEYDLIGVTVHTGTADGGHYYSFIRDIVNPHAYKNNKWYLFNDAEVKPFDSAQLASECFGGEMTTKTYDSVTDKFMDFSFEKTHSAYMLFYKRMEPEEENGREYKFDVSSELLEWIWHDNMQFLQDKNIFEHTYFGFMWQLCSCIPSTLPDPKAVSLMTAKLSTSFVLETFIHSKEKPTMLQWIELLTKQFNNSQAACEWFLDRMADDDWWPMQILIKCPNQIVRQMFQRLCIHVIQRLRPVHAHLYLQPGMEDGSDDMDTSVEDIGGRSCVTRFVRTLLLIMEHGVKPHSKHLTEYFAFLYEFAKMGEEESQFLLSLQAISTMVHFYMGTKGPENPQVEVLSEEEGEEEEEEEDILSLAEEKYRPAALEKMIALVALLVEQSRSERHLTLSQTDMAALTGGKGFPFLFQHIRDGINIRQTCNLIFSLCRYNNRLAEHIVSMLFTSIAKLTPEAANPFFKLLTMLMEFAGGPPGMPPFASYILQRIWEVIEYNPSQCLDWLAVQTPRNKLAHSWVLQNMENWVERFLLAHNYPRVRTSAAYLLVSLIPSNSFRQMFRSTRSLHIPTRDLPLSPDTTVVLHQVYNVLLGLLSRAKLYVDAAVHGTTKLVPYFSFMTYCLISKTEKLMFSTYFMDLWNLFQPKLSEPAIATNHNKQALLSFWYNVCADCPENIRLIVQNPVVTKNIAFNYILADHDDQDVVLFNRGMLPAYYGILRLCCEQSPAFTRQLASHQNIQWAFKNLTPHASQYPGAVEELFNLMQLFIAQRPDMREEELEDIKQFKKTTISCYLRCLDGRSCWTTLISAFRILLESDEDRLLVVFNRGLILMTESFNTLHMMYHEATACHVTGDLVELLSIFLSVLKSTRPYLQRKDVKQALIQWQERIEFAHKLLTLLNSYSPPELRNACIDVLKELVLLSPHDFLHTLVPFLQHNHCTYHHSNIPMSLGPYFPCRENIKLIGGKSNIRPPRPELNMCLLPTMVETSKGKDDVYDRMLLDYFFSYHQFIHLLCRVAINCEKFTETLVKLSVLVAYEGLPLHLALFPKLWTELCQTQSAMSKNCIKLLCEDPVFAEYIKCILMDERTFLNNNIVYTFMTHFLLKVQSQVFSEANCANLISTLITNLISQYQNLQSDFSNRVEISKASASLNGDLRALALLLSVHTPKQLNPALIPTLQELLSKCRTCLQQRNSLQEQEAKERKTKDDEGATPIKRRRVSSDEEHTVDSCISDMKTETREVLTPTSTSDNETRDSSIIDPGTEQDLPSPENSSVKEYRMEVPSSFSEDMSNIRSQHAEEQSNNGRYDDCKEFKDLHCSKDSTLAEEESEFPSTSISAVLSDLADLRSCDGQALPSQDPEVALSLSCGHSRGLFSHMQQHDILDTLCRTIESTIHVVTRISGKGNQAAS

SEQ ID NO: 44953 - protein, 1161 aa, Homo sapiens
MTAKLSTSFVLETFIHSKEKPTMLQWIELLTKQFNNSQAACEWFLDRMADDDWWPMQILIKCPNQIVRQMFQRLCIHVIQRLRPVHAHLYLQPGMEDGSDDMDTSVEDIGGRSCVTRFVRTLLLIMEHGVKPHSKHLTEYFAFLYEFAKMGEEESQFLLSLQAISTMVHFYMGTKGPENPQVEVLSEEEGEEEEEEEDILSLAEEKYRPAALEKMIALVALLVEQSRSERHLTLSQTDMAALTGGKGFPFLFQHIRDGINIRQTCNLIFSLCRYNNRLAEHIVSMLFTSIAKLTPEAANPFFKLLTMLMEFAGGPPGMPPFASYILQRIWEVIEYNPSQCLDWLAVQTPRNKLAHSWVLQNMENWVERFLLAHNYPRVRTSAAYLLVSLIPSNSFRQMFRSTRSLHIPTRDLPLSPDTTVVLHQVYNVLLGLLSRAKLYVDAAVHGTTKLVPYFSFMTYCLISKTEKLMFSTYFMDLWNLFQPKLSEPAIATNHNKQALLSFWYNVCADCPENIRLIVQNPVVTKNIAFNYILADHDDQDVVLFNRGMLPAYYGILRLCCEQSPAFTRQLASHQNIQWAFKNLTPHASQYPGAVEELFNLMQLFIAQRPDMREEELEDIKQFKKTTISCYLRCLDGRSCWTTLISAFRILLESDEDRLLVVFNRGLILMTESFNTLHMMYHEATACHVTGDLVELLSIFLSVLKSTRPYLQRKDVKQALIQWQERIEFAHKLLTLLNSYSPPELRNACIDVLKELVLLSPHDFLHTLVPFLQHNHCTYHHSNIPSVLVAYEGLPLHLALFPKLWTELCQTQSAMSKNCIKLLCEDPVFAEYIKCILMDERTFLNNNIVYTFMTHFLLKVQSQVFSEANCANLISTLITNLISQYQNLQSDFSNRVEISKASASLNGDLRALALLLSVHTPKQLNPALIPTLQELLSKCRTCLQQRNSLQEQEAKERKTKDDEGATPIKRRRVSSDEEHTVDSCISDMKTETREVLTPTSTSDNETRDSSIIDPGTEQDLPSPENSSVKEYRMEVPSSFSEDMSNIRSQHAEEQSNNGRYDDCKEFKDLHCSKDSTLAEEESEFPSTSISAVLSDLADLRSCDGQALPSQDPEVALSLSCGHSRGLFSHMQQHDILDTLCRTIESTIHVVTRISGKGNQAAS

SEQ ID NO: 44954 - protein, 124 aa, Homo sapiens
MDFNQLEAFLTAQTKKQGGITSDQAAVISKFWKSHKTKIRESLMNQSRWNSGLRGLSWRVDGKSQSRHSAQIHTPVAIIELELGKYGQESEFLCLEFDEVKVNQILKTLSEVEESISTLISQPN

SEQ ID NO: 44955 - protein, 322 aa, Homo sapiens [sequence omitted]

SEQ ID NO: 44956 - protein, 106 aa, Homo sapiens
MASVWKRLQRVGKHASKFQFVASYQELMVECTKKWQPDKLVVVWTRRSRRKSSKAHSWQPGIKNPYRGVVVWPVPENIEITVTLFKDPHAEEFEDKEWTFVIENVS

SEQ ID NO: 44957 - protein, 551 aa, Homo sapiens
MSFCLTELHLWSLKNTLHIADRDIGIYQYYDKKDPPATEHGNLEKKQKLAESRDYPWTLKNRRPEKLRDSLKELEELMQNSRCVLSKWKNKYVCQLLFGSGVLVSLSLSGPQLEKVVIDRSLVGKLISDTISDALLTDSFIILSFLAQNKLCFIQFTKKMESSDVNKRLEKLSALDYKIFYYEIPGPINKTTERHLAINCVHDRVVCWWPLVNDDAWPWAPISSEKDRANLLLLGYAQGRLEVLSSVRTEWDPLDVRFGTKQPYQVFTVEHSVSVDKEPMADSCIYECIRNKIQCVSVTRIPLKSKAISCCRNVTEDKLILGCEDSSLILYETHRRVTLLAQTELLPSLISCHPSGAILLVGSNQGELQIFDMALSPINIQLLAEDRLPRETLQFSKLFDASSSLVQMQWIAPQVVSQKGEGSDIYDLLFLRFERGPLGVLLFKLGVFTRGQLGLIDIIFQYIHCDEIYEAINILSSMNWDTLGHQCFISMSAIVNHLLRQKLTPEREAQLETSLGTFYAPTRPLLDSTILEYRDQISKYARRFFHHLLSE

SEQ ID NO: 44958 - protein, 811 aa, Homo sapiens [sequence omitted]

SEQ ID NO: 44959 - protein, 131 aa, Homo sapiens
MLEPTKEPLKPLSAAEKIASIGQTATMSPDMNTCTSDQFQESLPPVQFDWSSSGLTNPLDGVDPELYELTTSKLEISTSSLKVTDAFARLMSTVEKTSTSTRKPKREEHLSEEAIKVIAGLPDLTFMHAKV

SEQ ID NO: 44960 - protein, 328 aa, Homo sapiens
MLEVNYPMENGIVRNWDDMKHLWDYTFGPEKLNIDTRNCKILLTEPPMNPTKNREKIVEVMFETYQFSGVYVAIQAVLTLYAQGLLTGVVVDSGDGVTHICPVYEGFSLPHLTRRLDIAGRDITRYLIKLLLLRGYAFNHSADFETVRMIKEKLCYVGYNIEQEQKLALETTVLVESYTLPDGRIIKVGGERFEAPEALFQPHLINVEGVGVAELLFNTIQAADIDTRSEFYKHIVLSGGSTMYPGLPSRLERELKQLYLERVLKGDVEKLSKFKIRIEDPPRRKHMVFLGGAVLADIMKDKDNFWMTRQEYQEKGVRVLEKLGVTVR

SEQ ID NO: 44961 - protein, 377 aa, Homo sapiens
MDGVGIPSTMYGDPHAARSMQPVHHLNHGPPLHSHQYPHTAHTNAMAPSMGSSVNDALKRDKDAIYGHPLFPLLALIFEKCELATCTPREPGVAGGDVCSSESFNEDIAVFAKQIRAEKPLFSSNPELDNLMIQAIQVLRFHLLELEKVHELCDNFCHRYISCLKGKMPIDLVIDDREGGSKSDSEDITRSANLTDQPSWNRDHDDTASTRSGGTPGPSSGGHTSHSGDNSSEQGDGLDNSVASPSTGDDDDPDKDKKRHKKRGIFPKVATNIMRAWLFQHLTHPYPSEEQKKQLAQDTGLTILQVNNWFINARRRIVQPMIDQSNRAVSQGTPYNPDGQPMGGFVMDGQQHMGIRAPGPMSGMGMNMGMEGQWHYM

SEQ ID NO: 44962 - protein, 57 aa, Homo sapiens
MKAALQVSMNDGLSFISSSVIITTTHCDGLWFYIQSLETVKDHRNIRVRNSDLKYCL

SEQ ID NO: 44963 - protein, 603 aa, Homo sapiens [sequence omitted]

SEQ ID NO: 44964 - protein, 547 aa, Homo sapiens
MDLDIEFDVHLGIAHTRWATHGEPSPVNSHPQRSDKNNEFIVIHNGIITNYKDLKKFLESKGYDFESETDTETIAKLVKYMYDNRESQDTSFTTLVERVIQQLEGAFALVFKSVHFPGQAVGTRRGSPLLIGVRSEHKLSTDHIPILYRTGKDKKGSCNLSRVDSTTCLFPVEEKAVEYYFASDASAVIEHTNRVIFLEDDDVAAVVDGRLSIHRIKRTAGDHPGRAVQTLQMELQQIMKGNFSSFMQKEIFEQPESVVNTMRGRVNFDDYTVNLGGLKDHIKEIQRCRRLILIACGTSYHAGVATRQVLEELTELPVMVELASDFLDRNTPVFRDDVCFFLSQSGETADTLMGLRYCKERGALTVGITNTVGSSISRETDCGVHINAGPEIGVASTKAYTSQFVSLVMFALMMCDDRISMQERRKEIMLGLKRLPDLIKEVLSMDDEIQKLATELYHQKSVLIMGRGYHYATCLEGALGRPVVICDKEDTETIKNTKRTIKVPHSVDCLQGILSVIPLQLLAFHLAVLRGYDVDFPRNLAKSVTVE

SEQ ID NO: 44965 - protein, 216 aa, Homo sapiens
MDIFSKAPFVSKSSMAPSQPEESDVFLRAPFTKKKSMEELTVIQCTSQELPAQTGLLSQTGDVPLPAGRERAVYTSVQAQYSTAGFVQQSNLLSHSVQAADHLDSISPRGSCLESGGHSNDRNKGPQLQKEAVSGPMAGKPFRPQSLSKYSRHYSPEDEPSPEAQPIAAYKIVSQTNKQSIAGSVSITSLSSRTTELPAADPFALAPFPSKSGKKP

SEQ ID NO: 44966 - protein, 53 aa, Homo sapiens
MMKLMGFASFDSTKGKKVDGSVNAYAINVSQKRKYRQYMNRKGGFNRPLDFIA

SEQ ID NO: 44967 - protein, 337 aa, Homo sapiens
MHGKEVGSIIGKKGESVKRIREESGARINISEGNCPERIITLTGPTNAIFKAFAMIIDKLEEDINSSMTNSTAASRPPVTLRLVVPATQCGSLIGKGGCKIKEIRESTGAQVQVAGDMLPNSTERAITIAGVPQSVTECVKQICLVMLETLSQSPQGRVMTIPYQPMPASSPVICAGGQDRCSDAAGYPHATHDLEGPPLDAYSIQGQHTISPLDLAKLNQVARQQSHFAMMHGGTGFAGIDSSSPEVKGYWASLDASTQTTHELTIPNNLIGCIIGRQGANINEIRQMSGAQIKIANPVEGSSGRQVTITGSAASISLAQYLINARLSSEKGMGCS

SEQ ID NO: 44968 - protein, 381 aa, Homo sapiens
MPKTLYVGNLSRDVTEALILQLFSQIGPCKNCKMIMDTAGNDPYCFVEFHEHRHAAAALAAMNGRKIMGKEVKVNWATTPSSQKKDTSSSTVVSTQRSQDHFHVFVGDLSPEITTEDIKAAFAPFGRISDARVVKDMATGKSKGYGFVSFFNKWDAENAIQQMGGQWLGGRQIRTNWATRKPPAPKSTYESNTKQLSYDEVVNQSSPSNCTVYCGGVTSGLTEQLMRQTFSPFGQIMEIRVFPDKGYSFVRFNSHESAAHAIVSVNGTTIEGHVVKCYWGKETLDMINPVQQNQIGYPQPYGQWGQWYGNAQQIGQYMPNGWQVPAYGMYGQAWNQQGFNQTQSSAPWMGPNYGVQPPQGQNGSMLPNQPSGYRVAGYETQ

SEQ ID NO: 44969 - protein, 382 aa, Homo sapiens [sequence omitted]

SEQ ID NO: 44970 - protein, 210 aa, Homo sapiens [sequence omitted]

SEQ ID NO: 44971 - protein, 140 aa, Homo sapiens
MPKTLYVGNLSRDVTEALILQLFSQIGPCKNCKMIMDTAGNDPYCFVEFHEHRHAAAALAAMNGRKIMGKEVKVNWATTPSSQKKDTSSSTVVSTQRSQDHFHVFVGDLSPEITTEDIKAAFAPFGRISVSLKNGQNCPG

SEQ ID NO: 44972 - protein, 762 aa, Homo sapiens
MEKLETRIRNHDREIEKMCNFHYQGFVDSITELLKVRGEAQKLKNQVTDTNRKLQHEGKELVIAMEELKQCRLQQRNISATVDKLMLCLPVLEMYSKLRDQMKTKRHYPALKTLEHLEHTYLPQVSHYRFCKVMVDNIPKLREEIKDVSMSDLKDFLESIRKHSDKIGETAMKQAQQQRNLDNIVLQQPRIGSKRKSKKDAYIIFDTEIESTSPKSEQDSGILDVEDEEDDEEVPGAQDLVDFSPVYRCLHIYSVLGARETFENYYRKQRRKQARLVLQPPSNMHETLDGYRKYFNQIVGFFVVEDHILHTTQGLVNRAYIDELWEMALSKTIAALRTHSSYCSDPNLVLDLKNLIVLFADTLQVYGFPVNQLFDMLLEIRDQYSETLLKKWAGIFRNILDSDNYSPIPVTSEEMYKKVVGQFPFQDIELEKQPFPKKFPFSEFVPKVYNQIKEFIYACLKFSEDLHLSSTEVDDMIRKSTNLLLTRTLSNSLQNVIKRKNIGLTELVQIIINTTHLEKSCKYLEEFITNITNVLPETVHTTKLYGTTTFKDARHAAEEEIYTNLNQKIDQFLQLADYDWMTGDLGNKASDYLVDLIAFLRSTFAVFTHLPGKVAQTACMSACKHLATSLMQLLLEAEVRQLTLGALQQFNLDVRECEQFARSGPVPGFQEDTLQLAFIDLRQLLDLFIQWDWSTYLADYGQPNCKYLRVNPVTALTLLEKMKDTSRKNNMFAQFRKNERDKQKLIDTVAKQLRGLISSHHS

SEQ ID NO: 44973 - protein, 766 aa, Homo sapiens
MEKLETRIRNHDREIEKMCNFHYQGFVDSITELLKVRGEAQKLKNQVTDTNRKLQHEGKELVIAMEELKQCRLQQRNISATVDKLMLCLPVLEMYSKLRDQMKTKRHYPALKTLEHLEHTYLPQVSHYRFCKVMVDNIPKLREEIKDVSMSDLKDFLESIRKHSDKIGETAMKQAQQQRNLDNIVLQQPRIGSKRKSKKDAYIIFDTEIESTSPKSEQDSGILDVEDEEDDEEVPGAQDLVDFSPVYRCLHIYSVLGARETFENYYRKQRRKQARLVLQPPSNMHETLDGYRKYFNQIVGFFVVEDHILHTTQGLVNRAYIDELWEMALSKTIAALRTHSSYCSDPNLVLDLKNLIVLFADTLQVYGFPVNQLFDMLLEIRDQYSETLLKKWAGIFRNILDSDNYSPIPVTSEEMYKKVVGQFPFQDIELEKQPFPKKFPFSEFVPKVYNQIKEFIYACLKFSEDLHLSSTEVDDMIRKSTNLLLTRTLSNSLQNVIKRKNIGLTELVQIIINTTHLEKSCKYLEEFITNITNVLPETVHTTKLYGTTTFKDARHAAEEEIYTNLNQKIDQFLQLADYDWMTGDLGNKASDYLVDLIAFLRSTFAVFTHLPGKVAQTACMSACKHLATSLMQLLLEAEVRQLTLGALQQFNLDVRECEQFARSGPVPGFQEDTLQLAFIDLRQLLDLFIQWDWSTYLADYGQPNCKYLRVNPVTALTLLEKISREMKDTSRKNNMFAQFRKNERDKQKLIDTVAKQLRGLISSHHS

SEQ ID NO: 44974 - protein, 103 aa, Homo sapiens
MEGGLGRAVCLLTGASRGFGRTLAPLLASLLSPGSVLVLSARNDEALRQLEAELGAERSGLRVVRVPADLGAEAGLQQLLGALRELPRPKGLQRLLLINNAAS

SEQ ID NO: 44975 - protein, 541 aa, Homo sapiens
MHRSLIGVDKFLGQATVALDEVFGAGRAQHTQWYKLHSKPGKKEKERGEIEVTIQFTRNNLSASMFDLSMKDKPRSPFSKIRDKMKGKKKYDLESASAILPSSAIEDPDLGSLGKMGKAKGFFLRNKLRKSSLTQSNTSLGSDSTLSSASGSLAYQGPGAELLTRSPSRSSWLSTEGGRDSAQSPKLFTHKRTYSDEANQMRVAPPRALLDLQGHLDAASRSSLCVNGSHIYNEEPQGPVRHRSSISGSLPSSGSLQAVSSRFSEEGPRSTDDTWPRGSRSNSSSEAVLGQEELSAQAKVLAPGASHPGEEEGARLPEGKPVQVATPIVASSEAVAEKEGARKEERKPRMGLFHHHHQGLSRSELGRRSSLGEKGGPILGASPHHSSSGEEKAKSSWFGLREAKDPTQKPSPHPVKPLSAAPVEGSPDRKQSRSSLSIALSSGLEKLKTVTSGSIQPVTQAPQAGQMVDTKRLKDSAVLDQSAKYYHLTHDELISLLLQRERELSQRDEHVQELESYIDRLLVRIMETSPTLLQIPPGPPK

SEQ ID NO: 44976 - protein, 1212 aa, Homo sapiens
MHRSLIGVDKFLGQATVALDEVFGAGRAQHTQWYKLHSKPGKKEKERGEIEVTIQFTRNNLSASMFDLSMKDKPRSPFSKIRDKMKGKKKYDLESASAILPSSAIEDPDLGSLGKMGKAKGFFLRNKLRKSSLTQSNTSLGSDSTLSSASGSLAYQGPGAELLTRSPSRSSWLSTEGGRDSAQSPKLFTHKRTYSDEANQMRVAPPRALLDLQGHLDAASRSSLCVNGSHIYNEEPQGPVRHRSSISGSLPSSGSLQAVSSRFSEEGPRSTDDTWPRGSRSNSSSEAVLGQEELSAQAKVLAPGASHPGEEEGARLPEGKPVQVATPIVASSEAVAEKEGARKEERKPRMGLFHHHHQGLSRSELGRRSSLGEKGGPILGASPHHSSSGEEKAKSSWFGLREAKDPTQKPSLDVSPQVESDPAALPHHLPCSPWAPAPPTPAPTAAPMLSTNLFAAASPAAATAAAAATTAAPEATPPGLLGLTNPFLTSLQSNPFFEELIADIALNSPSPAPSLPSASRASPTPLASPGKALPEWDNTFNVFAASRLRPEARSEILAPAGVGLEAAGLQDPGPGAMTAKAAEPQGEPGGGGGGGGGGGGRGGSSVWLEPRVPLDLGPNHQSASAADPGLLGSVGAGLPSSSAQLQLRASGSEPDRELPAPEVEAGQSPADSGTSLFSSPEVISVWERLPGPESAAEGQDDESSRGENQLCPDVETADDAWPWDVVTISPAAETASLVFRGESDEPAPQVQPESPETVSPKGSEGLPPPEPEPKPEWVSDKGLQPSTPPPKPPRLFTPSRSQEEEEEKAAVGLSNRGPETEGEDASPSALVVGPPETKEEGEKRESEESDSCSSATLLGQPGLEELVEDASPPVSGPCLSAPASCPEGPAPIPCHSKSLALQSQHIWGTPEVGEGPEAPEAQGQDPVGEGLGSLSATSQQADVWVSKEDALNPFLFQGSRDPPSLSSASPPGSRESSIHSGPEELPTPPEPDFPPPPLPPWASHHRGGPSPPCSPLSEAWPLTTSSAPPGEPALLPGPHEPSPPGGSPALLREDLAAATPASPLVLLPLETRPAEEPQPSASPHPVKPLSAAPVEGSPDRKQSRSSLSIALSSGLEKLKTVTSGSIQPVTQAPQAGQMVDTKRLKDSAVLDQSAKYYHLTHDELISLLLQRERELSQRDEHVQELESYIDRLLVRIMETSPTLLQIPPGPPK

SEQ ID NO: 44977 - protein, 142 aa, Homo sapiens
MEGTIDGSLINPTVIVDPFQILVAANKAVHLYKLGKMKTRTLSTEIIFNLSPNNNISEALKKFGISANDTSILIVYIEEGEKQINQEYLISQVEGHQVSLKNLPEIMNITEVKKIYKLSSQEESIGTLLDAIICRMSTKDVL

SEQ ID NO: 44978 - protein, 124 aa, Homo sapiens
MEGTIDGSLINPTVIVDPFQILVAANKAVHLYKLGKMKTRTLSTEIIFNLSPNNNISEALKKFGISANDTSILIVYIEEGEKQINQEYLISQVEGHQVSLKNLPEIMNITEVKKVCQSIFLERV

SEQ ID NO: 44979 - protein, 106 aa, Homo sapiens
MEGTIDGSLINPTVFHSCCPGWSAMARSWLTATSASRVQAIVLPQPPELLGLQIVDPFQILVAANKAVHLYKLGKMKTRTLSTEIIFNLSPNNNVMCTFLFLLTVS

SEQ ID NO: 44980 - protein, 46 aa, Homo sapiens
MAKSPLEGVSSSRGLHAGRGPRRLSIEGNIGNILKQIRMRAPIQET

SEQ ID NO: 44981 - protein, 35 aa, Homo sapiens
MNIPVLVLDVNDDFSEEVTKQEDLMREVNTFVKNL

SEQ ID NO: 44982 - protein, 171 aa, Homo sapiens
MLPEGEDLNEWIAVNTVDFFNQINMLYGTITEFCTEASCPVMSAGPRYEYHWADGTNIKKPIKCSAPKYIDYLMTWVQDQLDDETLFPSKIGVPFPKNFMSVAKTILKRLFRVYAHIYHQHFDSVMQLQEEAHLNTSFKHFIFFVQEFNLIDRRELAPLQELIEKLGSKDR

SEQ ID NO: 44983 - protein, 239 aa, Homo sapiens [sequence omitted]

SEQ ID NO: 44984 - protein, 27 aa, Homo sapiens
MLTAFASHIRARDAAGSGDKPGADTGR

SEQ ID NO: 44985 - protein, 560 aa, Homo sapiens
MQLRALGREPASPGLSSQLAELLFALPAYHTLQRKALSHVPGAARPFPTSRVLRLLTGERGCQVASRLDEALQGSALRDQLRRRCQEEGDLLPGLLGLVGGVAGSASCGLGLGGAGALWSQYWTLLWAACAQSLDLNLGPWRDPRATAQQLSQALGQASLPQECEKELASLCHRLLHQSLIWSWDQGFCQALGSALGGQSSLPTSSGTAELLQQLFPPLLDALREPRLRRIFCQPAGLCTLQTTLLWFLGRAQQYLAAWDPASFLLLIQKDLPPLLHEAEALYSLASEESLALEVEQQLGLEIQKLTAQIQLLPEESLSVFSQECHKQAMQGFKLYMPRGRYWRLRLCPEPPSAPSEYAGLVVRTVLEPVLQGLQGLPPQAQAPALGQALTAIVGAWLDHILTHGIRFSLQGALQLKQDFGVVRELLEEEQWSLSPDLRQTLLMLSIFQQLDGALLCLLQQPLPKSQVHRRPPCCCACQEVQTTKLPSSCLNSLESLEPPLQPGTSPAQTGQLQSTLGGRGPSPEGYLVGNQQAWLALRQHQRPRWHLPFFSCLGTSPES

SEQ ID NO: 44986 - protein, 538 aa, Homo sapiens
MLGFPSEKRVNAAFYRLLAQRQQHSFGLHGVACVGTEAHLSLCSLEFYRANDTARCPGGGPAVVSCVPGPVYAASSGQKKQQQSKPQGEARVRLKGGAHPGEGRVEVLKASTWGTVCDRKWDLHAASVVCRELGFGSAREALSGARMGQGMGAIHLSEVRCSGQELSLWKCPHKNITAEDCSHSQDAGVRCNLPYTGAETRIRLSGGRSQHEGRVEVQIGGPGPLRWGLICGDDWGTLEAMVACRQLGLGYANHGLQETWYWDSGNITEVVMSGVRCTGTELSLDQCAHHGTHITCKRTGTRFTAGVICSETASDLLLHSALVQETAYIEDRPLHMLYCAAEENCLASSARSANWPYGHRRLLRFSSQIHNLGRADFRPKAGRHSWVWHECHGHYHSMDIFTHYDILTPNGTKVAEGHKASFCLEDTECQEDVSKRYECANFGEQGITVGCWDLYRHDIDCQWIDITDVKPGNYILQVVINPNFEVAESDFTNNAMKCNCKYDGHRIWVHNCHIGDAFSEEANRRFERYPGQTSNQII

SEQ ID NO: 44987 - protein, 476 aa, Homo sapiens [sequence omitted]

SEQ ID NO: 44988 - protein, 280 aa, Homo sapiens
MGLGRSFQAARTLLPPPASIACRVHAGPVRQQSTGPSEPGAFQPPPKPVIVDKHRPVEPERRFLSPEFIPRRGRTDPLKFQIERKDMLERRKVLHIPEFYVGSILRVTTADPYASGKISQFLGICIQRSGRGLGATFILRNVIEGQGVEICFELYNPRVQEIQVVKLEKRLDDSLLYLRDALPEYSTFDVNMKPVVQEPNQKVPVNELKVKMKPKPWSKRWERPNFNIKGIRFDLCLTEQQMKEAQKWNQPWLEFDMMREYDTSKIEAAIWKEIEASKRS

SEQ ID NO: 44989 - protein, 612 aa, Homo sapiens
MKRESEDDPESEPDDHEKRIPFTLRPQTLRQRMAEESISRNEETSEESQEDEKQDTWEQQQMRKAVKIIEERDIDLSCGNGSSKVKKFDTSISFPPVNLEIIKKQLNTRLTLLQETHRSHLREYEKYVQDVKSSKSTIQNLESSSNQALNCKFYKSMKIYVENLIDCLNEKIINIQEIESSMHALLLKQAMTFMKRRQDELKHESTYLQQLSRKDETSTSGNFSVDEKTQWILEEIESRRTKRRQARVLSGNCNHQEGTSSDDELPSAEMIDFQKSQGDILQKQKKVFEEVQDDFCNIQNILLKFQQWREKFPDSYYEAFISLCIPKLLNPLIRVQLIDWNPLKLESTGLKEMPWFKSVEEFMDSSVEDSKKESSSDKKVLSAIINKTIIPRLTDFVEFLWDPLSTSQTTSLITHCRVILEEHSTCENEVSKSRQDLLKSIVSRMKKAVEDDVFIPLYPKSAVENKTSPHSKFQERQFWSGLKLFRNILLWNGLLTDDTLQELGLGKLLNRYLIIALLNATPGPDVVKKCNQVAACLPEKWFENSAMRTSIPQLENFIQFLLQSAHKLSRSEFRDEVEEIILILVKIKALNQAESFIGEHHLDHLKSLIKED

SEQ ID NO: 44990 - protein, 402 aa, Homo sapiens
MLPQGENLQDVLPRDIYCRLKRHLEYVKLMMPLWMTPDQRGKGLYADYLFNAIAGNWERKRPVWVMLMVNSLTEVDIKSRGVPVLDLFLAQEAERLRKQTGAVEKVEEQCHPLNGLNFSQVIFALNQTLLQQESLRAGSLQIPYTTEDLIKHYNCGDLSSVILSHDSSQVPNFINATLPPQERITAQEIDSYLRRELIYKRNERIGKRVKALLEEFPDKGFFFAFGAGHFMGNNTVLDVLRREGYEVEHAPAGRPIHKGKSKKTSTRPTLSTIFAPKVPTLEVPAPEAVSSGHSTLPPLVSRPGSADTPSEAEQRFRKKRRRSQRRPRLRQFSDLWVRLEESDIVPQLQVPVLDRHISTELRLPRRGHSHHSQMVASSACLSLWTPVFWVLVLAFQTETPLL

SEQ ID NO: 44991 - protein, 211 aa, Homo sapiens
MHFTSSSTGGLSSSQSSYSPSNREAMDPIAELLSQLSGVRRSAGGQLNSSGPSASQLQQLQMQLQLERQHAQAARQQLETARNATRRTNTSSVTTTITQSTATTNIANTESSQQTLQNSQFLLTRLNDPKMSETERQSMESERADRSLFVQELLLSTLVREESSSSDEDDRGEMADFGAMGCVDIMPLDVALENLNLKESNKGNEPPPPPL

SEQ ID NO: 44992 - protein, 242 aa, Homo sapiens [sequence omitted]

SEQ ID NO: 44993 - protein, 332 aa, Homo sapiens [sequence omitted]

SEQ ID NO: 44994 - protein, 684 aa, Homo sapiens [sequence omitted]

SEQ ID NO: 44995 - protein, 97 aa, Homo sapiens [sequence omitted]

SEQ ID NO: 44996 - protein, 187 aa, Homo sapiens
MSPSSVALICLLRYGQLLEQSRHSWVNTTALITGCTNAAGLLVVGNFQVDHARSLHYVGAGVAFPAGLLFVCLHCALSYQGATAPLDLAVAYLRSVLAVIAFITLVLSGVFFVHESSQLQHGAALCEWVCVIDILIFYGTFSYEFGAVSSDTLVAALQPTPGRACKSSGSSSTSTHLNCAPESIAMI

SEQ ID NO: 44997 - protein, 187 aa, Homo sapiens
MGAFMVALICLLRYGQLLEQSRHSWVNTTALITGCTNAAGLLVVGNFQVDHARSLHYVGAGVAFPAGLLFVCLHCALSYQGATAPLDLAVAYLRSVLAVIAFITLVLSGVFFVHESSQLQHGAALCEWVCVIDILIFYGTFSYEFGAVSSDTLVAALQPTPGRACKSSGSSSTSTHLNCAPESIAMI

SEQ ID NO: 44998 - protein, 296 aa, Homo sapiens
MFLLVQRFGELMRKLWNPRNFKAHVSPHEMLQAVVLCSKKTFQITKQGDGVDFLSWFLNALHSALGGTKKKKKTIVTDVFQGSMRIFTKKLPHPDLPAEEKEQLLHNDEYQETMVESTFMYLTLDLPTAPLYKDEKEQLIIPQVPLFNILAKFNGITEKEYKTYKENFLKRFQLTKLPPYLIFCIKRFTKNNFFVEKNPTIVNFPITNVDLREYLSEEVQAVHKNTTYDLIANIVHDGKPSEGSYRIHVLHHGTGKWYELQDLQVTDILPQMITLSEAYIQIWKRRDNDETNQQGA

SEQ ID NO: 44999 - protein, 104 aa, Homo sapiens
MPPDAQPTASQGRIGARLPPSPLRPHPANPRLLRTLPSAWWGGESSAPDSLRPQGPLSSCRNSLPKIGQRHRRKWGGETPQRKATPLLCDFCSSCCLSPISSQR

SEQ ID NO: 45000 - protein, 670 aa, Homo sapiens
MVLGPAAYNVPLPKKSIQSGPLKISSVSEVMKESKQPASQLQKQKGDTPASATAPTEAAQIISAAGDTLSVPAPAVQPEESLKTDHPEIGEGKPTPALSEASSSSIRERPPEEVAARLAQQEKQEQVKIESLAKSLEDALRQTASVTLQAIAAQNAAVQAVNAHSNILKAAMDNSEIAGEKKSAQWRTVEGALKERRKAVDEAADALLKAKEELEKMKSVIENAKKKEVAGAKPHITAAEGKLHNMIVDLDNVVKKVQAAQSEAKVVSQYHELVVQARDDFKRELDSITPEVLPGWKGMSVSDLADKLSTDDLNSLIAHAHRRIDQLNRELAEQKATEKQHITLALEKQKLEEKRAFDSAVAKALEHHRSEIQAEQDRKIEEVRDAMENEMRTQLRRQAAAHTDHLRDVLRVQEQELKSEFEQNLSEKLSEQELQFRRLSQEQVDNFTLDINTAYARLRGIEQAVQSHAVAEEEARKAHQLWLSVEALKYSMKTSSAETPTIPLGSAVEAIKANCSDNEFTQALTAAIPPESLTRGVYSEETLRARFYAVQKLARRVAMIDETRNSLYQYFLSYLQSLLLFPPQQLKPPPELCPEDINTFKLLSYASYCIEHGDLELAAKFVNQLKGESRRVAQDWLKEARMTLETKQIVEILTAYASAVGIGTTQVQPE

SEQ ID NO: 45001 - protein, 682 aa, Homo sapiens
MSTIEPHRQVAWKRAVKGVREMCDVCDTTIFNLHWVCPRCGFGVCVDCYRMKRKNCQQGAAYKTFSWLKCVKSQIHEPENLMPTQIIPGKALYDVGDIVHSVRAKWGIKANCPCSNRQFKLFSKPASKEDLKQTSLAGEKPTLGAVLQQNPSVLEPAAVGGEAASKPAGSMKPACPASTSPLNWLADLTSGNVNKENKEKQPTMPILKNEIKCLPPLPPLSKSSTVLHTFNSTILTPVSNNNSGFLRNLLNSSTGKTENGLKNTPKILDDIFASLVQNKTTSDLSKRPQGLTIKPSILGFDTPHYWLCDNRLLCLQDPNNKSNWNVFRECWKQGQPVMVSGVHHKLNSELWKPESFRKEFGEQEVDLVNCRTNEIITGATVGDFWDGFEDVPNRLKNEKEPMVLKLKDWPPGEDFRDMMPSRFDDLMANIPLPEYTRRDGKLNLASRLPNYFVRPDLGPKMYNAYGLITPEDRKYGTTNLHLDVSDAANVMVYVGIPKGQCEQEEEVLKTIQDGDSDELTIKRFIEGKEKPGALWHIYAAKDTEKIREFLKKVSEEQGQENPADHDPIHDQSWYLDRSLRKRLHQEYGVQGWAIVQFLGDVVFIPAGAPHQVHNLYSCIKVAEDFVSPEHVKHCFWLTQEFRYLSQTHTNHEDKLQVKNVIYHAVKDAVAMLKASESSFGKP

SEQ ID NO: 45002 - protein, 270 aa, Homo sapiens
MVEHFFRQGMLDVAEELCQESGLSVDPSQKEPFVELNRILEALKVRVLRPALEWAVSNREMLIAQNSSLEFKLHRLYFISLLMGGTTNQREALQYAKNFQPFALNHQKDIQVLMGSLVYLRQGIENSPYVHLLDANQWADICDIFTRDACALLGLSVESPLSVSFSAGCVALPALINIKAVIEQRQCTGVWNQKDELPIEVDLGKKCWYHSIFACPILRQQTTDNNPPMKLVCGHIISRDALNKMFNGSKLKCPYCPMEQSPGDAKQIFF

SEQ ID NO: 45003 - protein, 202 aa, Homo sapiens [sequence omitted]

SEQ ID NO: 45004 - protein, 198 aa, Homo sapiens
MEDSSDSELELSTVRHQPEGLDQLQAQTKFTKKELQSLYRGFKNECPTGLVDEDTFKLIYAQFFPQGDATTYAHFLFNAFDADGNGAIHFEDFVVGLSILLRGTVHEKLKWAFNLYDINKDGYITKEEMLAIMKSIYDMMGRHTYPILREDAPAEHVERFFEKMDRNQDGVVTIEEFLEACQKDENIMSSMQLFENVI

SEQ ID NO: 45005 - protein, 201 aa, Homo sapiens
MDKFVGLGVFVDTYPNEEKQQERVFPYISAMVNNGSLSYDHERDGRPTELGGCTAIVRNLHYDTFLVIRYVKRHLTIMMDIDGKHEWRDCIEVPGVRLPRGYYFGTSSITGDLSDNHDVISLKLFELTVERTPEEEKLHRDVFLPSVDNMKLPEMTAPLPPLSGLALFLIVFFSLVFSVFAIVIGIILYNKWQEQSRKRFY

SEQ ID NO: 45006 - protein, 631 aa, Homo sapiens [sequence omitted]

SEQ ID NO: 45007 - protein, 271 aa, Homo sapiens
MQFRKVTKDLETRVIRWFDYLWANKKTVDEKEVLKSLPDKLKAEIAINVHLDTLKKVRIFQDCEAGLLVELVLKLRPTVFSPGDYICKKGDIGKEMYIINEGKLAVVADDGVTQFVVLSDGSYFGEISILNIKGSKSGNRRTANIRSIGYSDLFCLSKDDLMEALTEYPEAKKALEEKGRQILMKDNLIDEELARAGADPKDLEEKVEQLGSSLDTLQTRFARLLAEYNATQMKMKQRLSQLESQVKGGGDKPLADGEVPGDATKTEDKQQ

SEQ ID NO: 45008 - protein, 779 aa, Homo sapiens
MVLPVDESLTEALGIRSKYASLRKDTLLKSVFGGAICRMYRFPTTDGNHLRILEQMAESVLSLHVPRQFVKLLLEEDAARVCELEELGELSPCWESLRRQIVTQYQTIILTYQENLTDLHQYRGPSFKASSLKADKKLEFVPTNLHIQRMRVQDDGGSDQNYDIVTIGAPAAHCQGFKSGGLRKKLHKFEETKKHTSSGCQSIIYIPQDVVRAKEIIAQINTLKTQVSYYAERLSRAAKDRSATGLERTLAILADKTRQLVTVCDCKLLANSIHGLNAARPDYIASKASPTSTEEEQVMLRNDQDTLMARWTGRNSRSSLQVDWHEEEWEKVWLNVDKSLECIIQRVDKLLQKERLHGEGCEDVFPCAGSCTSKKGNPDSHAYWIRPEDPFCDVPSSPCPSTMPSTACHPHLTTHCSPPPEESSPGEWSEALYPLLTTLTDCVAMMSDKAKKAMVFLLMQDSAPTIATYLSLQYRRDVVFCQTLTALICGFIIKLRNCLHDDGFLRQLYTIGLLAQFESLLSTYGEELAMLEDMSLGIMDLRNVTFKVTQATSSASADMLPVITGNRDGFNVRVPLPGPLFDALPREIQSGMLLRVQPVLFNVGINEQQTLAERFGDTSLQEVINVESLVRLNSYFEQFKEVLPEDCLPRSRSQTCLPELLRFLGQNVHARKNKNVDILWQAAEICRRLNGVRFTSCKSAKDRTAMSVTLEQCLILQHEHGMAPQVFTQALECMRSEGCRRENTMKNVGSRKYAFNSLQLKAFPKHYRPPEGTYGKVET

SEQ ID NO: 45009 - protein, 216 aa, Homo sapiens [sequence omitted]

SEQ ID NO: 45010 - protein, 74 aa, Homo sapiens
MLGLEKAHTPQVHKNIPSVNAKLKVVKHLIRIKPLKLPQGLPAEENMSNTCLKSTGELVVQWHLKPVEQKAHES

SEQ ID NO: 45011 - protein, 35 aa, Homo sapiens [sequence omitted]

SEQ ID NO: 45012 - protein, 1088 aa, Homo sapiens [sequence omitted]

SEQ ID NO: 45013 - protein, 941 aa, Homo sapiens
MVNSVASRLSPAFSQEEDKAEKSSTDFRDCTLQQLQQSTRNTDALRNPHRTNSFSLSPLHSNTKINGAHHSTVQGPSSTKSTSSVSTFSKAAPSVPSKPSDCNFISNFYSHSRLHHISMWKCELTEFVNTLQRQSNGIFPGREKLKKMKTGRSALVVTDTGDMSVLNSPRHQSCIMHVDMDCFFVSVGIRNRPDLKGKPVAVTSNRGTGRAPLRPGANPQLEWQYYQNKILKGKADIPDSSLWENPDSAQANGIDSVLSRAEIASCSYEARQLGIKNGMFFGHAKQLCPNLQAVPYDFHAYKEVAQTLYETLASYTHNIEAVSCDEALVDITEILAETKLTPDEFANAVRMEIKDQTKCAASVGIGSNILLARMATRKAKPDGQYHLKPEEVDDFIRGQLVTNLPGVGHSMESKLASLGIKTCGDLQYMTMAKLQKEFGPKTGQMLYRFCRGLDDRPVRTEKERKSVSAEINYGIRFTQPKEAEAFLLSLSEEIQRRLEATGMKGKRLTLKIMVRKPGAPVETAKFGGHGICDNIARTVTLDQATDNAKIIGKAMLNMFHTMKLNISDMRGVGIHVNQLVPTNLNPSTCPSRPSVQSSHFPSGSYSVRDVFQVQKAKKSTEEEHKEVFRAAVDLEISSASRTCTFLPPFPAHLPTSPDTNKAESSGKWNGLHTPVSVQSRLNLSIEVPSPSQLDQSVLEALPPDLREQVEQVCAVQQAESHGDKKKEPVNGCNTGILPQPVGTVLLQIPEPQESNSDAGINLIALPAFSQVDPEVFAALPAELQRELKAAYDQRQRQGENSTHQQSASASVPKNPLLHLKAAVKEKKRNKKKKTIGSPKRIQSPLNNKLLNSPAKTLPGACGSPQKLIDGFLKHEGPPAEKPLEELSASTSGVPGLSSLQSDPAGCVRPPAPNLAGAVEFNDVKTLLREWITTISGWLGLC

SEQ ID NO: 45014 - protein, 310 aa, Homo sapiens
MPEVRKLPEEKHIPEELKPTGKELPDSQLVQPLVYMERLELIRNVCRDDALKNLSHTPVSKFVLDRIFVCDKHKILFCQTPKVGNTQWKKVLIVLNGAFSSIEEIPENVVHDHEKNGLPRLSSFSDAEIQKRLKTYFKFFIVRDPFERLISAFKDKFVHNPRFEPWYRHEIAPGIIRKYRRNRTETRGIQFEDFVRYLGDPNHRWLDLQFGDHIIHWVTYVELCAPCEIMYSVIGHHETLEDDAPYILKEAGIDHLVSYPTIPPGITVYNRTKVEHYFLGISKRDIRRLYARFEGDFKLFGYQKPDFLLN

SEQ ID NO: 45015 - protein, 334 aa, Homo sapiens
MEVDLGSQIQLICNVTGQLSDIAYWKWNGSVIDEDDPVLGEDYYSVENPANKRRSTLITVLNISEIESRFYKHPFTCFAKNTHGIDAAYIQLIYPVTNFQKHMIGICVTLTVIIVCSVFIYKIFKIDIVLWYRDSCYDFLPIKASDGKTYDAYILYPKTVGEGSTSDCDIFVFKVLPEVLEKQCGYKLFIYGRDDYVGEDIVEVINENVKKSRRLIIILVRETSGFSWLGGSSEEQIAMYNALVQDGIKVVLLELEKIQDYEKMPESIKFIKQKHGAIRWSGDFTQGPQSAKTRFWKNVRYHMPVQRRSPSSKHQLLSPATKEKLQREAHVPLG

SEQ ID NO: 45016 - protein, 549 aa, Homo sapiens [sequence omitted]

SEQ ID NO: 45017 - protein, 15 aa, Homo sapiens
MCGDLHCRMPVTHLE

SEQ ID NO: 45018 - protein, 305 aa, Homo sapiens
MGEDPETFTQEDIDRAIAYLFPSGLFEKRARPVMKHPEQIFPRQRAIQWGEDGRPFHYLFYTGKQSYYSLMHDVYGMLLNLEKHQSHLQAKSLLPEKTVTRDVIGSRWLIKEELEEMLVEKLSDLDYMQFIRLLEKLLTSQCGAAEEEFVQRFRRSVTLESKKQLIEPVQYDEQGMAFSKSEGKRKTAKAEAIVYKHGSGRIKVNGIDYQLYFPITQDREQLMFPFHFVDRLGKHDVTCTVSGGGRSAQAGAIRLAMAKALCSFVTEDEVEWMRQAGLLTTDPRVRERKKPGQEGARRKFTWKKR

SEQ ID NO: 45019 - protein, 757 aa, Homo sapiens
MLNLEPVPSGARIKGAATFALNENPVSGDPFCVEVCIISVKRRTIQMFLVYEDRVQIVKEVSTAEQPLAVAVDGHFLCLALTTQYIIHNYSTGVSQDLFPYCSEERPPIVKRIGRQEFLLAGPGGLGMFATVAGISQRAPVHWSENVIGAAVSFPYVIALDDEFITVHSMLDQQQKQTLPFKEGHILQDFEGRVIVATSKGVYILVPLPLEKQIQDLLASRRVEEALVLAKGARRNIPKEKFQVMYRRILQQAGFIQFAQLQFLEAKELFRSGQLDVRELISLYPFLLPTSSSFTRSHPPLHEYADLNQLTQGDQEKMAKCKRFLMSYLNEVRSTEVANGYKEDIDTALLKLYAEADHDSLLDLLVTENFCLLTDSAAWLEKHKKYFALGLLYHYNNQDAAAVQLWVNIVNGDVQDSTRSDLYEYIVDFLTYCLDEELVWAYADWVLQKSEEVGVQVFTKRPLDEQQKNSFNPDDIINCLKKYPKALVKYLEHLVIDKRLQKEEYHTHLAVLYLEEVLLQRASASGKGAEATETQAKLRRLLQKSDLYRVHFLLERLQGAGLPMESAILHGKLGEHEKALHILVHELQDFAAAEDYCLWCSEGRDPPHRQQLFHTLLAIYLHAGPTAHELAVAAVDLLNRHATEFDAAQVLQMLPDTWSVQLLCPFLMGAMRDSIHARRTMQVALGLARSENLIYTYDKMKLKGSSIQLSDKKLCQICQNPFCEPVFVRYPNGGLVHTHCAASRHTNPSSSSPGTRT

SEQ ID NO: 45020 - protein, 412 aa, Homo sapiens
MSGHVGFESLPDQLVNRSIQQGFCFNILCVGETGIGKSTLIDTLFNTNFEDYESSHFCPNVKLKAQTYELQESNVQLKLTIVNTVGFGDQINKEESYQPIVDYIDAQFEAYLQEELKIKRSLFTYHDSRIHVCLYFISPTGHSLKTLDLLTMKNLDSKVNIIPVIAKADTVSKTELQKFKIKLMSELVSNGVQIYQFPTDDDTIAKVNAAMNGQLPFAVVGSMDEVKVGNKMVKARQYPWGVVQVENENHCDFVKLREMLICTNMEDLREQTHTRHYELYRRCKLEEMGFTDVGPENKPVSVQETYEAKRHEFHGERQRKEEEMKQMFVQRVKEKEAILKEAERELQAKFEHLKRLHQEERMKLEEKRRLLEEEIIAFSKKKATSEIFHSQSFLATGSNLRKDKDRKNSNFL

SEQ ID NO: 45021 - protein, 254 aa, Homo sapiens
MLSASDGKWDSLEGLLTCEPGLLVKRDFITGFTCLHWAAKHGRQELLAMLVNFANKHQLPVNIDARTSGGYTALHLAAMHGHVEVVKLLVGAYDADVDIRDYSGKKASQYLSRSIAEEIKNLVGALDEGDGESAAGSGGGRWRLSKVLPSHLITYKLSHALEDGGDHHHHHHSAEGWVGGKAKDPGRKASGSSSGRIKPRLNKIRFRTQIVHTTPSFRDPEQPLEGRGEEGVGEERPVKGHSPFTLRPKSNVFG

SEQ ID NO: 45022 - protein, 367 aa, Homo sapiens
MWDATEGTIRSRPSRISLILTLWSCKMIPLPGMSIQVLSRHVRLCLFDGNKVLSNIHTVRATWQPKKPKTWTFSPQVTRILPCLLDGDCFIRSNSASPDLGILFELGISYIRNSTGERGELSCGWVFLKLFDASGVPIPAKTYELFLNGGTPYEKGIEVDPSISRRAHGSVFYQIMTMRRQPQLLVKLRSLNRRSRNVLSLLPETLIGNMCSIHLLIFYRQILGDVLLKDRMSLQSTDLISHPMLATFPMLLEQPDVMDALRSSWAGKESTLKRSEKRDKEFLKSTFLLVYHDCVLPLLHSTRLPPFRWAEEETETARWKVITDFLKQNQENQGALQALLSPDGVHEPFDLSEQTYDFLGEMRKNAV

SEQ ID NO: 45023 - protein, 65 aa, Homo sapiens
MRQAEPADMRPEIWIAQELRRIGDEFNAYYARRVFLNNYQAAEDHPRMVILRLLRYIVRLVWRMH

SEQ ID NO: 45024 - protein, 389 aa, Homo sapiens [sequence omitted]

SEQ ID NO: 45025 - protein, 382 aa, Homo sapiens
MKSRLAALQNSVGRVGPDALPVSCPALNTPADGRKFGSKYLVDHEVHFTCNPGFRLVGPSSVVCLPNGTWTGEQPHCRGISECSSQPCQNGGTCVEGVNQYRCICPPGRTGNRCQHQAQTAAPEGSVAGDSAFSRAPRCAQVERAQHCSCEAGFHLSGAAGDSVCQDVNECELYGQEGRPRLCMHACVNTPGSYRCTCPGGYRTLADGKSCEDVDECVGLQPVCPQGTTCINTGGSFQCVSPECPEGSGNVSYVKTSPFQCERNPCPMDSRPCRHLPKTISFHYLSLPSNLKTPITLFRMATASAPGRAGPNSLRFGIVGGNSRGHFVMQRSDRQTGDLILVQNLEGPQTLEVDVDMSEYLDRSFQANHVSKVTIFVSPYDF

SEQ ID NO: 45026 - protein, 991 aa, Homo sapiens [sequence omitted]

SEQ ID NO: 45027 - protein, 338 aa, Homo sapiens [sequence omitted]

SEQ ID NO: 45028 - protein, 78 aa, Homo sapiens
MLPPCTGSSRARPSSQGERWWGPRCPDTHPTSPPADRAAMPPLPSQAWWQEVNTLAMPMATPPTPPTARPGASPTPAC

SEQ ID NO: 45029 - protein, 254 aa, Homo sapiens
MVPPRRHRGAGRPGVLSSSPPFRLRSAKFSGIALEDLRRALKTRLQMVCVFVMNRMNSQNSGFTQRRRMALGIVILLLVDVIWVASSELTSYVFTQYNKPFFSTFAKTSMFVLYLLGFIIWKPWRQQCTRGLRGKHAAFFADAEGYFAACTTDTTMNSSLSEPLYVPVKFHDLPSEKPESTNIDTEKTPKKSRVRFSNIMEIRQLPSSHALEAKLSRMSYPVKEQESILKTVGKLTATQVAKISFFFCFVVGLL

SEQ ID NO: 45030 - protein, 610 aa, Homo sapiens
MNVGLSETQNGGMSQEAVGNIKVTKSPQKSTVLTNGEAAMQSSNSESKKKKKKKRKMVNDAEPDTKKAKTENKGKSEEESAETTKETENNVEKPDNDEDESEVPSLPLGLTGAFEDTSFASLCNLVNENTLKAIKEMGFTNMTEIQHKSIRPLLEGRDLLAAAKTGSGKTLAFLIPAVELIVKLRFMPRNGTGVLILSPTRELAMQTFGVLKELMTHHVHTYGLIMGGSNRSAEAQKLGNGINIIVATPGRLLDHMQNTPGFMYKNLQCLVIDEADRILDVGFEEELKQIIKLLPTRRQTMLFSATQTRKVEDLARISLKKEPLYVGVDDDKANATVDGLEQGYVVCPSEKRFLLLFTFLKKNRKKKLMVFFSSCMSVKYHYELLNYIDLPVLAIHGKQKQNKRTTTFFQFCNADSGTLLCTDVAARGLDIPEVDWIVQYDPPDDPKEYIHRVGRTARGLNGRGHALLILRPEELGFLRYLKQSKVPLSEFDFSWSKISDIQSQLEKLIEKNYFLHKSAQEAYKSYIRAYDSHSLKQIFNVNNLNLPQVALSFGFKVPPFVDLNVNSNEGKQKKRGGGGGFGYQKTKKVEKSKIFKHISKKSSDSRQFSH

SEQ ID NO: 45031 - protein, 575 aa, Homo sapiens
MTWCITTCNFDVDVDLLFQENSTIGQKIALSEKIVSVLPRMKCPHQLEPHQIQGMDFIHIFPVVQWLVKRAIETKEEMGDYIRSYSVSQFQKTYSLPEDDDFIKRKEKAIKTVVDLSEVYKPRRKYKRHQGAEELLDEESRIHATLLEYGRRYGFSRQSKMEKAEDKKTALPAGLSATEKADAHEEDELRAAEEQRIQSLMTKMTAMANEESRLTASSVGQIVGLCSAEIKQIVSEYAEKQSELSAEESPEKLGTSQLHRRKVISLNKQIAQKTKHLEELRASHTSLQARYNEAKKTLTELKTYSEKLDKEQAALEKIESKADPSILQNLRALVAMNENLKSQEQEFKAHCREEMTRLQQEIENLKAERAPRGDEKTLSSGEPPGTLTSAMTHDEDLDRRYNMEKEKLYKIRLLQARRNREIAILHRKIDEVPSRAELIQYQKRFIELYRQISAVHKETKQFFTLYNTLDDKKVYLEKEISLLNSIHENFSQAMASPAARDQFLRQMEQIVEGIKQSRMKMEKKKQENKMRRDQLNDQYLELLEKQRLYFKTVKEFKEEGRKNEMLLSKVKAKAS

SEQ ID NO: 45032 - protein, 63 aa, Homo sapiens
MLFIYGHYKQATVGDINTERPGMLDFTGKAKWDAWNELKGTSKEDAMKAYINKVEELKKKYGI

SEQ ID NO: 45033 - protein, 99 aa, Homo sapiens [sequence omitted]

SEQ ID NO: 45034 - protein, 677 aa, Homo sapiens
MNTFPWLKIVKISFKCKQFFIQLRKELHESRETLLGFNMVNYRACKNLWKACVEHHTFFRLDRPLPPQKNFFAHYFTLGSKFRYCGRTEVQSVQYGKEKANKDRVFARSPSKPLARKLMDWEVVSRNSISDDRLETQSLPSRSPPGTPNHRNSTFTQEGTRLRPSSVGHLVDHMVHTSPSEVFVNQRSPSSTQANSIVLESSPSQETPGDGKPPALPPKQSKKNSWNQIHYSHSQQDLESHINETFDIPSSPEKPTPNGGIPHDNLVLIRMKPDENGRFGFNVKGGYDQKMPVIVSRVAPGTPADLCVPRLNEGDQVVLINGRDIAEHTHDQVVLFIKASCERHSGELMLLVRPNAVYDVVEEKLENEPDFQYIPEKAPLDSVHQDDHSLRESMIQLAEGLITGTVLTQFDQLYRKKPGMTMSCAKLPQNISKNRYRDISPYDATRVILKGNEDYINANYINMEIPSSSIINQYIACQGPLPHTCTDFWQMTWEQGSSMVVMLTTQVERGRVKCHQYWPEPTGSSSYGCYQVTCHSEEGNTAYIFRKMTLFNQEKNESRPLTQIQYIAWPDHGVPDDSSDFLDFVCHVRNKRAGKEEPVVVHCSAGIGRTGVLITMETAMCLIECNQPVYPLDIVRTMRDQRAMMIQTPSQYRFVCEAILKVYEEGFVKPLTTSTNK

SEQ ID NO: 45035 - protein, 720 aa, Homo sapiens [sequence omitted]

SEQ ID NO: 45036 - protein, 674 aa, Homo sapiens
MRKHAEKERLREAQRAATHIPAAGDSKSIITCRVSLLDGTDVSVDLPKKAKGQELFDQIMYHLDLIESDYFGLRFMDSAQVAHWLDGTKSIKKQVKIGSPYCLHLRVKFYSSEPNNLREELTRYLFVLQLKQDILSGKLDCPFDTAVQLAAYNLQAELGDYDLAEHSPELVSEFRFVPIQTEEMELAIFEKWKEYRGQTPAQAETNYLNKAKWLEMYGVDMHVVKARDGNDYSLGLTPTGVLVFEGDTKIGLFFWPKITRLDFKKNKLTLVVVEDDDQGKEQEHTFVFRLDHPKACKHLWKCAVEHHAFFRLRGPVQKSSHRSGFIRLGSRFRYSGKTEYQTTKTNKARRSTSFERRPSKRYSRRTLQMKACATKPEELSVHNNVSTQSNGSQQAWGMRSALPVSPSISSAPVPVEIENLPQSPGTDQHDRKCIPLNIDLLNSPDLLEATIGDVIGASDTMETSQALNDVNVATRLPGLGEPEVEYETLKDTSEKLKQLEMENSPLLSPRSNIDVNINSQEEVVKLTEKCLNNVIESPGLNVMRVPPDFKSNILKAQVEAVHKVTKEDSLLSHKNANVQDAATNSAVLNENNVPLPKESLETLMLITPADSGSVLKEATDELDALLASLTENLIDHTVAPQVSSTSMITPRWIVPLWSHFGRRSCPEAEVFTDH

SEQ ID NO: 45037 - protein, 1446 aa, Homo sapiens
MISAARGLSPADVAQEHLKERGLFGLPAPGTTPSDYYHQMTLVAGHPAPYGDLLMQSGGAASAPHLHDYLNPVDVSRFSSPRVTPRLSRKRALSISPLSDASLDLQRMIRTSPNSLVAYINNSRSSSAASGSYGHLSAGALSPAFTFPHPINPVAYQQILSQQRGLGSAFGHTPPLIQPSPTFLAQQPMALTSINATPTQLSSSSNCLSDTNQNKQSSESAVSSTVNPVAIHKRSKVKTEPEGLRPASPLALTQGQVSGHGSCGCALPLSQEQLADLKEDLDRDDCKQEAEVVIYETNCHWEDCTKEYDTQEQLVHHINNEHIHGEKKEFVCRWQACTREQKPFKAQYMLVVHMRRHTGEKPHKCTFEGCSKAYSRLENLKTHLRSHTGEKPYVCEHEGCNKAFSNASDRAKHQNRTHSNEKPYICKIPGCTKRYTDPSSLRKHVKTVHGPDAHVTKKQRNDVHLRTPLLKENGDSEAGTEPGGPESTEASSTSQAVEDCLHVRAIKTESSGLCQSSPGAQSSCSSEPSPLGSAPNNDSGVEMPGTGPGSLGDLTALDDTPPGADTSALAAPSAGGLQLRKHMTTMHRFEQLKKEKLKSLKDSCSWAGPTPHTRNTKLPPLPGSGSILENFSGSGGGGPAGLLPNPRLSELSASEVTMLSQLQERRDSSTSTVSSAYTVSRRSSGISPYFSSRRSSEASPLGAGRPHNASSADSYDPISTDASRRSSEASQCSGGSGLLNLTPAQQYSLRAKYAAATGGPPPTPLPGLERMSLRTRLALLDAPERTLPAGCPRPLGPRRGSDGPTYGHGHAGAAPAFPHEAPGGGARRASDPVRRPDALSLPRVQRFHSTHNVNPGPLPPCADRRGLRLQSHPSTDGGLARGAYSPRPPSISENVAMEAVAAGVDGAGPEADLGLPEDDLVLPDDVVQYIKAHASGALDEGTGQVYPTESTGFSDNPRLPSPGLHGQRRMVAADSNVGPSAPMLGGCQLGFGAPSSLNKNNMPVQWNEVSSGTVDALASQVKPPPFPQGNLAVVQQKPAFGQYPGYSPQGLQASPGGLDSTQPHLQPRSGAPSQGIPRVNYMQQLRQPVAGSQCPGMTTTMSPHACYGQVHPQLSPSTISGALNQFPQSCSNMPAKPGHLGHPQQTEVAPDPTTMGNRHRELGVPDSALAGVPPPHPVQSYPQQSHHLAASMSQEGYHQVPSLLPARQPGFMEPQTGPMGVATAGFGLVQPRPPLEPSPTGRHRGVRAVQQQLAYARATGHAMAAMPSSQETAEAVPKGAMGNMGSVPPQPPPQDAGGAPDHSMLYYYGQIHMYEQDGGLENLGSCQVMRSQPPQPQACQDSIQPQPLPSPGVNQVSSTVDSQLLEAPQIDFDAIMDDGDHSSLFSGALSPSLLHSLSQNSSRLTTPRNSLTLPSIPAGISNMAVGDMSSMLTSLAEESKFLNMMT

SEQ ID NO: 45038 - protein, 1241 aa, Homo sapiens
MALTSINATPTQLSSSSNCLSDTNQNKQSSESAVSSTVNPVAIHKRSKVKTEPEGLRPASPLALTQEQLADLKEDLDRDDCKQEAEVVIYETNCHWEDCTKEYDTQEQLVHHINNEHIHGEKKEFVCRWQACTREQKPFKAQYMLVVHMRRHTGEKPHKCTFEGCSKAYSRLENLKTHLRSHTGEKPYVCEHEGCNKAFSNASDRAKHQNRTHSNEKPYICKIPGCTKRYTDPSSLRKHVKTVHGPDAHVTKKQRNDVHLRTPLLKENGDSEAGTEPGGPESTEASSTSQAVEDCLHVRAIKTESSGLCQSSPGAQSSCSSEPSPLGSAPNNDSGVEMPGTGPGSLGDLTALDDTPPGADTSALAAPSAGGLQLRKHMTTMHRFEQLKKEKLKSLKDSCSWAGPTPHTRNTKLPPLPGSGSILENFSGSGGGGPAGLLPNPRLSELSASEVTMLSQLQERRDSSTSTVSSAYTVSRRSSGISPYFSSRRSSEASPLGAGRPHNASSADSYDPISTDASRRSSEASQCSGGSGLLNLTPAQQYSLRAKYAAATGGPPPTPLPGLERMSLRTRLALLDAPERTLPAGCPRPLGPRRGSDGPTYGHGHAGAAPAFPHEAPGGGARRASDPVRRPDALSLPRVQRFHSTHNVNPGPLPPCADRRGLRLQSHPSTDGGLARGAYSPRPPSISENVAMEAVAAGVDGAGPEADLGLPEDDLVLPDDVVQYIKAHASGALDEGTGQVYPTESTGFSDNPRLPSPGLHGQRRMVAADSNVGPSAPMLGGCQLGFGAPSSLNKNNMPVQWNEVSSGTVDALASQVKPPPFPQGNLAVVQQKPAFGQYPGYSPQGLQASPGGLDSTQPHLQPRSGAPSQGIPRVNYMQQLRQPVAGSQCPGMTTTMSPHACYGQVHPQLSPSTISGALNQFPQSCSNMPAKPGHLGHPQQTEVAPDPTTMGNRHRELGVPDSALAGVPPPHPVQSYPQQSHHLAASMSQEGYHQVPSLLPARQPGFMEPQTGPMGVATAGFGLVQPRPPLEPSPTGRHRGVRAVQQQLAYARATGHAMAAMPSSQETAEAVPKGAMGNMGSVPPQPPPQDAGGAPDHSMLYYYGQIHMYEQDGGLENLGSCQVMRSQPPQPQACQDSIQPQPLPSPGVNQVSSTVDSQLLEAPQIDFDAIMDDGDHSSLFSGALSPSLLHSLSQNSSRLTTPRNSLTLPSIPAGISNMAVGDMSSMLTSLAEESKFLNMMT

SEQ ID NO: 45039 - protein, 423 aa, Homo sapiens
MHEASKKLNECLQEVYEPDWPGRDEANKIAENNDLLWMDYHQKLVDQALLTMDTYLGQFPDIKSRIAKRGRKLVDYDSARHHYESLQTAKKKDEAKIAKAEEELIKAQKVFEEMNVDLQEELPSLWNSRVGFYVNTFQSIAGLEENFHKEMSKLNQNLNDVLVGLEKQHGSNTFTVKAQPRKKSKLFSRLRRKKNSDNAPAKGNKSPSPPDGSPAATPEIRVNHEPEPAGGATPGATLPKSPSQLRKGPPVPPPPKHTPSKEVKQEQILSLFEDTFVPEISVTTPSQPAEASEVAGGTQPAAGAQEPGETAASEAASSSLPAVVVETFPATVNGTVEGGSGAGRLDLPPGFMFKVQAQHDYTATDTDELQLKAGDVVLVIPFQNPEEQDEGWLMGVKESDWNQHKELEKCRGVFPENFTERVP

SEQ ID NO: 45040 - protein, 335 aa, Homo sapiens
MHEASKKLNECLQEVYEPDWPGRDEANKIAENNDLLWMDYHQKLVDQALLTMDTYLGQFPDIKSRIAKRGRKLVDYDSARHHYESLQTAKKKDEAKIAKAEEELIKAQKVFEEMNVDLQEELPSLWNSRVGFYVNTFQSIAGLEENFHKEMSKLNQNLNDVLVGLEKQHGSNTFTVKAQPSDNAPAKGNKSPSPPDGSPAATPEIRVNHEPEPAGGATPGATLPKSPSQSSLPAVVVETFPATVNGTVEGGSGAGRLDLPPGFMFKVQAQHDYTATDTDELQLKAGDVVLVIPFQNPEEQDEGWLMGVKESDWNQHKELEKCRGVFPENFTERVP

SEQ ID NO: 45041 - protein, 380 aa, Homo sapiens
MHEASKKLNECLQEVYEPDWPGRDEANKIAENNDLLWMDYHQKLVDQALLTMDTYLGQFPDIKSRIAKRGRKLVDYDSARHHYESLQTAKKKDEAKIAKAEEELIKAQKVFEEMNVDLQEELPSLWNSRVGFYVNTFQSIAGLEENFHKEMSKLNQNLNDVLVGLEKQHGSNTFTVKAQPRKKSKLFSRLRRKKNSDNAPAKGNKSPSPPDGSPAATPEIRVNHEPEPAGGATPGATLPKSPSQPAEASEVAGGTQPAAGAQEPGETAASEAASSSLPAVVVETFPATVNGTVEGGSGAGRLDLPPGFMFKVQAQHDYTATDTDELQLKAGDVVLVIPFQNPEEQDEGWLMGVKESDWNQHKELEKCRGVFPENFTERVP

SEQ ID NO: 45042 - protein, 350 aa, Homo sapiens
MHEASKKLNECLQEVYEPDWPGRDEANKIAENNDLLWMDYHQKLVDQALLTMDTYLGQFPDIKSRIAKRGRKLVDYDSARHHYESLQTAKKKDEAKIAKAEEELIKAQKVFEEMNVDLQEELPSLWNSRVGFYVNTFQSIAGLEENFHKEMSKLNQNLNDVLVGLEKQHGSNTFTVKAQPRKKSKLFSRLRRKKNSDNAPAKGNKSPSPPDGSPAATPEIRVNHEPEPAGGATPGATLPKSPSQSSLPAVVVETFPATVNGTVEGGSGAGRLDLPPGFMFKVQAQHDYTATDTDELQLKAGDVVLVIPFQNPEEQDEGWLMGVKESDWNQHKELEKCRGVFPENFTERVP

SEQ ID NO: 45043 - protein, 408 aa, Homo sapiens [sequence omitted]

SEQ ID NO: 45044 - protein, 365 aa, Homo sapiens
MHEASKKLNECLQEVYEPDWPGRDEANKIAENNDLLWMDYHQKLVDQALLTMDTYLGQFPDIKSRIAKRGRKLVDYDSARHHYESLQTAKKKDEAKIAKAEEELIKAQKVFEEMNVDLQEELPSLWNSRVGFYVNTFQSIAGLEENFHKEMSKLNQNLNDVLVGLEKQHGSNTFTVKAQPSDNAPAKGNKSPSPPDGSPAATPEIRVNHEPEPAGGATPGATLPKSPSQPAEASEVAGGTQPAAGAQEPGETAASEAASSSLPAVVVETFPATVNGTVEGGSGAGRLDLPPGFMFKVQAQHDYTATDTDELQLKAGDVVLVIPFQNPEEQDEGWLMGVKESDWNQHKELEKCRGVFPENFTERVP

SEQ ID NO: 45045 - protein, 630 aa, Homo sapiens
MQFIKLCTVSYGKVKLVLKHNRYFVESCHPDVIQHLLQDPVIRECRLRNSEGEATELITETFTSKSAISKTAESSGGPSTSRVTDPQGKSDIPMDLFDFYEQMDKDEEEEEETQTVSFEVKQEMIEELQKRCIHLEYPLLAEYDFRNDSVNPDINIDLKPTAVLRPYQEKSLRKMFGNGRARSGVIVLPCGAGKSLVGVTAACTVRKRCLVLGNSAVSVEQWKAQFKMWSTIDDSQICRFTSDAKDKPIGCSVAISTYSMLGHTTKRSWEAERVMEWLKTQEWGLMILDEVHTIPAKMFRRVLTIVQAHCKLGLTATLVREDDKIVDLNFLIGPKLYEANWMELQNNGYIAKVQCAEVWCPMSPEFYREYVAIKTKKRILLYTMNPNKFRACQFLIKFHERRNDKIIVFADNVFALKEYAIRLNKPYIYGPTSQGERMQILQNFKHNPKINTIFISKVGDTSFDLPEANVLIQISSHGGSRRQEAQRLGRVLRAKKGMVAEEYNAFFYSLVSQDTQEMAYSTKRQRFLVDQGYSFKVITKLAGMEEEDLAFSTKEEQQQLLQKVLAATDLDAEEEVVAGEFGSRSSQASRRFGTMSSMSGADDTVYMEYHSSRSKAPSKHVHPLFKRFRK

SEQ ID NO: 45046 - protein, 540 aa, Homo sapiens [sequence omitted]

SEQ ID NO: 45047 - protein, 66 aa, Homo sapiens
MAALGATLFAALGLRSTLLTVLGAGAQVAALLAALVGLLPWGGGTALRLALGRLGRGAGLAKVLPV

SEQ ID NO: 45048 - protein, 969 aa, Homo sapiens
MSSSSSLQSREEKQEPVVVRPYPQVQMLSTHHAVASATPVAVTAPPAHLTPAVPLSFSEGLMKPPPKPTMPSRPIAPAPPSTLSLPPKVPGQVTVTMESSIPQASAIPVATISGQQGHPSNLHHIMTTNVQMSIIRSNAPGPPLHIGASHLPRGAAAAAVMSSSKVTTVLRPTSQLPNAATAQPAVQHIIHQPIQSRPPVTTSNAIPPAVVATVSATRAQSPVITTTAAHATDSALSRPTLSIQHPPSAAISIQRPAQSRDVTTRITLPSHPALGTPKQQLHTMAQKTIFSTGTPVAAATVAPILATNTIPSATTAGSVSHTQAPTSTIVTMTVPSHSSHATAVTTSNIPVAKVVPQQITHTSPRIQPDYPAERSSLIPISGHRASPNPVAMETRSDNRPSVPVQFQYFLPTYPPSAYPLAAHTYTPITSSVSTIRQYPVSAQAPNSAITAQTGVGVASTVHLNPMQLMTVDASHARHIQGIQPAPISTQGIQPAPIGTPGIQPAPLGTQGIHSATPINTQGLQPAPMGTQQPQPEGKTSAVVLADGATIVANPISNPFSAAPAATTVVQTHSQSASTNAPAQGSSPRPSILRKKPATDGAKPKSEIHVSMATPVTVSMETVSNQNNDQPTIAVPPTAQQPPPTIPTMIAAASPPSQPAVALSTIPGAVPITPPITTIAAAPPPSVTVGGSLSSVLGPPVPEIKVKEEVEPMDIMRPVSAVPPLATNTVSPSLALLANNLSMPTSDLPPGASPRKKPRKQQHVISTEEGDMMETNSTDDEKSTAKSLLVKAEKRKSPPKEYIDEEGVRYVPVRPRPPITLLRHYRNPWKAAYHHFQRYSDVRVKEEKKAMLQEIANQKGVSCRAQGWKVHLCAAQLLQLTNLEHDVYERLTNLQEGIIPKKKAATDDDLHRINELIQGNMQRCKLVMDQISEARDSMLKVLDHKDRVLKLLNKNGTVKKVSKLKRKEKV

SEQ ID NO: 45049 - protein, 1004 aa, Homo sapiens
MSSSSSLQSREEKQEPVVVRPYPQVQMLSTHHAVASATPVAVTAPPAHLTPAVPLSFSEGLMKPPPKPTMPSRPIAPAPPSTLSLPPKVPGQVTVTMESSIPQASAIPVATISGQQGHPSNLHHIMTTNVQMSIIRSNAPGPPLHIGASHLPRGAAAAAVMSSSKVTTVLRPTSQLPNAATAQPAVQHIIHQPIQSRPPVTTSNAIPPAVVATVSATRAQSPVITTTAAHATDSALSRPTLSIQHPPSAAISIQRPAQSRDVTTRITLPSHPALGTPKQQLHTMAQKTIFSTGTPVAAATVAPILATNTIPSATTAGSVSHTQAPTSTIVTMTVPSHSSHATAVTTSNIPVAKVVPQQITHTSPRIQPDYPAERSSLIPISGHRASPNPVAMETRSDNRPSVPVQFQYFLPTYPPSAYPLAAHTYTPITSSVSTIRQYPVSAQAPNSAITAQTGVGVASTVHLNPMQLMTVDASHARHIQGIQPAPISTQGIQPAPIGTPGIQPAPLGTQGIHSATPINTQGLQPAPMGTQQPQPEGKTSAVVLADGATIVANPISNPFSAAPAATTVVQTHSQSASTNAPAQGSSPRPSILRKKPATDGMAVRKTLIPPQPPDVASPRVESSMRSTSGSPRPAGAKPKSEIHVSMATPVTVSMETVSNQNNDQPTIAVPPTAQQPPPTIPTMIAAASPPSQPAVALSTIPGAVPITPPITTIAAAPPPSVTVGGSLSSVLGPPVPEIKVKEEVEPMDIMRPVSAVPPLATNTVSPSLALLANNLSMPTSDLPPGASPRKKPRKQQHVISTEEGDMMETNSTDDEKSTAKSLLVKAEKRKSPPKEYIDEEGVRYVPVRPRPPITLLRHYRNPWKAAYHHFQRYSDVRVKEEKKAMLQEIANQKGVSCRAQGWKVHLCAAQLLQLTNLEHDVYERLTNLQEGIIPKKKAATDDDLHRINELIQGNMQRCKLVMDQISEARDSMLKVLDHKDRVLKLLNKNGTVKKVSKLKRKEKV

SEQ ID NO: 45050 - protein, 735 aa, Homo sapiens
MMKLVYKLQAEDYKFDFPVSYLPGPVKASIQECILPDSPLYHNKVQFTPTGGLGLNLALNPFEYYIFFFALSLITQKPLPVSLHVRTSDCAYFILVDRYLSWFLPTEGSVPPPLSSSPGGTSPSPPPRTPAIPFASYGLHHTSLLKRHISHQTSVNADPASHEIWRSETLLQVFVEMWLHHYSLEMYQKMQSPHAKLEVLHYRLSVSSALYSPAQPSLQALHAYQESFTPTEEHVLVVRLLLKHLHAFANSLKPEQASPSAHSHATSPLEEFKRAAVPRFVQQKLYLFLQHCFGHWPLDASFRAVLEMWLSYLQPWRYAPDKQAPGSDSQPRCVSEKWAPFVQENLLMYTKLFVGFLNRALRTDLVSPKHALMVFRVAKVFAQPNLAEMIQKGEQLFLEPELVIPHRQHRLFTAPTFTGSFLSPWPPAVTDASFKVKSHVYSLEGQDCKYTPMFGPEARTLVLRLAQLITQAKHTAKSISDQCAESPAGHSFLSWLGFSSMDTNGSYTANDLDEMGQDSVRKTDEYLEKALEYLRQIFRLSEAQLRQFTLALGTTQDENGKKQLPDCIVGEDGLILTPLGRYQIINGLRRFEIEYQGDPELQPIRSYEIASLVRTLFRLSSAINHRFAGQMAALCSRDDFLGSFCRYHLTEPGLASRHLLSPVGRRQVAGHTRGPRLSLRFLGSYRTLVSLLLAFFVASLFCVGPLPCTLLLTLGYVLYASAMTLLTERGKLHQP

SEQ ID NO: 45051 - protein, 206 aa, Homo sapiens
MITTSRDPSSRLKMFAKELKLVFPGAQRMNRGRHEVGALVRACKANGVTDLLVVHEHRGTPVGLIVSHLPFGPTAYFTLCNVVMRHDIPDLGTMSEAKPHLITHGFSSRLGKRVSDILRYLFPVPKDDSHRVITFANQDDYISFRHHVYKKTDHRNVELTEVGPRFELKLYMIRLGTLEQEATADVEWRWHPYTNTARKRVFLSTE

SEQ ID NO: 45052 - protein, 73 aa, Homo sapiens
MSEAKPHLITHGFSSRLGKRVSDILRYLFPVPKDDSHRVITFANQDDYISFRWVHGPCPRKASPPCVPRAACR

SEQ ID NO: 45053 - protein, 168 aa, Homo sapiens
MGYAAAAPAYSPNMYPGANPTFQTGYTPGTPYKVSCSPTSGAVPPYSSSPNPYQTAVYPVRSAYPQQSPYAQQGTYYTQPLYAAPPHVIHHTTVVQPNGMPATVYPAPIPPPRGNGVTMGMVAGTTMAMSAGTLLTAHSPTPVAPHPVTVPTYRAPGTPTYSYVPPQW

SEQ ID NO: 45054 - protein, 116 aa, Homo sapiens
MELYELAQAAGGGIDPDVFKILVDLLKLNVAPLAVFQMLKSMCAGQRLASEPQDPAAVSLPTSSVPETRGLSDNLRTRRRLNKISHSSYGGQRSSTAWCGRRRRTCTSNWLKLQRH

SEQ ID NO: 45055 - protein, 1884 aa, Homo sapiens [sequence omitted]

SEQ ID NO: 45056 - protein, 714 aa, Homo sapiens
MLLHFTIQQRTQPESSSMLREQILDLSKRYIKALAEENRNVVDGPYAGVMTAYDLKKTLAVLLDNILQRIGKLESKVDNLVVNGTGTNSTNSTTAVPSLVALEKINVADIINGAQEKCVLPPMDGYPHCEGKIKWMKDMWRSDPCYADYGVDGSTCSFFIYLSEVENWCPHLPWRAKNPYEEADHNSLAEIRTDFNILYSMMKKHEEFRWMRLRIRRMADAWIQAIKSLAEKQNLEKRKRKKVLVHLGLLTKESGFKIAETAFSGGPLGELVQWSDLITSLYLLGHDIRISASLAELKEIMKKVVGNRSGCPTVGDRIVELIYIDIVGLAQFKKTLGPSWVHYQCMLRVLDSFGTEPEFNHANYAQSKGHKTPWGKWNLNPQQFYTMFPHTPDNSFLGFVVEQHLNSSDIHHINEIKRQNQSLVYGKVDSFWKNKKIYLDIIHTYMEVHATVYGSSTKNIPSYVKNHGILSGRDLQFLLRETKLFVGLGFPYEGPAPLEAIANGCAFLNPKFNPPKSSKNTDFFIGKPTLRELTSQHPYAEVFIGRPHVWTVDLNNQEEVEDAVKAILNQKIEPYMPYEFTCEGMLQRINAFIEKQDFCHGQVMWPPLSALQVKLAEPGQSCKQVCQESQLICEPSFFQHLNKDKDMLKYKVTCQSSELAKDILVPSFDPKNKHCVFQGDLLLFSCAGAHPRHQRVCPCRDFIKGQVALCKDCL

SEQ ID NO: 45057 - protein, 1197 aa, Homo sapiens
MADGPRCKRRKQANPRRKNVVNYDNVVDTGSETDEEDKLHIAEDDGIANPLDQETSPASVPNHESSPHVSQALLPREEEEDEIREGGVEHPWHNNEILQASVDGPEEMKEDYDTMGPEATIQTAINNGTVKNANCTSDFEEYFAKRKLEERDGHAVSIEEYLQRSDTAIIYPEAPEELSRLGTPEANGQEENDLPPGTPDAFAQLLTCPYCDRGYKRLTSLKEHIKYRHEKNEENFSCPLCSYTFAYRTQLERHMVTHKPGTDQHQMLTQGAGNRKFKCTECGKAFKYKHHLKEHLRIHSGEKPYECPNCKKRFSHSGSYSSHISSKKCIGLISVNGRMRNNIKTGSSPNSVSSSPTNSAITQLRNKLENGKPLSMSEQTGLLKIKTEPLDFNDYKVLMATHGFSGTSPFMNGGLGATSPLGVHPSAQSPMQHLGVGMEAPLLGFPTMNSNLSEVQKVLQIVDNTVSRQKMDCKAEEISKLKGYHMKDPCSQPEEQGVTSPNIPPVGLPVVSHNGATKSIIDYTLEKVNEAKACLQSLTTDSRRQISNIKKEKLRTLIDLVTDDKMIENHNISTPFSCQFCKESFPGPIPLHQHERYLCKMNEEIKAVLQPHENIVPNKAGVFVDNKALLLSSVLSEKGMTSPINPYKDHMSVLKAYYAMNMEPNSDELLKISIAVGLPQEFVKEWFEQRKVYQYSNSRSPSLERSSKPLAPNSNPPTKDSLLPRSPVKPMDSITSPSIAELHNSVTNCDPPLRLTKPSHFTNIKPVEKLDHSRSNTPSPLNLSSTSSKNSHSSSYTPNSFSSEELQAEPLDLSLPKQMKEPKSIIATKNKTKASSISLDHNSVSSSSENSDEPLNLTFIKKEFSNSNNLDNKSTNPVFSMNPFSAKPLYTALPPQSAFPPATFMPPVQTSIPGLRPYPGLDQMSFLPHMAYTYPTGAATFADMQQRRKYQRKQGFQGELLDGAQDYMSGLDDMTDSDSCLSRKKIKKTESGMYACDLCDKTFQKSSSLLRHKYEHTGKRPHQCQICKKAFKHKHHLIEHSRLHSGEKPYQCDKCGKRFSHSGSYSQHMNHRALPLRGTLTRRRGRVCRGMARARRSTRKKARMATGSWADRMATRSSRRKRKKVKIKVWIRIPKRYEMKKRLEITPWTIVRRMGKWKPNQTTRKTIWKMACNKLLHFKLPIFFSSSIVTCLKTLLC

SEQ ID NO: 45058 - protein, 1185 aa, Homo sapiens
MADGPRCKRRKQANPRRKNVVNYDNVVDTGSETDEEDKLHIAEDDGIANPLDQETSPASVPNHESSPHVSQALLPREEEEDEIREGGVEHPWHNNEILQASVDGPVKNANCTSDFEEYFAKRKLEERDGHAVSIEEYLQRSDTAIIYPEAPEELSRLGTPEANGQEENDLPPGTPDAFAQLLTCPYCDRGYKRLTSLKEHIKYRHEKNEENFSCPLCSYTFAYRTQLERHMVTHKPGTDQHQMLTQGAGNRKFKCTECGKAFKYKHHLKEHLRIHSGEKPYECPNCKKRFSHSGSYSSHISSKKCIGLISVNGRMRNNIKTGSSPNSVSSSPTNSAITQLRNKLENGKPLSMSEQTGLLKIKTEPLDFNDYKVLMATHGFSGTSPFMNGGLGATSPLGVHPSAQSPMQHLGVGMEAPLLGFPTMNSNLSEVQKVLQIVDNTVSRQKMDCKAEEISKLKGYHMKDPCSQPEEQGVTSPNIPPVGLPVVSHNGATKSIIDYTLEKVNEAKACLQSLTTDSRRQISNIKKEKLRTLIDLVTDDKMIENHNISTPFSCQFCKESFPGPIPLHQHERYLCKMNEEIKAVLQPHENIVPNKAGVFVDNKALLLSSVLSEKGMTSPINPYKDHMSVLKAYYAMNMEPNSDELLKISIAVGLPQEFVKEWFEQRKVYQYSNSRSPSLERSSKPLAPNSNPPTKDSLLPRSPVKPMDSITSPSIAELHNSVTNCDPPLRLTKPSHFTNIKPVEKLDHSRSNTPSPLNLSSTSSKNSHSSSYTPNSFSSEELQAEPLDLSLPKQMKEPKSIIATKNKTKASSISLDHNSVSSSSENSDEPLNLTFIKKEFSNSNNLDNKSTNPVFSMNPFSAKPLYTALPPQSAFPPATFMPPVQTSIPGLRPYPGLDQMSFLPHMAYTYPTGAATFADMQQRRKYQRKQGFQGELLDGAQDYMSGLDDMTDSDSCLSRKKIKKTESGMYACDLCDKTFQKSSSLLRHKYEHTGKRPHQCQICKKAFKHKHHLIEHSRLHSGEKPYQCDKCGKRFSHSGSYSQHMNHRYSYCKREAEEREAAEREAREKGHLEPTELLMNRAYLQSITPQGYSDSEERESMPRDGESEKEHEKEGEDGYGKLGRQDGDEEFEEEEEESENKSMDTDPETIRDEEETGDHSMDDSSEDGKMETKSDHEEDNMEDGM

SEQ ID NO: 45059 - protein, 1209 aa, Homo sapiens
MADGPRCKRRKQANPRRKNVVNYDNVVDTGSETDEEDKLHIAEDDGIANPLDQETSPASVPNHESSPHVSQALLPREEEEDEIREGGVEHPWHNNEILQASVDGPEEMKEDYDTMGPEATIQTAINNGTVKNANCTSDFEEYFAKRKLEERDGHAVSIEEYLQRSDTAIIYPEAPEELSRLGTPEANGQEENDLPPGTPDAFAQLLTCPYCDRGYKRLTSLKEHIKYRHEKNEENFSCPLCSYTFAYRTQLERHMVTHKPGTDQHQMLTQGAGNRKFKCTECGKAFKYKHHLKEHLRIHSGEKPYECPNCKKRFSHSGSYSSHISSKKCIGLISVNGRMRNNIKTGSSPNSVSSSPTNSAITQLRNKLENGKPLSMSEQTGLLKIKTEPLDFNDYKVLMATHGFSGTSPFMNGGLGATSPLGVHPSAQSPMQHLGVGMEAPLLGFPTMNSNLSEVQKVLQIVDNTVSRQKMDCKAEEISKLKGYHMKDPCSQPEEQGVTSPNIPPVGLPVVSHNGATKSIIDYTLEKVNEAKACLQSLTTDSRRQISNIKKEKLRTLIDLVTDDKMIENHNISTPFSCQFCKESFPGPIPLHQHERYLCKMNEEIKAVLQPHENIVPNKAGVFVDNKALLLSSVLSEKGMTSPINPYKDHMSVLKAYYAMNMEPNSDELLKISIAVGLPQEFVKEWFEQRKVYQYSNSRSPSLERSSKPLAPNSNPPTKDSLLPRSPVKPMDSITSPSIAELHNSVTNCDPPLRLTKPSHFTNIKPVEKLDHSRSNTPSPLNLSSTSSKNSHSSSYTPNSFSSEELQAEPLDLSLPKQMKEPKSIIATKNKTKASSISLDHNSVSSSSENSDEPLNLTFIKKEFSNSNNLDNKSTNPVFSMNPFSAKPLYTALPPQSAFPPATFMPPVQTSIPGLRPYPGLDQMSFLPHMAYTYPTGAATFADMQQRRKYQRKQGFQGELLDGAQDYMSGLDDMTDSDSCLSRKKIKKTESGMYACDLCDKTFQKSSSLLRHKYEHTGKRPHQCQICKKAFKHKHHLIEHSRLHSGEKPYQCDKCGKRFSHSGSYSQHMNHRYSYCKREAEEREAAEREAREKGHLEPTELLMNRAYLQSITPQGYSDSEERESMPRDGESEKEHEKEGEDGYGKLGRQDGDEEFEEEEEESENKSMDTDPETIRDEEETGDHSMDDSSEDGKMETKSDHEEDNMEDGM

SEQ ID NO: 45060 - protein, 736 aa, Homo sapiens [sequence omitted]

SEQ ID NO: 45061 - protein, 123 aa, Homo sapiens
MILTVTQKTKNDMTVWSEEVEIEREVLLEKFINGAKEICYALRAEGYWADFIDPSSGLAFFGPYTNNTLFETDERYRHLGFSVDDLGCCKVIRHSLWGTHVVVGSIFTNATPDSHIMKKLSGN

SEQ ID NO: 45062 - protein, 229 aa, Homo sapiens
MDPNQNVKCKIVVVGDSQCGKTALLHVFAKDCFPENYVPTVFENYTASFEIDTQRIELSLWDTSGSPYYDNVRPLSYPDSDAVLICFDISRPETLDSVLKKWKGEIQEFCPNTKMLLVGCKSDLRTDVSTLVELSNHRQTPVSYDQGANMAKQIGAATYIECSALQSENSVRDIFHVATLACVNKTNKNVKRNKSQRATKRISHMPSRPELSAVATDLRKDKAKSCTVM

SEQ ID NO: 45063 - protein, 2337 aa, Homo sapiens
MVSSIIDSLEILFNKGETHSAVVDFEALNVIVRLIEQAPIQMGEEAVRWAKLVIPLVVHSAQKVHLRGATALEMGMPLLLQKQQEIASITEQLMTTKLISELQKLFMSKNETYVLKLWPLFVKLLGRTLHRSGSFINSLLQLEELGFRSGAPMIKKIAFIAWKSLIDNFALNPDILCSAKRLKLLMQPLSSIHVRTETLALTKLEVWWYLLMRLGPHLPANFEQVCVPLIQSTISIDSNASPQGNSCHVATSPGLNPMTPVHKGASSPYGAPGTPRMNLSSNLGGMATIPSIQLLGLEMLLHFLLGPEALSFAKQNKLVLSLEPLEHPLISSPSFFSKHANTLITAVHDSFVAVGKDAPDVVVSAIWKELISLVKSVTESGNKKEKPGSEVLTLLLKSLESIVKSEVFPVSKTLVLMEITIKGLPQKVLGSPAYQVANMDILNGTPALFLIQLIFNNFLECGVSDERFFLSLESLVGCVLSGPTSPLAFSDSVLNVINQNAKQLENKEHLWKMWSVIVTPLTELINQTNEVNQGDALEHNFSAIYGALTLPVNHIFSEQRFPVATMKTLLRTWSELYRAFARCAALVATAEENLCCEELSSKIMSSLEDEGFSNLLFVDRIIYIITVMVDCIDFSPYNIKYQPKVKSPQRPSDWSKKKNEPLGKLTSLFKLIVKVIYSFHTLSFKEAHSDTLFTIGNSITGIISSVLGHISLPSMIRKIFATLTRPLALFYENSKLDEVPKVYSCLNNKLEKLLGEIIACLQFSYTGTYDSELLEQLSPLLCIIFLHKNKQIRKQSAQFWNATFAKVMMLVYPEELKPVLTQAKQKFLLLLPGLETVEMMEESSGPYSDGTENSQLNVKISGMERKSNGKRDSFLAQTKNKKENMKPAAKLKLESSSLKVKGEILLEEEKSTDFVFIPPEGKDAKERILTDHQKEVLKTKRCDIPAMYNNLDVSQDTLFTQYSQEEPMEIPTLTRKPKEDSKMMITEEQMDSDIVIPQDVTEDCGMAEHLEKSSLSNNECGSLDKTSPEMSNSNNDERKKALISSRKTSTECASSTENSFVVSSSSVSNTTVAGTPPYPTSRRQTFITLEKFDGSENRPFSPSPLNNISSTVTVKNNQETMIKTDFLPKAKQREGTFSKSDSEKIVNGTKRSSRRAGKAEQTGNKRSKPLMRSEPEKNTEESVEGIVVLENNPPGLLNQTECVSDNQVHLSESTMEHDNTKLKAATVENAVLLETNTVEEKNVEINLESKENTPPVVISADQMVNEDSQVQITPNQKTLRRSSRRRSEVVESTTESQDKENSHQKKERRKEEEKPLQKSPLHIKDDVLPKQKLIAEQTLQENLIEKGSNLHEKTLGETSANAETEQNKKKADPENIKSEGDGTQDIVDKSSEKLVRGRTRYQTRRASQGLLSSIENSESDSSEAKEEGSRKKRSGKWKNKSNESVDIQDQEEKVVKQECIKAENQSHDYKATSEEDVSIKSPICEKQDESNTVICQDSTVTSDLLQVPDDLPNVCEEKNETSKYAEYSFTSLPVPESNLRTRNAIKRLHKRDSFDNCSLGESSKIGISDISSLSEKTFQTLECQHKRSRRVRRSKGCDCCGEKSQPQEKSLIGLKNTENNDVEISETKKADVQAPVSPSETSQANPYSEGQFLDEHHSVNFHLGLKEDNDTINDSLIVSETKSKENTMQESLPSGIVNFREEICDMDSSEAMSLESQESPNENFKTVGPCLGDSKNVSQESLETKEEKPEETPKMELSLENVTVEGNACKVTESNLEKAKTMELNVGNEASFHGQERTKTGISEEAAIEENKRNDDSEADTAKLNAKEVATEEFNSDISLSDNTTPVKLNAQTEISEQTAAGELDGGNDVSDLHSSEETNTKMKNNEEMMIGEAMAETGHDGETENEGITTKTSKPDEAETNMLTAEMDNFVCDTVEMSTEEGIIDANKTETNTEYSKSEEKLDNNQMVMESDILQEDHHTSQKVEEPSQCLASGTAISELIIEDNNASPQKLRELDPSLVSANDSPSGMQTRCVWSPLASPSTSILKRGLKRSQEDEISSPVNKVRRVSFADPIYQAGLADDIDRRCSIVRSHSSNSSPIGKSVKTSPTTQSKHNTTSAKGFLSPGSRSPKFKSSKKCLISEMAKESIPCPTESVYPPLVNCVAPVDIILPQITSNMWARGLGQLIRAKNIKTIGDLSTLTASEIKTLPIRSPKVSNVKKALRIYHEQQVKTRGLEEIPVFDISEKTVNGIENKSLSPDEERLVSDIIDPVALEIPLSKNLLAQISALALQLDSEDLHNYSGSQLFEMHEKLSCMANSVIKNLQSRWRSPSHENSI

SEQ ID NO: 45064 - protein, 2311 aa, Homo sapiens
MVSSIIDSLEILFNKGETHSAVVDFEALNVIVRLIEQAPIQMGEEAVRWAKLVIPLVVHSAQKVHLRGATALEMGMPLLLQKQQEIASITEQLMTTKLISELQKLFMSKNETYVLKLWPLFVKLLGRTLHRSGSFINSLLQLEELGFRSGAPMIKKIAFIAWKSLIDNFALNPDILCSAKRLKLLMQPLSSIHVRTETLALTKLEVWWYLLMRLGPHLPANFEQVCVPLIQSTISIDSNASPQGNSCHVATSPGLNPMTPVHKGASSPYGAPGTPRMNLSSNLGGMATIPSIQLLGLEMLLHFLLGPEALSFAKQNKLVLSLEPLEHPLISSPSFFSKHANTLITAVHDSFVAVGKDAPDVVVSAIWKELISLVKSVTESGNKKEKPGSEVLTLLLKSLESIVKSEVFPVSKTLVLMEITIKGLPQKVLGSPAYQVANMDILNGTPALFLIQLIFNNFLECGVSDERFFLSLESLVGCVLSGPTSPLAFSDSVLNVINQNAKQLENKEHLWKMWSVIVTPLTELINQTNEVNQGDALEHNFSAIYGALTLPVNHIFSEQRFPVATMKTLLRTWSELYRAFARCAALVATAEENLCCEELSSKIMSSLEDEGFSNLLFVDRIIYIITVMVDCIDFSPYNIKYQPKVKSPQRPSDWSKKKNEPLGKLTSLFKLIVKVIYSFHTLSFKEAHSDTLFTIGNSITGIISSVLGHISLPSMIRKIFATLTRPLALFYENSKLDEVPKVYSCLNNKLEKLLGEIIACLQFSYTGTYDSELLEQLSPLLCIIFLHKNKQIRKQSAQFWNATFAKVMMLVYPEELKPVLTQAKQKFLLLLPGLETVEMMEESSGPYSDGTENSQLNVKISGMERKSNGKRDSFLAQTKNKKENMKPAAKLKLESSSLKVKGEILLEEEKSTDFVFIPPEGKDAKERILTDHQKEVLKTKRCDIPAMYNNLDVSQDTLFTQYSQEEPMEIPTLTRKPKEDSKMMITEEQMDSDIVIPQDVTEDCGMAEHLEKSSLSNNECGSLDKTSPEMSNSNNDERKKALISSRKTSTECASSTENSFVVSSSSVSNTTVAGTPPYPTSRRQTFITLEKFDGSENRPFSPSPLNNISSTVTVKNNQETMIKTDFLPKAKQREGTFSKSDSEKIVNGTKRSSRRAGKAEQTGNKRSKPLMRSEPEKNTEESVEGIVVLENNPPGLLNQTECVSDNQVHLSESTMEHDNTKLKAATVENAVLLETNTVEEKNVEINLESKENTPPVVISADQMVNEDSQVQITPNQKTLRRSSRRRSEVVESTTESQDKENSHQKKERRKEEEKPLQKSPLHIKDDVLPKQKLIAEQTLQENLIEKGSNLHEKTLGETSANAETEQNKKKADPENIKSEGDGTQDIVDKSSEKLVRGRTRYQTRRASQGLLSSIENSESDSSEAKEEGSRKKRSGKWKNKSNESVDIQDQEEKVVKQECIKAENQSHDYKATSEEDVSIKSPICEKQDESNTVICQDSTVTSDLLQVPDDLPNVCEEKNETSKYAEYSFTSLPVPESNLRTRNAIKRLHKRDSFDNCSLGESSKIGISDISSLSEKTFQTLECQHKRSRRVRRSKGCDCCGEKSQPQEKSLIGLKNTENNDVEISETKKADVQAPVSPSETSQANPYSEGQFLDEHHSVNFHLGLKEDNDTINDSLIVSETKSKENTMQESLPSGIVNFREEICDMDSSEAMSLESQESPNENFKTVGPCLGDSKNVSQESLETKEEKPEETPKMELSLENVTVEGNACKVTESNLEKAKTMELNVGNEASFHGQERTKTGISEEAAIEENKRNDDSEADTAKLNAKEVATEEFNSDISLSDNTTPVKLNAQTEISEQTAAGELDGGNDVSDLHSSEETNTKMKNNEEMMIGEAMAETGHDGETENEGITTKTSKPDEAETNMLTAEMDNFVCDTVEMSTEEGIIDANKTETNTEYSKSEEKLDNNQMVMESDILQEDHHTSQKVEEPSQCLASGTAISELIIEDNNASPQKLRELDPSLVSANDSPSGMQTRCVWSPLASPSTSILKRGLKRSQEDEISSPVNKVRRVSFADPIYQAGLADDIDRRCSIVRSHSSNSSPIGKSVKTSPTTQSKISEMAKESIPCPTESVYPPLVNCVAPVDIILPQITSNMWARGLGQLIRAKNIKTIGDLSTLTASEIKTLPIRSPKVSNVKKALRIYHEQQVKTRGLEEIPVFDISEKTVNGIENKSLSPDEERLVSDIIDPVALEIPLSKNLLAQISALALQLDSEDLHNYSGSQLFEMHEKLSCMANSVIKNLQSRWRSPSHENSI

SEQ ID NO: 45065 - protein, 337 aa, Homo sapiens
MESHPPSQGPGDGERRLSGSSLCSGSWVSADGFLRRRPSMGHPGMHYAPMGMHPMGQRANMPPVPHGMMPQMMPPMGGPPMGQMPGMMSSVMPGMMMSHMSQASMQPALPPGVNSMDVAAGTASGAKSMWTEHKSPDGRTYYYNTETKQSTWEKPDDLKTPAEQLLSKCPWKEYKSDSGKPYYYNSQTKESRWAKPKELEDLEAMIKAEESSKQEECTTTSTAPVPTTEIPTTMSTMAAAEAAAAVVAAAAAAAAAAAAANANASTSASNTVSGTVPVVPEPEVTSIVATVVDNENTVTISTEEQAQLTSTPAIQDQSVEVSSNTGEETSKQETVAE

SEQ ID NO: 45066 - protein, 1181 aa, Homo sapiens
MEPETTATTILASVKEQELQFQRLTRELEVERQIVASQLERCRLGAESPSIASTSSTEKSFPWRSTDVPNTGVSKPRVSDAVQPNNYLIRTEPEQGTLYSPEQTSLHESEGSLGNSRSSTQMNSYSDSGYQEAGSFHNSQNVSKADNRQQHSFIGSTNNHVVRNSRAEGQTLVQPSVANRAMRRVSSVPSRAQSPSYVISTGVSPSRGSLRTSLGSGFGSPSVTDPRPLNPSAYSSTTLPAARAASPYSQRPASPTAIRRIGSVTSRQTSNPNGPTPQYQTTARVGSPLTLTDAQTRVASPSQGQVGSSSPKRSGMTAVPQHLGPSLQRTVHDMEQFGQQQYDIYERMVPPRPDSLTGLRSSYASQHSQLGQDLRSAVSPDLHITPIYEGRTYYSPVYRSPNHGTVELQGSQTALYRTGSGIGNLQRTSSQRSTLTYQRNNYALNTTATYAEPYRPIQYRVQECNYNRLQHAVPADDGTTRSPSIDSIQKDPREFAWRDPELPEVIHMLQHQFPSVQANAAAYLQHLCFGDNKVKMEVCRLGGIKHLVDLLDHRVLEVQKNACGALRNLVFGKSTDENKIAMKNVGGIPALLRLLRKSIDAEVRELVTGVLWNLSSCDAVKMTIIRDALSTLTNTVIVPHSGWNNSSFDDDHKIKFQTSLVLRNTTGCLRNLSSAGEEARKQMRSCEGLVDSLLYVIHTCVNTSDYDSKTVENCVCTLRNLSYRLELEVPQARLLGLNELDDLLGKESPSKDSEPSCWGKKKKKKKRTPQEDQWDGVGPIPGLSKSPKGVEMLWHPSVVKPYLTLLAESSNPATLEGSAGSLQNLSAGNWKFAAYIRGRPKRKGLPILVELLRMDNDRVVSSVATALRNMALDVRNKELIGKYAMRDLVNRLPGGNGPSVLSDETMAAICCALHEVTSKNMENAKALADSGGIEKLVNITKGRGDRSSLKVVKAAAQVLNTLWQYRDLRSIYKKDGWNQNHFITPVSTLERDRFKSHPSLSTTNQQMSPIIQSVGSTSSSPALLGIRDPRSEYDRTQPPMQYYNSQGDATHKGLYPGSSKPSPIYISSYSSPAREQNRRLQHQQLYYSQDDSNRKNFDAYRLYLQSPHSYEDPYFDDRVHFPASTDYSTQYGLKSTTNYVDFYSTKRPSYRAEQYPGSPDSWVHQDAQQRNSFFLTLFRLR

SEQ ID NO: 45067 - protein, 1800 aa, Homo sapiens
MSLPSSPLLPRQSHLVQSRVNKKSPGPVRKPKYVESPRVPGDAVIMPFREVAKPTEPDEHEAKADNEPSCSPAAQELLTRLGFLLGEGIPSATHITIEDKNETMCTALSQGISPCSTLTSSTASPSTDSPCSTLNSCVSKTAANKSPCETISSPSSTLESKDSGIIATITSSSENDDRSGSSLEWNKDGNLRLGVQKGVLHDRRADNCSPVAEEETTGSAESTLPKAESSAGDGPVPYSQGSSSLIMPRPNSVAATSSTKLEDLSYLDGQRNAPLRTSIRLPWHNTAGGRAQEVKARFAPYKPQDILLKPLLFEVPSITTDSVFVGRDWLFHQIEENLRNTELAENRGAVVVGNVGFGKTAIISKLVALSCHGSRMRQIASNSPGSSPKTSDPTQDLHFTPLLSPSSSTSASSTAKTPLGSISAENQRPREDAVKYLASKVVAYHYCQADNTYTCLVPEFVHSIAALLCRSHQLAAYRDLLIKEPQLQSMLSLRSCVQDPVAAFKRGVLEPLTNLRNEQKIPEEEYIILIDGLNEAEFHKPDYGDTLSSFITKIISKFPAWLKLIVTVRANFQEIISALPFVKLSLDDFPDNKDIHSDLHAYVQHRVHSSQDILSNISLNGKADATLIGKVSSHLVLRSLGSYLYLKLTLDLFQRGHLVIKSASYKVVPVSLSELYLLQCNMKFMTQSAFERALPILNVALASLHPMTDEQIFQAINAGHIQGEQGWEDFQQRMDALSCFLIKRRDKTRMFCHPSFREWLVWRADGENTAFLCEPRNGHALLAFMFSRQEGKLNRQQTMELGHHILKAHIFKGLSKKTGISSSHLQALWIGYSTEGLSAALASLRNLYTPNVKVSRLLILGGANVNYRTEVLNNAPILCVQSHLGHEEVVTLLLEFGACLDGTSENGMTALCYAAAAGHMKLVCLLTKKGVRVDHLDKKGQCALVHSALRGHGDILQYLLTCEWSPGPPQPGTLRKSHALQQALTAAASMGHSSVVQCLLGMEKEHEVEVNGTDTLWGETALTAAAGRGKLEVCELLLGHGAAVSRTNRRGVPPLFCAARQGHWQIVRLLLERGCDVNLSDKQGRTPLMVAACEGHLSTVEFLLSKGAALSSLDKEGLSALSWACLKGHRAVVQYLVEEGAAIDQTDKNGRTPLDLAAFYGDAETVLYLVEKGAVIEHVDHSGMRPLDRAIGCRNTSVVVALLRKGAKLGNAAWAMATSKPDILIILLQKLMEEGNVMYKKGKMKEAAQRYQYALRKFPREGFGEDMRPFNELRVSLYLNLSRCRRKTNDFGMAEEFASKALELKPKSYEAFYARARAKRNSRQFVAALADLQEAVKLCPTNQEVKRLLARVEEECKQLQRSQQQKQQGPLPAPLNDSENEEDTPTPGLSDHFHSEETEEEETSPQEESVSPTPRSQPSSSVPSSYIRNLQEGLQSKGRPVSPQSRAGIGKSLREPVAQPGLLLQPSKQAQIVKTSQHLGSGQSAVRNGSMKVQISSQNPPPSPMPGRIAATPAGSRTQHLEGTGTFTTRAGCGHFGDRLGPSQNVRLQCGENGPAHPLPSKTKTTERLLSHSSVAVDAAPPNQGGLATCSDVRHPASLTSSGSSGSPSSSIKMSSSTSSLTSSSSFSDGFKVQGPDTRIKDKVVTHVQSGTAEHRPRNTPFMGIMDKTARFQQQSNPPSRSWHCPAPEGLLTNTSSAAGLQSANTEKPSLMQVGGYNNQAKTCSVSTLSASVHNGAQVKELEESKCQIPVHSQENRITKTVSHLYQESISKQQPHISNEAHRSHLTAAKPKRSFIESNV

SEQ ID NO: 45068 - protein, 911 aa, Homo sapiens
MSAKTWLIDLGKPTDCSTKLPFICEKYNVSSLEKYSPDSAAKVQCSEQWIPFQNKCFLKIKPVSLTFSQASDTCHSYGGTLPSVLSQIEQDFITSLLPDMEATLWIGLRWTAYEKINKWTDNRELTYSNFHPLLVSGRLRIPENFFEEESRYHCALILNLQKSPFTGTWNFTSCSERHFVSLCQKYSEVKSRQTLQNASETVKYLNNLYKIIPKTLTWHSAKRECLKSNMQLVSITDPYQQAFLSVQALLHNSSLWIGLFSQDDELNFGWSDGKRLHFSRWAETNGQLEDCVVLDTDGFWKTVDCNDNQPGAICYYSGNETEKEVKPVDSVKCPSPVLNTPWIPFQNCCYNFIITKNRHMATTQDEVHTKCQKLNPKSHILSIRDEKENNFVLEQLLYFNYMASWVMLGITYRNKSLMWFDKTPLSYTHWRAGRPTIKNEKFLAGLSTDGFWDIQTFKVIEEAVYFHQHSILACKIEMVDYKEEYNTTLPQFMPYEDGIYSVIQKKVTWYEALNMCSQSGGHLASVHNQNGQLFLEDIVKRDGFPLWVGLSSHDGSESSFEWSDGSTFDYIPWKGQTSPGNCVLLDPKGTWKHEKCNSVKDGAICYKPTKSKKLSRLTYSSRCPAAKENGSRWIQYKGHCYKSDQALHSFSEAKKLCSKHDHSATIVSIKDEDENKFVSRLMRENNNITMRVWLGLSQHSVDCPSSTWIQFQDSCYIFLQEAIKVESIEDVRNQCTDHGADMISIHNEEENAFILDTLKKQWKGPDDILLGMFYDTDDASFKWFDNSNMTFDKWTDQDDDEDLVDTCAFLHIKTGEWKKGNCEVSSVEGTLCKTAIPYKRKYLSDNHILISALVIASTVILTVLGAIIWFLYKKHSDSRFTTVFSTAPQSPYNEDCVLVVGEENEYPVQFD

SEQ ID NO: 45069 - protein, 257 aa, Homo sapiens
MGLMLGEFVDDYTVRVIDVFAMPQSGTGVSVEAVDPVFQAKMLDMLKQTGRPEMVVGWYHSHPGFGCWLSGVDINTQQSFEALSERAVAVVVDPIQSVKGKVVIDAFRLINANMMVLGHEPRQTTSNLGHLNKPSIQALIHGLNRHYYSITINYRKNELEQKMLLNLHKKSWMEGLTLQDYSEHCKHNESVVKEMLELAKNYNKAVEEEDKMTPEQLAIKNVGKQDPKRHLEEHVDVLMTSNIVQCLAAMLDTVVFK

SEQ ID NO: 45070 - protein, 877 aa, Homo sapiens
MAEIAAAENNGNESGVRELLKRIVQKENWFSAFLNVLRQTGNNELVQELTGSDCSESNAEIENLSQVDGPQVEEQLLSTTVQPNLEKEVWGMENNSSESSFADSSVVSESDTSLAEGSVSCLDESLGHNSNMGSDSGTMGSDSDEENVAARASPEPELQLRPYQMEVAQPALEGKNIIICLPTGSGKTRVAVYIAKDHLDKKKKASEPGKVIVLVNKVLLVEQLFRKEFQPFLKKWYRVIGLSGDTQLKISFPEVVKSCDIIISTAQILENSLLNLENGEDAGVQLSDFSLIIIDECHHTNKEAVYNNIMRHYLMQKLKNNRLKKENKPVIPLPQILGLTASPGVGGATKQAKAEEHILKLCANLDAFTIKTVKENLDQLKNQIQEPCKKFAIADATREDPFKEKLLEIMTRIQTYCQMSPMSDFGTQPYEQWAIQMEKKAAKEGNRKERVCAEHLRKYNEALQINDTIRMIDAYTHLETFYNEEKDKKFAVIEDDSDEGGDDEYCDGDEDEDDLKKPLKLDETDRFLMTLFFENNKMLKRLAENPEYENEKLTKLRNTIMEQYTRTEESARGIIFTKTRQSAYALSQWITENEKFAEVGVKAHHLIGAGHSSEFKPMTQNEQKEVISKFRTGKINLLIATTVAEEGLDIKECNIVIRYGLVTNEIAMVQARGRARADESTYVLVAHSGSGVIEHETVNDFREKMMYKAIHCVQNMKPEEYAHKILELQMQSIMEKKMKTKRNIAKHYKNNPSLITFLCKNCSVLACSGEDIHVIEKMHHVNMTPEFKELYIVRENKALQKKCADYQINGEIICKCGQAWGTMMVHKGLDLPCLKIRNFVVVFKNNSTKKQYKKWVELPITFPNLDYSECCLFSDED

SEQ ID NO: 45071 - protein, 887 aa, Homo sapiens
MEEELLTIEDRNRIAAAENNGNESGVRELLKRIVQKENWFSAFLNVLRQTGNNELVQELTGSDCSESNAEIENLSQVDGPQVEEQLLSTTVQPNLEKEVWGMENNSSESSFADSSVVSESDTSLAEGSVSCLDESLGHNSNMGSDSGTMGSDSDEENVAARASPEPELQLRPYQMEVAQPALEGKNIIICLPTGSGKTRVAVYIAKDHLDKKKKASEPGKVIVLVNKVLLVEQLFRKEFQPFLKKWYRVIGLSGDTQLKISFPEVVKSCDIIISTAQILENSLLNLENGEDAGVQLSDFSLIIIDECHHTNKEAVYNNIMRHYLMQKLKNNRLKKENKPVIPLPQILGLTASPGVGGATKQAKAEEHILKLCANLDAFTIKTVKENLDQLKNQIQEPCKKFAIADATREDPFKEKLLEIMTRIQTYCQMSPMSDFGTQPYEQWAIQMEKKAAKEGNRKERVCAEHLRKYNEALQINDTIRMIDAYTHLETFYNEEKDKKFAVIEDDSDEGGDDEYCDGDEDEDDLKKPLKLDETDRFLMTLFFENNKMLKRLAENPEYENEKLTKLRNTIMEQYTRTEESARGIIFTKTRQSAYALSQWITENEKFAEVGVKAHHLIGAGHSSEFKPMTQNEQKEVISKFRTGKINLLIATTVAEEGLDIKECNIVIRYGLVTNEIAMVQARGRARADESTYVLVAHSGSGVIEHETVNDFREKMMYKAIHCVQNMKPEEYAHKILELQMQSIMEKKMKTKRNIAKHYKNNPSLITFLCKNCSVLACSGEDIHVIEKMHHVNMTPEFKELYIVRENKALQKKCADYQINGEIICKCGQAWGTMMVHKGLDLPCLKIRNFVVVFKNNSTKKQYKKWVELPITFPNLDYSECCLFSDED

SEQ ID NO: 45072 - protein, 431 aa, Homo sapiens [sequence omitted]

SEQ ID NO: 45073 - protein, 1856 aa, Homo sapiens
MCTILTNCIFMTMNNPPDWTKNVEYTFTGIYTFESLVKILARGFCVGEFTFLRDPWNWLDFVVIVFAYLTEFVNLGNVSALRTFRVLRALKTISVIPGLKTIVGALIQSVKKLSDVMILTVFCLSVFALIGLQLFMGNLKHKCFRNSLENNETLESIMNTLESEEDFRKYFYYLEGSKDALLCGFSTDSGQCPEGYTCVKIGRNPDYGYTSFDTFSWAFLALFRLMTQDYWENLYQQTLRAAGKTYMIFFVVVIFLGSFYLINLILAVVAMAYEEQNQANIEEAKQKELEFQQMLDRLKKEQEEAEAIAAAAAEYTSIRRSRIMGLSESSSETSKLSSKSAKERRNRRKKKNQKKLSSGEEKGDAEKLSKSESEDSIRRKSFHLGVEGHRRAHEKRLSTPNQSPLSIRGSLFSARRSSRTSLFSFKGRGRDIGSETEFADDEHSIFGDNESRRGSLFVPHRPQERRSSNISQASRSPPMLPVNGKMHSAVDCNGVVSLVDGRSALMLPNGQLLPEVIIDKATSDDSGTTNQIHKKRRCSSYLLSEDMLNDPNLRQRAMSRASILTNTVEELEESRQKCPPWWYRFAHKFLIWNCSPYWIKFKKCIYFIVMDPFVDLAITICIVLNTLFMAMEHHPMTEEFKNVLAIGNLVFTGIFAAEMVLKLIAMDPYEYFQVGWNIFDSLIVTLSLVELFLADVEGLSVLRSFRLLRVFKLAKSWPTLNMLIKIIGNSVGALGNLTLVLAIIVFIFAVVGMQLFGKSYKECVCKINDDCTLPRWHMNDFFHSFLIVFRVLCGEWIETMWDCMEVAGQAMCLIVYMMVMVIGNLVVLNLFLALLLSSFSSDNLTAIEEDPDANNLQIAVTRIKKGINYVKQTLREFILKAFSKKPKISREIRQAEDLNTKKENYISNHTLAEMSKGHNFLKEKDKISGFGSSVDKHLMEDSDGQSFIHNPSLTVTVPIAPGESDLENMNAEELSSDSDSEYSKVRLNRSSSSECSTVDNPLPGEGEEAEAEPMNSDEPEACFTDGCVWRFSCCQVNIESGKGKIWWNIRKTCYKIVEHSWFESFIVLMILLSSGALAFEDIYIERKKTIKIILEYADKIFTYIFILEMLLKWIAYGYKTYFTNAWCWLDFLIVDVSLVTLVANTLGYSDLGPIKSLRTLRALRPLRALSRFEGMRVVVNALIGAIPSIMNVLLVCLIFWLIFSIMGVNLFAGKFYECINTTDGSRFPASQVPNRSECFALMNVSQNVRWKNLKVNFDNVGLGYLSLLQVATFKGWTIIMYAAVDSVNVDKQPKYEYSLYMYIYFVVFIIFGSFFTLNLFIGVIIDNFNQQKKKLGGQDIFMTEEQKKYYNAMKKLGSKKPQKPIPRPGNKIQGCIFDLVTNQAFDISIMVLICLNMVTMMVEKEGQSQHMTEVLYWINVVFIILFTGECVLKLISLRHYYFTVGWNIFDFVVVIISIVGMFLADLIETYFVSPTLFRVIRLARIGRILRLVKGAKGIRTLLFALMMSLPALFNIGLLLFLVMFIYAIFGMSNFAYVKKEDGINDMFNFETFGNSMICLFQITTSAGWDGLLAPILNSKPPDCDPKKVHPGSSVEGDCGNPSVGIFYFVSYIIISFLVVVNMYIAVILENFSVATEESTEPLSEDDFEMFYEVWEKFDPDATQFIEFSKLSDFAAALDPPLLIAKPNKVQLIAMDLPMVSGDRIHCLDILFAFTKRVLGESGEMDSLRSQMEERFMSANPSKVSYEPITTTLKRKQEDVSATVIQRAYRRYRLRQNVKNISSIYIKDGDRDDDLLNKKDMAFDNVNENSSPEKTDATSSTTSPPSYDSVTKPDKEKYEQDRTEKEDKGKDSKESKK

SEQ ID NO: 45074 - protein, 335 aa, Homo sapiens [sequence omitted]

SEQ ID NO: 45075 - protein, 343 aa, Homo sapiens
MVRLIFERFVAKPCAIALNIQANGPQIAPPNAILEKVFTAITKHPDEKRLEGLSKQLDWDVRSIQRWFRQRRNQEKPSTLTRFCESMWRFSFYLYVFTYGVRFLKKTPWLWNTRHCWYNYPYQPLTTDLHYYYILELSFYWSLMFSQFTDIKRKDFGIMFLHHLVSIFLITFSYVNNMARVGTLVLCLHDSADALLEAAKMANYAKFQKMCDLLFVMFAVVFITTRLGIFPLWVLNTTLFESWEIVGPYPSWWVFNLLLLLVQGLNCFWSYLIVKIACKAVSRGKAGKWNPLHVSKDDRSDIESSSDEEDSEPPGKNPHTATTTNGTSGTNGYLLTGSCSMDD

SEQ ID NO: 45076 - protein, 774 aa, Homo sapiens
MLWKLQKQKTSLLKNAEYVRDHPQFLTLHNLATNKFKLMNDDTLVNVLYVTQQFAGEAHDPLVEALVTEAWRRLERFDIKLLSEFSSCLADQHLYFSPLMGKIADIVHRNLETTQDLSSLSVLMVNISSLISRHFQQQLVNKTELLFDTIDSSEVNVAKSIAKFLRNVRYRYQPLLERCNNVFLSNVDHLDLDSISKILSVYKFLQFNSFEFIIMAKKKLTEMIPLCNHPASFVKLFVALGPIAGPEEKKQLKSTMLLMSEDLTGEQALAVLGAMGDMESRNSCLIKRVTSVLHKHLDGYKPLELLKITQELTFLHFQRKEFFAKLRELLLSYLKNSFIPTEVSVLVRAISLLPSPHLDEVGISRIEAVLPQCDLNNLSSFATSVLRWIQHDHMYLDNMTAKQLKLLQKLDHYGRQRLQHSNSLDLLRKELKSLKGNTFPESLLEEMIATLQHFMDDINYINVGEIASFISSTDYLSTLLLDRIASVAVQQIEKIHPFTIPAIIRPFSVLNYDPPQRDEFLGTCVQHLNSYLGILDPFILVFLGFSLATLEYFPEDLLKAIFNIKFLARLDSQLEILSPSRSARVQFHLMELNRSVCLECPEFQIPWFHDRFCQQYNKGIGGMDGTQQQIFKMLAEVLGGINCVKASVLTPYYHKVDFECILDKRKKPLPYGSHNIALGQLPEMPWESNIEIVGSRLPPGAERIALEFLDSKALCRNIPHMKGKSAMKKRHLEILGYRVIQISQFEWNSMALSTKDARMDYLRECIFGEVKSCL

SEQ ID NO: 45077 - protein, 643 aa, Homo sapiens
MANRGKDTNGSQFFITTKPTPHLDGHHVVFGQVISGQEVVREIENQKTDAASKPFAEVRILSCGELIPKSKVKKEEKKRHKSSSSSSSSSSDSDSSSDSQSSSDSSDSESATEEKSKKRKKKHRKNSRKHKKEKKKRKKSKKSASSESEAENLEAQPQSTVRPEEIPPIPENRFLMRKSPPKADEKERKNRERERERECNPPNSQPASYQRRLLVTRSGRKIKGRGPRRYRTPSRSRSRDRFRRSETPPHWRQEMQRAQRMRVSSGERWIKGDKSELNEIKENQRSPVRVKERKITDHRNVSESPNRKNEKEKKVKDHKSNSKERDIRRNSEKDDKYKNKVKKRAKSKSRSKSKEKSKSKERDSKHNRNEEKRMRSRSKGRDHENVKEKEKQSDSKGKDQERSRSKEKSKQLESKSNEHDHSKSKEKDRRAQSRSRECDITKGKHSYNSRTRERSRSRDRSRRVRSRTHDRDRSRSKEYHRYREQEYRRRGRSRSRERRTPPGRSRSKDRRRRRRDSRSSEREESQSRNKDKYRNQESKSSHRKENSESEKRMYSKSRDHNSSNNSREKKADRDQSPFSKIKQSSQDNELKSSMLKNKEDEKIRSSVEKENQKSKGQENDHVHEKNKKFDHESSPGTDEDKSG

SEQ ID NO: 45078 - protein, 357 aa, Homo sapiens
MIKFNRLNRLTTDFNVIVEALSKSKAELMEISEDKTKIRRSPSKPLPEVTDEYKNDVKNRSVYIKGFPTDATLDDIKEWLEDKGQVLNIQMRRTLHKAFKGSIFVVFDSIESAKKFVETPGQKYKETDLLILFKDDYFAKKNEERKQNKVEAKLRAKQEQEAKQKLEEDAEMKSLEEKIGCLLKFSGDLDDQTCREDLHILFSNHGEIKWIDFVRGAKEGIILFKEKAKEALGKAKDANNGNLQLRNKEVTWEVLEGEVEKEALKKIIEDQQESLNKWKSKGRRFKGKGKGNKAAQPGSGKGKVQFQGKKTKFASDDEHDEHDENGATGPVKRAREETDKEEPASKQQKTENGAGDQ

SEQ ID NO: 45079 - protein, 745 aa, Homo sapiens
MNKRIIEEICRKVTPPVPPKKVTAAEKKTLDKEERRQKARERQQKLLAEFASRQKSFMETAMDVDSPENDIPMEITTAEPQVSEAVYDCVICGQSGPSSEDRPTGLVVLLQASSVLGQCRDNVEPKKLPISEEEQIYPWDTCAAVHDVRLSLLQRYFKDSSCLLAVSIGWEGGVYVQTCGHTLHIDCHKSYMESLRNDQVLQGFSVDKGEFTCPLCRQFANSVLPCYPGSNVENNPWQRPSNKSIQDLIKEVEELQGRPGAFPVSISSETNLSKEMESVMKDIKNTTQKKYRDYSKTPGSPDNDFLFMYSVARTNLELELIHRGGNLCSGGASTAGKRSCLNQLFHVLALHMRLYSIDSEYNPWRKLTQLEEMNPQLGYEEQQPEVPILYHDVTSLLLIQILMMPQPLRKDHFTCIVKVLFTLLYTQALAALSVKCSEEDRSAWKHAGALKKSTCDAEKSYEVLLSFVISELFKGKLYHEEGTQECAMVNPIAWSPESMEKCLQDFCLPFLRITSLLQHHLFGEDLPSCQEEEEFSVLASCLGLLPTFYQTEHPFISASCLDWPVPAFDIITQWCFEIKSFTERHAEQGKALLIQESKWKLPHLLQLPENYNTIFQYYHRKTCSVCTKVPKDPAVCLVCGTFVCLKGLCCKQQSYCECVLHSQNCGAGTGIFLLINASVIIIIRGHRFCLWGSVYLDAHGEEDRDLRRGKPLYICKERYKVLEQQWISHTFDHINKRWGPHYNGL

SEQ ID NO: 45080 - protein, 352 aa, Homo sapiens [sequence omitted]

SEQ ID NO: 45081 - protein, 697 aa, Homo sapiens
MDHIMTWATDVAKGMHYLHMEAPVKVIHRDLKSRNVVIAADGVLKICDFGASRFHNHTTHMSLVGTFPWMAPEVIQSLPVSETCDTYSYGVVLWEMLTREVPFKGLEGLQVAWLVVEKNERLTIPSSCPRSFAELLHQCWEADAKKRPSFKQIISILESMSNDTSLPDKCNSFLHNKAEWRCEIEATLERLKKLERDLSFKEQELKERERRLKMWEQKLTEQSNTPLLPSFEIGAWTEDDVYCWVQQLVRKGDSSAEMSVYASLFKENNITGKRLLLLEEEDLKDMGIVSKGHIIHFKSAIEKLTHDYINLFHFPPLIKDSGGEPEENEEKIVNLELVFGFHLKPGTGPQDCKWKMYMEMDGDEIAITYIKDVTFNTNLPDAEILKMTKPPFVMEKWIVGIAKSQTVECTVTYESDVRTPKSTKHVHSIQWSRTKPQDEVKAVQLAIQTLFTNSDGNPGSRSDSSADCQWLDTLRMRQIASNTSLQRSQSNPILGSPFFSHFDGQDSYAAAVRRPQVPIKYQQITPVNQSRSSSPTQYGLTKNFSSLHLNSRDSGFSSGNTDTSSERGRYSDRSRNKYGRGSISLNSSPRGRYSGKSQHSTPSRGRYPGKFYRVSQSALNPHQSPDFKRSPRDLHQPNTIPGMPLHPETDSRASEEDSKVSEGGWTKVEYRKKPHRPSPAKTNKERARGDHRGWRNF

SEQ ID NO: 45082 - protein, 16 aa, Homo sapiens
MPTKKESLGSVFREES

SEQ ID NO: 45083 - protein, 87 aa, Homo sapiens
MGLTLPSPRLECGGTIMAHCSLELLSSSHPPTSAFRVAGTAGVSHHAWLICLFKFFIETESQLYCPGWKRTSFPPSDNLFQTSQLKN

SEQ ID NO: 45084 - protein, 568 aa, Homo sapiens
MKWNGWGYNDSKFIFNKKGQIELTGKRYPLSGMGLPTFKEWIQNTLGVNVEHKTTSKASLNPSDTPPSVVNEDFLHDLKETNISYSQEADDRVFRAHGHCLHEIFLLREGMFERIPDIVLWPTCHDDVVKIVNLACKYNLCIIPIGGGTSVSYGLMCPADETRTIISLDTSQMNRILWVDENNLTAHVEAGITGQELERQLKESGYCTGHEPDSLEFSTVGGWVSTRASGMKKNIYGNIEDLVVHIKMVTPRGIIEKSCQGPRMSTGPDIHHFIMGSEGTLGVITEATIKIRPVPEYQKYGSVAFPNFEQGVACLREIAKQRCAPASIRLMDNKQFQFGHALKPQVSSIFTSFLDGLKKFYITKFKGFDPNQLSVATLLFEGDREKVLQHEKQVYDIAAKFGGLAAGEDNGQRGYLLTYVIAYIRDLALEYYVLGESFETSAPWDRVVDLCRNVKERITRECKEKGVQFAPFSTCRVTQTYDAGACIYFYFAFNYRGISDPLTVFEQTEAAAREEILANGGSLSHHHGVGKLRKQWLKESISDVGFGMLKSVKEYVDPNNIFGNRNLL

SEQ ID NO: 45085 - protein, 389 aa, Homo sapiens [sequence omitted]

SEQ ID NO: 45086 - protein, 391 aa, Homo sapiens
MHGQCLGPNDTKPIKVFIAQSRSSGSHRDVEDEELTRIFVMIPKSYTEEDLREKFKVYGDIEYCSIIKNKVTGESKGLGYVRYLKPSQAAQAIENCDRSFRAILAEPKNKASESSEQDYYSNMRQEALGHEPRVNMFPFVGEQQSEFSSFDKNDSRGQEAISKRLSVVSRVPFTEEQLFSIFDIVPGLEYCEVQRDPYSNYGHGVVQYFNVASAIYAKYKLHGFQYPPGNRIGVSFIDDGSNATDLLRKMATQMVAAQLASMVWNNPSQQQFMQFGGSSGSQLPQIQTDVVLPSCKKKAPAETPVKERLFIVFNPHPLPLDVLEDIFCRFGNLIEVYLVSGKNVGYAKYADRISANDAIATLHGKILNGVRLKVMLADSPREESNKRQRTY

SEQ ID NO: 45087 - protein, 255 aa, Homo sapiens
MAVCEIKVHSADNTRMELIIPGEQHFYMKAVNAAERQRWLVALGSSKACLTDTRTKKEKEISETSESLKTKMSELRLYCDLLMQQVHTIQEFVHHDENHSSPSAENMNEASSLLSATCNTFITTLEECVKIANAKFKPEMFQLHHPDPLVSPVSPSPVQMMKRSVSHPGSCSSERSSHSIKEPVSTLHRLSQRRRRTYSDTDSCSDIPLEDPDRPVHCSKNTLNGDLASATIPEESRLMAKKQSESEDTLPSFSS

SEQ ID NO: 45088 - protein, 57 aa, Homo sapiens
MVEARNGAGPIKSYPRPGSRLKMQNGSKGSGLQNKTFHCEICDVHVNSEIQLKQPKA

SEQ ID NO: 45089 - protein, 386 aa, Homo sapiens
MAWEARREPGPRRAAVRETVMLLLCLGVPTGRPYNVDTESALLYQGPHNTLFGYSVVLHSHGANRWLLVGAPTANWLANASVINPGAIYRCRIGKNPGQTCEQLQLGSPNGEPCGKTCLEERDNQWLGVTLSRQPGENGSIVTCGHRWKNIFYIKNENKLPTGGCYGVPPDLRTELSKRIAPCYQDYVKKFGENFASCQAGISSFYTKDLIVMGAPGSSYWTGSLFVYNITTNKYKAFLDKQNQVKFGSYLGYSVGAGHFRSQHTTEVVGGAPQHEQIGKAYIFSIDEKELNILHEMKGKKLGSYFGASVCAVDLNADGFSDLLVGAPMQSTIREEGRVFVYINSGSGAVMNAMETNLVGSDKYAARFGESIVNLGDIDNDGFEGN

SEQ ID NO: 45090 - protein, 1036 aa, Homo sapiens
MQRMEVENPNYALTSRFRQIEVLTTVANAFSSLYSQVSGTPLQRIGSMSSVTSNKETDPPPPLTRSNTANRLMKTLSKLNLCVDKTEKGESSSPSPSAEKGKILNVSVIEESGNKNDQKSQKIMKKKESSSMLATVKEEVSGSSAAVTENADSDRISDEANSNFNQGTENEQSKETQSHESKLGEESGIVESKLDSDFNISSHSELENSSELKSVHISTPEKEPCAPLTIPSIRNIMTQQKDSFEMEEVQSTEGEAPHVPATYQLGLTKSKRDHLLRTASQHSDSSGFAEDSTDCLSLNHLQVQESLQAMGSSADSCDSETTVTSLGEDLATPTAQDQPYFNESEEESLVPLQKGLEKAAAVADKRKSGSQDFPQCNTIENTGTKQSTCSPGDHIIEITEVEEDLFPAETVELLREASAESDVGKSSESEFTQYTTHHILKSLASIEAKCSDMSSENTTGPPSSMDRVNTALQRAQMKVCSLSNQRMGRSLLKSKDLLKQRYLFAKAGYPLRRSQSLPTTLLSPVRVVSSVNVRLSPGKETRCSPPSFTYKYTPEEEQELEKRVMEHDGQSLVKSTIFISPSSVKKEEAPQSEAPRVEECHHGRTPTCSRLAPPPMSQSTCSLHSIHSEWQERPLCEHTRTLSTHSVPNISGATCSAFASPFGCPYSHRHATYPYRVCSVNPPSAIEMQLRRVLHDIRNSLQNLSQYPMMRGPDPAAAPYSTQKSSVLPLYENTFQELQVMRRSLNLFRTQMMDLELAMLRQQTMVYHHMTEEERFEVDQLQGLRNSVRMELQDLELQLEERLLGLEEQLRAVRMPSPFRSSALMGMCGSRSADNLSCPSPLNVMEPVTELMQEQSYLKSELGLGLGEMGFEIPPGESSESVFSQATSESSSVCSGPSHANRRTGVPSTASVGKSKTPLVARKKVFRASVALTPTAPSRTGSVQTPPDLESSEEVDAAEGAPEVVGPKSEVEEGHGKLPSMPAAEEMHKNVEQDELQQVIREIKESIVGEIRREIVSGLLAAVSSSKASNSKQDYH

SEQ ID NO: 45091 - protein, 599 aa, Homo sapiens
MKGVNSYPSLFIFRSGMAPVKYHGDRSKESLVSFAMQHVRSTVTELWTGNFVNSIQTAFAAGIGWLITFCSKGGDCLTSQTRLRLSGMLDGLVNVGWMDCATQDNLCKSLDITTSTTAYFPPGATLNNKEKNSILFLNSLDAKEIYLEVIHNLPDFELLSANTLEDRLAHHRWLLFFHFGKNENSNDPELKKLKTLLKNDHIQVGRFDCSSAPDICSNLYVFQPSLAVFKGQGTKEYEIHHGKKILYDILAFAKESVNSHVTTLGPQNFPANDKEPWLVDFFAPWCPPCRALLPELRRASNLLYGQLKFGTLDCTVHEGLCNMYNIQAYPTTVVFNQSNIHEYEGHHSAEQILEFIEDLMNPSVVSLTPTTFNELVTQRKHNEVWMVDFYSPWCHPCQVLMPEWKRMARTLTGLINVGSIDCQQYHSFCAQENVQRYPEIRFFPPKSNKAYHYHSYNGWNRDAYSLRIWGLGFLPQVSTDLTPQTFSEKVLQGKNHWVIDFYAPWCGPCQNFAPEFELLARMIKGKVKAGKVDCQAYAQTCQKAGIRAYPTVKFYFYERAKRNFQEEQINTRDAKAIAALISEKLETLRNQGKRNKDEL

SEQ ID NO: 45092 - protein, 553 aa, Homo sapiens
MKGVNSYPSLFIFRSGMAPVKYHGDRSKESLVSFAMQHVRSTVTELWTGNFVNSIQTAFAAGIGWLITFCSKGGDCLTSQTRLRLSGMLFLNSLDAKEIYLEVIHNLPDFELLSANTLEDRLAHHRWLLFFHFGKNENSNDPELKKLKTLLKNDHIQVGRFDCSSAPDICSNLYVFQPSLAVFKGQGTKEYEIHHGKKILYDILAFAKESVNSHVTTLGPQNFPANDKEPWLVDFFAPWCPPCRALLPELRRASNLLYGQLKFGTLDCTVHEGLCNMYNIQAYPTTVVFNQSNIHEYEGHHSAEQILEFIEDLMNPSVVSLTPTTFNELVTQRKHNEVWMVDFYSPWCHPCQVLMPEWKRMARTLTGLINVGSIDCQQYHSFCAQENVQRYPEIRFFPPKSNKAYHYHSYNGWNRDAYSLRIWGLGFLPQVSTDLTPQTFSEKVLQGKNHWVIDFYAPWCGPCQNFAPEFELLARMIKGKVKAGKVDCQAYAQTCQKAGIRAYPTVKFYFYERAKRNFQEEQINTRDAKAIAALISEKLETLRNQGKRNKDEL

SEQ ID NO: 45093 - protein, 153 aa, Homo sapiens [sequence omitted]

SEQ ID NO: 45094 - protein, 985 aa, Homo sapiens
MFLLVGAPKANTTQPGIVEGGQVLKCDWSSTRRCQPIEFDATGNRDYAKDDPLEFKSHQWFGASVRSKQDKILACAPLYHWRTEMKQEREPVGTCFLQDGTKTVEYAPCRSQDIDADGQGFCQGGFSIDFTKADRVLLGGPGSFYWQGQLISDQVAEIVSKYDPNVYSIKYNNQLATRTAQAIFDDSYLGYSVAVGDFNGDGIDDFVSGVPRAARTLGMVYIYDGKNMSSLYNFTGEQMAAYFGFSVAATDINGDDYADVFIGAPLFMDRGSDGKLQEVGQVSVSLQRASGDFQTTKLNGFEVFARFGSAIAPLGDLDQDGFNDIAIAAPYGGEDKKGIVYIFNGRSTGLNAVPSQILEGQWAARSMPPSFGYSMKGATDIDKNGYPDLIVGAFGVDRAILYRARPVITVNAGLEVYPSILNQDNKTCSLPGTALKVSCFNVRFCLKADGKGVLPRKLNFQVELLLDKLKQKGAIRRALFLYSRSPSHSKNMTISRGGLMQCEELIAYLRDESEFRDKLTPITIFMEYRLDYRTAADTTGLQPILNQFTPANISRQAHILLDCGEDNVCKPKLEVSVDSDQKKIYIGDDNPLTLIVKAQNQGEGAYEAELIVSIPLQADFIGVVRNNEALARLSCAFKTENQTRQVVCDLGNPMKAGTQLLAGLRFSVHQQSEMDTSVKFDLQIQSSNLFDKVSPVVSHKVDLAVLAAVEIRGVSSPDHVFLPIPNWEHKENPETEEDVGPVVQHIYELRNNGPSSFSKAMLHLQWPYKYNNNTLLYILHYDIDGPMNCTSDMEINPLRIKISSLQTTEKNDTVAGQGERDHLITKRDLALSEGDIHTLGCGVAQCLKIVCQVGRLDRGKSAILYVKSLLWTETFMNKENQNHSYSLKSSASFNVIEFPYKNLPIEDITNSTLVTTNVTWGIQPAPMPVPVWVIILAVLAGLLLLAVLVFVMYRMGFFKRVRPPQEEQEREQLQPHENGEGNSET

SEQ ID NO: 45095 - protein, 671 aa, Homo sapiens
MPIYSSVTLSLFPQSQANIWLFEDTVLITGKLADAKSQPSVQFSKALIKLPDNHHISNVTGYLTVLQQFLKVDNFLHTTGITLNKPGFENIELTPLAAICVKIYSGGKELKVNGSIQVSLPLLRLNDISAGDRIPAWTFDMNTGAWVNHGRGMVKEHNNHLIWTYDAPHLGYWIAAPLPGTRGSGINEDSKDITAYHTVFLTAILGGTIVIVIGFFAVLLCYCRDKCGTPQKRERNITKLEVLKRDQTTSTTHINHISTVKVALKAEDKSQLFNAKNSSYSPQKKEPSKAETEERVSMVKTRDDFKIYNEDVSFLSVNQNNYSRNPTQSLEPNVGSKQPKHINNNLSSSLGDAQDEKRYLTGNEEAYGRSHIPEQLMHIYSQPIAILQTSDLFSTPEQLHTAKSATLPRKGQLVYGQLMEPVNRENFTQTLPKMPIHSHAQPPDAREEDIILEGQQSLPSQASDWSRYSSSLLESVSVPGTLNEAVVMTPFSSELQGISEQTLLELSKGKPSPHPRAWFVSLDGKPVAQVRHSFIDLKKGKRTQSNDTSLDSGVDMNELHSSRKLEREKTFIKSMHQPKILYLEDLDLSSSESGTTVCSPEDPALRHILDGGSGVIMEHPGEESPGRKSTVEDFEANTSPTKRRGRPPLAKRDSKTNIWKKREERPLIPIN

SEQ ID NO: 45096 - protein, 9 aa, Homo sapiens
MSNMIQEKM

SEQ ID NO: 45097 - protein, 25 aa, Homo sapiens
MGPTMIHQPLVLPSVKTLDGPTFRS

SEQ ID NO: 45098 - protein, 143 aa, Homo sapiens [sequence omitted]

SEQ ID NO: 45099 - protein, 5 aa, Homo sapiens
MDAYT

SEQ ID NO: 45100 - protein, 124 aa, Homo sapiens [sequence omitted]

SEQ ID NO: 45101 - protein, 172 aa, Homo sapiens
MSDHEQHVFQRCSSSFWRSNGDSSPCLNISSISVTPINSPDSRLSLGLLIPPPSKCGFPKPVSESSIPRPHAGSMTPKSPSTDIFDMIPFSPISHQSSMPTRNGTQPPPVPSRSTEIKRDLFGAEPFDPFNCGAADFPPDIQSKLDEMQEGFKMGLTLEGTVFCLDPLDSRC

SEQ ID NO: 45102 - protein, 19 aa, Homo sapiens
MFSSTNTISSLKDRPCISC

SEQ ID NO: 45103 - protein, 242 aa, Homo sapiens
MDFKINTDEIMTSLKSVNGQIESLISPDGSRKNPARNCRDLKFCHPELKSGEYWVDPNQGCKLDAIKVFCNMETGETCISANPLNVPRKHWWTDSSAEKKHVWFGESMDGGFQFSYGNPELPEDVLDVHLAFLRLLSSRASQNITYHCKNSIAYMDQASGNVKKALKLMGSNEGEFKAEGNSKFTYTVLEDGCTKHTGEWSKTVFEYRTRKAVRLPIVDIAPYDIGGPDQEFGVDVGPVCFL

SEQ ID NO: 45104 - protein, 608 aa, Homo sapiens
MDGKIRLWRNFYDDKKYTYTCLHWHHDMVMDLAFSVTGTSLLSGGRESVLVEWRDATEKNKEFLPRLGATIEHISVSPAGDLFCTSHSDNKIIIIHRNLEASAVIQGLVKDRSIFTGLMIDPRTKALVLNGKPGHLQFYSLQSDKQLYNLDIIQQEYINDYGLIQIELTKAAFGCFGNWLATVEQRQEKETELELQMKLWMYNKKTQGFILNTKINMPHEDCITALCFCNAEKSEQPTLVTASKDGYFKVWILTDDSDIYKKAVGWTCDFVGSYHKYQATNCCFSEDGSLLAVSFEEIVTIWDSVTWELKCTFCQRAGKIRHLCFGRLTCSKYLLGATENGILCCWNLLSCALEWNAKLNVRVMEPDPNSENIAAISQSSVGSDLFVFKPSEPRPLYIQKGISREKVQWGVFVPRDVPESFTSEAYQWLNRSQFYFLTKSQSLLTFSTKSPEEKLTPTSKQLLAEESLPTTPFYFILGKHRQQQDEKLNETLENELVQLPLTENIPAISELLHTPAHVLPSAAFLCSMFVNSLLLSKETKSAKEIPEDVDMEEEKESEDSDEENDFTEKVQDTSNTGLGEDIIHQLSKSEEKELRKFRKIDYSWIAAL

SEQ ID NO: 45105 - protein, 531 aa, Homo sapiens
MWHFAVSVFLVELYGNSLLLTAVYGLVVAGSVLVLGAIIGDWVDKNARLKVAQTSLVVQNVSVILCGIILMMVFLHKHELLTMYHGWVLTSCYILIITIANIANLASTATAITIQRDWIVVVAGEDRSKLANMNATIRRIDQLTNILAPMAVGQIMTFGSPVIGCGFISGWNLVSMCVEYVLLWKVYQKTPALAVKAGLKEEETELKQLNLHKDTEPKPLEGTHLMGVKDSNIHELEHEQEPTCASQMAEPFRTFRDGWVSYYNQPVFLAGMGLAFLYMTVLGFDCITTGYAYTQGLSGSILSILMGASAITGIMGTVAFTWLRRKCGLVRTGLISGLAQLSCLILCVISVFMPGSPLDLSVSPFEDIRSRFIQGESITPTKIPEITTEIYMSNGSNSANIVPETSPESVPIISVSLLFAGVIAARIGLWSFDLTVTQLLQENVIESERGIINGVQNSMNYLLDLLHFIMVILAPNPEAFGLLVLISVSFVAMGHIMYFRFAQNTLGNKLFACGPDAKEVRKENQANTSVV

SEQ ID NO: 45106 - protein, 377 aa, Homo sapiens
MSRFNAFKRTNTILHHLRMSKHTDAAEEVLLEKKGCTGVITLNRPKFLNALTLNMIRQIYPQLKKWEQDPETFLIIIKGAGGKAFCAGGDIRVISEAEKAKQKIAPVFFREEYMLNNAVGSCQKPYVALIHGITMGGGVGLSVHGQFRVATEKCLFAMPETAIGLFPDVGGGYFLPRLQGKLGYFLALTGFRLKGRDVYRAGIATHFVDSEKLAMLEEDLLALKSPSKENIASVLENYHTESKIDRDKSFILEEHMDKINSCFSANTVEEIIENLQQDGSSFALEQLKVINKMSPTSLKITLRQLMEGSSKTLQEVLTMEYRLSQACMRGHDFHEGVRAVLIDKDQSPKWKPADLKEVTEEDLNNHFKSLGSSDLKF

SEQ ID NO: 45107 - protein, 329 aa, Homo sapiens
MSRFNAFKRTNTILHHLRMSKHTDAAEEVLLEKKGCTGVITLNRPKFLNALTLNMIRQIYPQLKKWEQDPETFLIIIKGAGGKAFCAGGDIRVISEAEKAKQKIAPVFFREEYMLNNAVGSCQKPYVALIHGITMGGGVGLSVHGQFRVATEKCLFAMPETAIGLFPDVGGGYFLPRLQGKLGYFLALTGFRLKGRDVYRAGIATHFVDSEKLAMLEEDLLALKSPSKENIASVLENYHTESKIDRDKSFILEEHMDKINSCFSANTVEEIIENLQQDGSSFALEQLKVINKMSPTSLKITLRQLMEGSSKTLQEVLTMEYRLSQACMF

SEQ ID NO: 45108 - protein, 650 aa, Homo sapiens
MSMIIYSCLKEERKILENAQRFNQAQSGNIQSTVMLDKQKELDSKVRNVKDKVMCIEHEIKSLEDLQDEYDFKCKTLQNREHETNGVAKSDQKQEQLLLKKMYLMLDNKRKEVVHKIIELLNVTELTQNALINDELVEWKRRQQSACIGGPPNACLDQLQNWFTIVAESLQQVRQQLKKLEELEQKYTYEHDPITKNKQVLWDRTFSLFQQLIQSSFVVERQPCMPTHPQRPLVLKTGVQFTVKLRLLVKLQELNYNLKVKVLFDKDVNERNTVKGFRKFNILGTHTKVMNMEESTNGSLAAEFRHLQLKEQKNAGTRTNEGPLIVTEELHSLSFETQLCQPGLVIDLETTSLPVVVISNVSQLPSGWASILWYNMLVAEPRNLSFFLTPPCARWAQLSEVLSWQFSSVTKRGLNVDQLNMLGEKLLGPNASPDGLIPWTRFCKENINDKNFPFWLWIESILELIKKHLLPLWNDGCIMGFISKERERALLKDQQPGTFLLRFSESSREGAITFTWVERSQNGGEPDFHAVEPYTKKELSAVTFPDIIRNYKVMAAENIPENPLKYLYPNIDKDHAFGKYYSRPKEAPEPMELDGPKGTGYIKTELISVSEVHPSRLQTTDNLLPMSPEEFDEVSRIVGSVEFDSMMNTV

SEQ ID NO: 45109 - protein, 697 aa, Homo sapiens
MATILLQNLLIQLDEQLGRVSKEKNLLLIHNLKRIRKVLQGKFHGNPMHVAVVISNCLREERRILAAANMPVQGPLEKSLQSSSVSERQRNVEHKVAAIKNSVQMTEQDTKYLEDLQDEFDYRYKTIQTMDQSDKNSAMVNQEVLTLQEMLNSLDFKRKEALSKMTQIIHETDLLMNTMLIEELQDWKRRQQIACIGGPLHNGLDQLQNCFTLLAESLFQLRRQLEKLEEQSTKMTYEGDPIPMQRTHMLERVTFLIYNLFKNSFVVERQPCMPTHPQRPLVLKTLIQFTVKLRLLIKLPELNYQVKVKASIDKNVSTLSNRRFVLCGTNVKAMSIEESSNGSLSVEFRHLQPKEMKSSAGGKGNEGCHMVTEELHSITFETQICLYGLTIDLETSSLPVVMISNVSQLPNAWASIIWYNVSTNDSQNLVFFNNPPPATLSQLLEVMSWQFSSYVGRGLNSDQLHMLAEKLTVQSSYSDGHLTWAKFCKEHLPGKSFTFWTWLEAILDLIKKHILPLWIDGYVMGFVSKEKERLLLKDKMPGTFLLRFSESHLGGITFTWVDHSESGEVRFHSVEPYNKGRLSALPFADILRDYKVIMAENIPENPLKYLYPDIPKDKAFGKHYSSQPCEVSRPTERGDKGYVPSVFIPISTIRSDSTEPHSPSDLLPMSPSVYAVLRENLSPTTIETAMKSPYSAE

SEQ ID NO: 45110 - protein, 1075 aa, Homo sapiens
MEVKTSLLDNMIGVGDMVLLEPLNEETFINNLKKRFDHSEIYTYIGSVVISVNPYRSLPIYSPEKVEEYRNRNFYELSPHIFALSDEAYRSLRDQDKDQCILITGESGAGKTEASKLVMSYVAAVCGKGAEVNQVKEQLLQSNPVLEAFGNAKTVRNDNSSRFGKYMDIEFDFKGDPLGGVISNYLLEKSRVVKQPRGERNFHVFYQLLSGASEELLNKLKLERDFSRYNYLSLDSAKVNGVDDAANFRTVRNAMQIVGFMDHEAESVLAVVAAVLKLGNIEFKPESRVNGLDESKIKDKNELKEICELTGIDQSVLERAFSFRTVEAKQEKVSTTLNVAQAYYARDALAKNLYSRLFSWLVNRINESIKAQTKVRKKVMGVLDIYGFEIFEDNSFEQFIINYCNEKLQQIFIELTLKEEQEEYIREDIEWTHIDYFNNAIICDLIENNTNGILAMLDEECLRPGTVTDETFLEKLNQVCATHQHFESRMSKCSRFLNDTSLPHSCFRIQHYAGKVLYQVEGFVDKNNDLLYRDLSQAMWKASHALIKSLFPEGNPAKINLKRPPTAGSQFKASVATLMKNLQTKNPNYIRCIKPNDKKAAHIFNEALVCHQIRYLGLLENVRVRRAGYAFRQAYEPCLERYKMLCKQTWPHWKGPARSGVEVLFNELEIPVEEYSFGRSKIFIRNPRTLFKLEDLRKQRLEDLATLIQKIYRGWKCRTHFLLMKKSQIVIAAWYRRYAQQKRYQQTKSSALVIQSYIRGWKARKILRELKHQKRCKEAVTTIAAYWHGTQVRREYRKFFRANAGKKIYEFTLQRIVQKYFLEMKNKMPSLSPIDKNWPSRPYLFLDSTHKELKRIFHLWRCKKYRDQFTDQQKLIYEEKLEASELFKDKKALYPSSVGQPFQGAYLEINKNPKYKKLKDAIEEKIIIAEVVNKINRANGKSTSRIFLLTNNNLLLADQKSGQIKSEVPLVDVTKVSMSSQNDGFFAVHLKEGSEAASKGDFLFSSDHLIEMATKLYRTTLSQTKQKLNIEISDEFLVQFRQDKVCVKFIQGNQKNGSVPTCKRKNNRLLEVAVP

SEQ ID NO: 45111 - protein, 1104 aa, Homo sapiens
MEVKTSLLDNMIGVGDMVLLEPLNEETFINNLKKRFDHSEIYTYIGSVVISVNPYRSLPIYSPEKVEEYRNRNFYELSPHIFALSDEAYRSLRDQDKDQCILITGESGAGKTEASKLVMSYVAAVCGKGAEVNQVKEQLLQSNPVLEAFGNAKTVRNDNSSRFGKYMDIEFDFKGDPLGGVISNYLLEKSRVVKQPRGERNFHVFYQLLSGASEELLNKLKLERDFSRYNYLSLDSAKVNGVDDAANFRTVRNAMQIVGFMDHEAESVLAVVAAVLKLGNIEFKPESRVNGLDESKIKDKNELKEICELTGIDQSVLERAFSFRTVEAKQEKVSTTLNVAQAYYARDALAKNLYSRLFSWLVNRINESIKAQTKVRKKVMGVLDIYGFEIFEDNSFEQFIINYCNEKLQQIFIELTLKEEQEEYIREDIEWTHIDYFNNAIICDLIENNTNGILAMLDEECLRPGTVTDETFLEKLNQVCATHQHFESRMSKCSRFLNDTSLPHSCFRIQHYAGKVLYQVEGFVDKNNDLLYRDLSQAMWKASHALIKSLFPEGNPAKINLKRPPTAGSQFKASVATLMKNLQTKNPNYIRCIKPNDKKAAHIFNEALVCHQIRYLGLLENVRVRRAGYAFRQAYEPCLERYKMLCKQTWPHWKGPARSGVEVLFNELEIPVEEYSFGRSKIFIRNPRTLFKLEDLRKQRLEDLATLIQKIYRGWKCRTHFLLMKKSQIVIAAWYRRYAQQKRYQQTKSSALVIQSYIRGWKARKILRELKHQKRCKEAVTTIAAYWHGTQARRELKRLKEEARRKHAVAVIWAYWLGLKVRREYRKFFRANAGKKIYEFTLQRIVQKYFLEMKNKMPSLSPIDKNWPSRPYLFLDSTHKELKRIFHLWRCKKYRDQFTDQQKLIYEEKLEASELFKDKKALYPSSVGQPFQGAYLEINKNPKYKKLKDAIEEKIIIAEVVNKINRANGKSTSRIFLLTNNNLLLADQKSGQIKSEVPLVDVTKVSMSSQNDGFFAVHLKEGSEAASKGDFLFSSDHLIEMATKLYRTTLSQTKQKLNIEISDEFLVQFRQDKVCVKFIQGNQKNGSVPTCKRKNNRLLEVAVP

SEQ ID NO: 45112 - protein, 1133 aa, Homo sapiens
MEVKTSLLDNMIGVGDMVLLEPLNEETFINNLKKRFDHSEIYTYIGSVVISVNPYRSLPIYSPEKVEEYRNRNFYELSPHIFALSDEAYRSLRDQDKDQCILITGESGAGKTEASKLVMSYVAAVCGKGAEVNQVKEQLLQSNPVLEAFGNAKTVRNDNSSRFGKYMDIEFDFKGDPLGGVISNYLLEKSRVVKQPRGERNFHVFYQLLSGASEELLNKLKLERDFSRYNYLSLDSAKVNGVDDAANFRTVRNAMQIVGFMDHEAESVLAVVAAVLKLGNIEFKPESRVNGLDESKIKDKNELKEICELTGIDQSVLERAFSFRTVEAKQEKVSTTLNVAQAYYARDALAKNLYSRLFSWLVNRINESIKAQTKVRKKVMGVLDIYGFEIFEDNSFEQFIINYCNEKLQQIFIELTLKEEQEEYIREDIEWTHIDYFNNAIICDLIENNTNGILAMLDEECLRPGTVTDETFLEKLNQVCATHQHFESRMSKCSRFLNDTSLPHSCFRIQHYAGKVLYQVEGFVDKNNDLLYRDLSQAMWKASHALIKSLFPEGNPAKINLKRPPTAGSQFKASVATLMKNLQTKNPNYIRCIKPNDKKAAHIFNEALVCHQIRYLGLLENVRVRRAGYAFRQAYEPCLERYKMLCKQTWPHWKGPARSGVEVLFNELEIPVEEYSFGRSKIFIRNPRTLFKLEDLRKQRLEDLATLIQKIYRGWKCRTHFLLMKKSQIVIAAWYRRYAQQKRYQQTKSSALVIQSYIRGWKARKILRELKHQKRCKEAVTTIAAYWHGTQARRELRRLKEEARNKHAIAVIWAYWLGSKARRELKRLKEEARRKHAVAVIWAYWLGLKVRREYRKFFRANAGKKIYEFTLQRIVQKYFLEMKNKMPSLSPIDKNWPSRPYLFLDSTHKELKRIFHLWRCKKYRDQFTDQQKLIYEEKLEASELFKDKKALYPSSVGQPFQGAYLEINKNPKYKKLKDAIEEKIIIAEVVNKINRANGKSTSRIFLLTNNNLLLADQKSGQIKSEVPLVDVTKVSMSSQNDGFFAVHLKEGSEAASKGDFLFSSDHLIEMATKLYRTTLSQTKQKLNIEISDEFLVQFRQDKVCVKFIQGNQKNGSVPTCKRKNNRLLEVAVP

SEQ ID NO: 45113 - protein, 25 aa, Homo sapiens
MRDSIHYYPGNDLHPDLEEPSSLGV

SEQ ID NO: 45114 - protein, 408 aa, Homo sapiens
MRQEKPSSPSPMPSSTPSPSLNLGNTEEAIRDNSQVNAVTVLTLLDKLVNMLDAVQENQHKMEQRQISLEGSVKGIQNDLTKLSKYQASTSNTVSKLLEKSRKVSAHTRAVKERMDRQCAQVKRLENNHAQLLRRNHFKVLIFQEENEIPASVFVKQPVSGAVEGKEELPDENKSLEETLHTVDLSSDDDLPHDEEALEDSAEEKVEESRAEKIKRSSLKKVDSLKKAFSRQNIEKKMNKLGTKIVSVERREKIKKSLTSNHQKISSGKSSPFKVSPLTFGRKKVREGESHAENETKSEDLPSSEQMPNDQEEESFAEGHSEASLASALVEGEIAEEAAEKATSRGSNSGMDSNIDLTIVEDEEEESVALEQAQKVRYEGSYALTSEEAERSDGDPVQPAVLQVHQTS

SEQ ID NO: 45115 - protein, 827 aa, Homo sapiens [sequence omitted]

SEQ ID NO: 45116 - protein, 348 aa, Homo sapiens [sequence omitted]

SEQ ID NO: 45117 - protein, 761 aa, Homo sapiens
MVLNRETKKMMKEKRPRSKLPRALRGLMGEANIRFARGEREEAILMCMEIIRQAPLAYEPFSTLAMIYEDQGDMEKSLQFELIAAHLNPSDTEEWVRLAEMSLEQDNIKQAIFCYTKALKYEPTNVRYLWERSSLYEQMGDHKMAMDGYRRILNLLSPSDGERFMQLARDMAKSYYEANDVTSAINIIDEAFSKHQGLVSMEDVNIAAELYISNKQYDKALEIITDFSGIVLEKKTSEEGTSEENKAPENVTCTIPDGVPIDITVKLMVCLVHLNILEPLNPLLTTLVEQNPEDMGDLYLDVAEAFLDVGEYNSALPLLSALVCSERYNLAVVWLRHAECLKALGYMERAAESYGKVVDLAPLHLDARISLSTLQQQLGQPEKALEALEPMYDPDTLAQDANAAQQELKLLLHRSTLLFSQGKMYGYVDTLLTMLAMLLKVAMNRAQVCLISSSKSGERHLYLIKVSRDKISDSNDQESANCDAKAIFAVLTSVLTKDDWWNLLLKAIYSLCDLSRFQEAELLVDSSLEYYSFYDDRQKRKELEYFGLSAAILDKNFRKAYNYIRIMVMENVNKPQLWNIFNQVTMHSQDVRHHRFCLRLMLKNPENHALCVLNGHNAFVSGSFKHALGQYVQAFRTHPDEPLYSFCIGLTFIHMASQKYVLRRHALIVQGFSFLNRYLSLRGPCQESFYNLGRGLHQLGLIHLAIHYYQKALELPPLVVEGIELDQLDLRRDIAYNLSLIYQSSGNTGMAQTLLYTYCSI

SEQ ID NO: 45118 - protein, 1031 aa, Homo sapiens
MLIHKTEDVNTLDSEKRTPLHVAAFLGDAEIIELLILSGARVNAKDNMWLTPLHRAVASRSEEAVQVLIKHSADVNARDKNWQTPLHVAAANKAVKCAEVIIPLLSSVNVSDRGGRTALHHAALNGHVEMVNLLLAKGANINAFDKKDRRALHWAAYMGHLDVVALLINHGAEVTCKDKKGYTPLHAAASNGQINVVKHLLNLGVEIDEINVYGNTALHIACYNGQDAVVNELIDYGANVNQPNNNGFTPLHFAAASTHGALCLELLVNNGADVNIQSKDGKSPLHMTAVHGRFTRSQTLIQNGGEIDCVDKDGNTPLHVAARYGHELLINTLITSGADTAKCGIHSMFPLHLAALNAHSDCCRKLLSSGFEIDTPDKFGRTCLHAAAAGGNVECIKLLQSSGADFHKKDKCGRTPLHYAAANCHFHCIETLVTTGANVNETDDWGRTALHYAAASDMDRNKTILGNAHDNSEELERARELKEKEATLCLEFLLQNDANPSIRDKEGYNSIHYAAAYGHRQCLELLLERTNSGFEESDSGATKSPLHLAAYNGHHQALEVLLQSLVDLDIRDEKGRTALDLAAFKGHTECVEALINQGASIFVKDNVTKRTPLHASVINGHTLCLRLLLEIADNPEAVDVKDAKGQTPLMLAVAYGHIDAVSLLLEKEANVDTVDILGCTALHRGIMTGHEECVQMLLEQEVSILCKDSRGRTPLHYAAARGHATWLSELLQMALSEEDCCFKDNQGYTPLHWACYNGNENCIEVLLEQKCFRKFIGNPFTPLHCAIINDHGNCASLLLGAIDSSIVSCRDDKGRTPLHAAAFADHVECLQLLLRHSAPVNAVDNSGKTALMMAAENGQAGAVDILVNSAQADLTVKDKDLNTPLHLACSKGHEKCALLILDKIQDESLINEKNNALQTPLHVAARNGLKVVVEELLAKGACVLAVDENGHTPALACAPNKDVADCLALILATMMPFSPSSTMMAVNFVCLKKDNLSRTTLSNLGSMVSLCSNNVGSEDGYNENDSDSETF

SEQ ID NO: 45119 - protein, 1158 aa, Homo sapiens
MNARTYMDVMREQHLTKEEREIRQQLAEKAKAGELKVVNGAAASQPPSKRKRRWDQTADQTPGATPKKLSSWDQAETPGHTPSLRWDETPGRAKGSETPGATPGSKIWDPTPSHTPAGAATPGRGDTPGHATPGHGGATSSARKNRWDETPKTERDTPGHGSGWAETPRTDRGGDSIGETPTPGASKRKSRWDETPASQMGGSTPVLTPGKTPIGTPAMNMATPTPGHIMSMTPEQLQAWRWEREIDERNRPLSDEELDAMFPEGYKVLPPPAGYVPIRTPARKLTATPTPLGGMTGFHMQTEDRTMKSVNDQPSGNLPFLKPDDIQYFDKLLVDVDESTLSPEEQKERKIMKLLLKIKNGTPPMRKAALRQITDKAREFGAGPLFNQILPLLMSPTLEDQERHLLVKVIDRILYKLDDLVRPYVHKILVVIEPLLIDEDYYARVEGREIISNLAKAAGLATMISTMRPDIDNMDEYVRNTTARAFAVVASALGIPSLLPFLKAVCKSKKSWQARHTGIKIVQQIAILMGCAILPHLRSLVEIIEHGLVDEQQKVRTISALAIAALAEAATPYGIESFDSVLKPLWKGIRQHRGKGLAAFLKAIGYLIPLMDAEYANYYTREVMLILIREFQSPDEEMKKIVLKVVKQCCGTDGVEANYIKTEILPPFFKHFWQHRMALDRRNYRQLVDTTVELANKVGAAEIISRIVDDLKDEAEQYRKMVMETIEKIMGNLGAADIDHKLEEQLIDGILYAFQEQTTEDSVMLNGFGTVVNALGKRVKPYLPQICGTVLWRLNNKSAKVRQQAADLISRTAVVMKTCQEEKLMGHLGVVLYEYLGEEYPEVLGSILGALKAIVNVIGMHKMTPPIKDLLPRLTPILKNRHEKVQENCIDLVGRIADRGAEYVSAREWMRICFELLELLKAHKKAIRRATVNTFGYIAKAIGPHDVLATLLNNLKVQERQNRVCTTVAIAIVAETCSPFTVLPALMNEYRVPELNVQNGVLKSLSFLFEYIGEMGKDYIYAVTPLLEDALMDRDLVHRQTASAVVQHMSLGVYGFGCEDSLNHLLNYVWPNVFETSPHVIQAVMGALEGLRVAIGPCRMLQYCLQGLFHPARKVRDVYWKIYNSIYIGSQDALIAHYPRIYNDDKNTYIRYELDYIL

SEQ ID NO: 45120 - protein, 429 aa, Homo sapiens [sequence omitted]

SEQ ID NO: 45121 - protein, 230 aa, Homo sapiens
MLPEKSQGKVLQATVVAVGSGSKGKDFYNWPDESFDEMDSTLAVQQYIQQNIRADCSNIDKILEPPEGQDEGVWKYEHLRQFCLELNGLAVKLQSECHPDTCTQMTATEQWIFLCAAHKTPKECPAIDYTRHTLDGAACLLNSNKYFPSRVSIKESSVAKLGSVCRRIYRIFSHAYFHHRQIFDEYENETFLCHRFTKFVMKYNLMSKDNLIVPILEEEVQNSVSGESEA

SEQ ID NO: 45122 - protein, 202 aa, Homo sapiens
MAEGTAVLRRNRPGTKAQYIQQNIRADCSNIDKILEPPEGQDEGVWKYEHLRQFCLELNGLAVKLQSECHPDTCTQMTATEQWIFLCAAHKTPKECPAIDYTRHTLDGAACLLNSNKYFPSRVSIKESSVAKLGSVCRRIYRIFSHAYFHHRQIFDEYENETFLCHRFTKFVMKYNLMSKDNLIVPILEEEVQNSVSGESEA

SEQ ID NO: 45123 - protein, 386 aa, Homo sapiens
MFSGRFPLKTDESGACVIDRDGRLFKYLLDYLHGEVQIPTDEQTRIALQEEADYFGIPYPYSLSDHLANEMETYSLRSNIELKKALTDFCDSYGLVCNKPTVWVLHYLNTSGASCESRIIGVYATKTDGTDAIEKQLGGRIHSKGIFKREAGNNVQYIWSYYSVAELKKMMDAFDAWEGKGVSYWRVPHELIECWTLEERPLLGSLRHMAPIRKRRLITFNEADESVNYKTGPKPVRFLGPSTSTQIKVKNSASVTVSPASAIQTSAGATANRFQSGSRRKAAQRSAPSRATALVGTGAPGHPQASPGAASAENGGTHLPPAKVLLSDKKPTPQRVIKLKRTPLCATAPCLPSPTATRQANSLKPLPGEAARALGVRTENGKNKGN

SEQ ID NO: 45124 - protein, 1260 aa, Homo sapiens [sequence omitted]

SEQ ID NO: 45125 - protein, 333 aa, Homo sapiens
MTEIYFSLLDEIVDTLGEGAFGKVVECIDHKAGGRHVAVKIVKNVDRYCEAARSEIQVLEHLNTTDPNSTFRCVQMLEWFEHHGHICIVFELLGLSTYDFIKENGFLPFRLDHIRKMAYQICKSVNFLHSNKLTHTDLKPENILFVQSDYTEAYNPKIKRDERTLINPDIKVVDFGSATYDDEHHSTLVSTRHYRAPEVILALGWSQPCDVWSIGCILIEYYLGFTVFPTHDSKEHLAMMERILGPLPKHMIQKTRKRKYFHHDRLDWDEHSSAGRYVSRRCKPLKEFMLSQDVEHERLFDLIQKMLEYDPAKRITLREALKHPFFDLLKKSI

SEQ ID NO: 45126 - protein, 45 aa, Homo sapiens [sequence omitted]

SEQ ID NO: 45127 - protein, 703 aa, Homo sapiens
MLQEKLKELEEENMALRSKACHIKTETVTYEEKEQQLVSDCVKELRETNAQMSRMTEELSGKSDELIRYQEELSSLLSQIVDLQHKLKEHVIEKEELKLHLQASKDAQRQLTMELHELQDRNMECLGMLHESQEEIKELRSRSGPTAHLYFSQSYGAFTGESLAAEIEGTMRKKLSLDEESSLFKQKAQQKRVFDTVRIANDTRGRSISFPALLPIPGSNRSSVIMTAKPFESGLQQTEDKSLLNQGSSSEEVAGSSQKMGQPGPSGDSDLATALHRLSLRRQNYLSEKQFFAEEWQRKIQVLADQKEGVSGCVTPTESLASLCTTQSEITDLSSASCLRGFMPEKLQIVKPLEGSQTLYHWQQLAQPNLGTILDPRPGVITKGFTQLPGDAIYHISDLEEDEEEGITFQVQQPLEVEEKLSTSKPVTGIFLPPITSAGGPVTVATANPGKCLSCTNSTFTFTTCRILHPSDITQVTPSSGFPSLSCGSSGSSSSNTAVNSPALSYRLSIGESITNRRDSTTTFSSTMSLAKLLQERGISAKVYHSPISENPLQPLPKSLAIPSTPPNSPSHSPCPSPLPFEPRVHLSENFLASRPAETFLQEMYGLRPSRNPPDVGQLKMNLVDRLKRLGIARVVKNPGAQENGRCQEAEIGPQKPDSAVYLNSGSSLLGGLRRNQSLPVIMGSFAAPVCTSSPKMGVLKED

SEQ ID NO: 45128 - protein, 1416 aa, Homo sapiens
MTDKEDHVIISDSHCCPLGVTLTESQAENHASTALSPSTETLDRQEEVFENTLVANDQSVATELNAVSAQITSSDAMSSQQNVMGTTEISSARNIPSYPDTQAVNEYLRKLSDHSVREDSEHGEKPVPSQPLLEEAIPNLHSPPTTSTSALNSLVVSCASAVGVRVAATYEAGALSLKKVMNFYSTTPCETGAQAGSSAIGPEGLKDSREEQVKQESMQGKKSSSLVDIREEETEGGSRRLSLPGLLSQVSPRLLRKAARVKTRTVVLTPTYSGEADALLPSLRTEVWTWGKGKEGQLGHGDVLPRLQPLCVKCLDGKEVIHLEAGGYHSLALTAKSQVYSWGSNTFGQLGHSDFPTTVPRLAKISSENGVWSIAAGRDYSLFLVDTEDFQPGLYYSGRQDPTEGDNLPENHSGSKTPVLLSCSKLGYISRVTAGKDSYLALVDKNIMGYIASLHELATTERRFYSKLSDIKSQILRPLLSLENLGTTTTVQLLQEVASRFSKLCYLIGQHGASLSSFLHGVKEARSLVILKHSSLFLDSYTEYCTSITNFLVMGGFQLLAKPAIDFLNKNQELLQDLSEVNDENTQLMEILNTLFFLPIRRLHNYAKVLLKLATCFEVASPEYQKLQDSSSCYECLALHLGRKRKEAEYTLGFWKTFPGKMTDSLRKPERRLLCESSNRALSLQHAGRFSVNWFILFNDALVHAQFSTHHVFPLATLWAEPLSEEAGGVNGLKITTPEEQFTLISSTPQEKTKWLRAISQAVDQALRGMSDLPPYGSGSSVQRQEPPISRSAKYTFYKDPRLKDATYDGRWLSGKPHGRGVLKWPDGKMYSGMFRNGLEDGYGEYRIPNKAMNKEDHYVGHWKEGKMCGQGVYSYASGEVFEGCFQDNMRHGHGLLRSGKLTSSSPSMFIGQWVMDKKAGYGVFDDITRGEKYMGMWQDDVCQGNGVVVTQFGLYYEGNFHLNKMMGNGVLLSEDDTIYEGEFSDDWTLSGKGTLTMPNGDYIEGYFSGEWGSGIKITGTYFKPSLYESDKDRPKVFRKLGNLAVPADEKWKAVFDECWRQLGCEGPGQGEVWKAWDNIAVALTTSRRQHRDSPEILSRSQTQTLESLEFIPQHVGAFSVEKYDDIRKYLIKACDTPLHPLGRLVETLVAVYRMTYVGVGANRRLLQEAVKEIKSYLKRIFQLVRFLFPELPEEGSTIPLSAPLPTERKSFCTGKSDSRSESPEPGYVVTSSGLLLPVLLPRLYPPLFMLYALDNDREEDIYWECVLRLNKQPDIALLGFLGVQRKFWPATLSILGESKKVLPTTKDACFASAVECLQQISTTFTPSDKLKVIQQTFEEISQSVLASLHEDFLWSMDDLFPVFLYVVLRARIRNLGSEVHLIEDLMDPYLQHGEQGIMFTTLKACYYQIQREKLN

SEQ ID NO: 45129 - protein, 576 aa, Homo sapiens
MGYIASLHELATTERRFYSKLSDIKSQILRPLLSLENLGTTTTVQLLQEVASRFSKLCYLIGQHGASLSSFLHGVKEARSLVILKHSSLFLDSYTEYCTSITNFLVMGGFQLLAKPAIDFLNKNQELLQDLSEVNDENTQLMEILNTLFFLPIRRLHNYAKVLLKLATCFEVASPEYQKLQDSSSCYECLALHLGRKRKEAEYTLGFWKTFPGKMTDSLRKPERRLLCESSNRALSLQHAGRFSVNWFILFNDALVHAQFSTHHVFPLATLWAEPLSEEAGGVNGLKITTPEEQFTLISSTPQEKTKWLRAISQAVDQALRGMSDLPPYGSGSSVQRQEPPISRSAKYTFYKDPRLKDATYDGRWLSGKPHGRGVLKWPDGKMYSGMFRNGLEDGYGEYRIPNKAMNKEDHYVGHWKEGKMCGQGVYSYASGEVFEGCFQDNMRHGHGLLRSGKLTSSSPSMFIGQWVMDKKAGYGVFDDITRGEKYMGMWQDDVCQGNGVVVTQFGLYYEGNFHLNKMMGNGVLLSEDDTIYEGEFSDDWTLSGKDNSGLIEQVGKCSLLPYFLKVCEALVLFLL

SEQ ID NO: 45130 - protein, 88 aa, Homo sapiens
MNSLRFLFEGQRIADNHTPKEAQWPTPAILALWEAEAGWITAGQELRPAWATWRNLISTKNRKSSQLGMEEEDVIEVYQEQTGGHSTV

SEQ ID NO: 45131 - protein, 414 aa, Homo sapiens [sequence omitted]

SEQ ID NO: 45132 - protein, 345 aa, Homo sapiens
MRDKATQTESAWAEEYSEKKKGSHKRSASWGSTDQLKEIAKLRQQLQRSKHSSRHHRDKERQSPFHGNHAAINQCQAPVPKSALIPVIPITKSTGSRFRNSVEGLNQEIEIIIKETGEKEEQLIPQDIPDGHRAPPPLVQRSSSTRSIDTQTPGGADRGSNNSSRSQSVSPTSFLTISNEGSEESPCSADDLLVDPRDKENGNNSPLPKYATSPKPNNSYMFKREPPEGCERVKVFEECSPKQLHEIPAFYCPDKNKVNFIPKSGSAFCLVSILKPLLPTPDLTLKGSGHSLTVTTGMTTTLLQPIAVASLSTNTEQDRVSRGTSTVMPSASLLPPPEPIEEAEG

SEQ ID NO: 45133 - protein, 360 aa, Homo sapiens
MPLDKHMEMENISSEEVVEIEYVEKYTAPQPEQCMFHDDWISSIKGAEEWILTGSYDKTSRIWSLEGKSIMTIVGHTDVVKDVAWVKKDSLSCLLLSASMDQTILLWEWNVERNKVKALHCCRGHAGSVDSIAVDGSGTKFCSGSWDKMLKIWSTVPTDEEDEMEESTNRPRKKQKTEQLGLTRTPIVTLSGHMEAVSSVLWSDAEEICSASWDHTIRVWDVESGSLKSTLTGNKVFNCISYSPLCKRLASGSTDRHIRLWDPRTKDGSLVSLSLTSHTGWVTSVKWSPTHEQQLISGSLDNIVKLWDTRSCKAPLYDLAAHEDKVLSVDWTDTGLLLSGGADNKLYSYRYSPTTSHVGA

SEQ ID NO: 45134 - protein, 1203 aa, Homo sapiens
MEPVKRSPLRQETNMANFSYRFSIYNLNEALNQGETVDLDALMADLCSIEQELSSIGSGNSKRQITETKATQKLPVSRHTLKHGTLKGLSSSSNRIAKPSHASYSLDDVTAQLEQASLSMDEAAQQSVLEDTKPLVTNQHRRTASAGTVSDAEVHSISNSSHSSITSAASSMDSLDIDKVTRPQELDLTHQGQPITEEEQAAKLKAEKIRVALEKIKEAQVKKLVIRVHMSDDSSKTMMVDERQTVRQVLDNLMDKSHCGYSLDWSLVETVSELQMERIFEDHENLVENLLNWTRDSQNKLIFMERIEKYALFKNPQNYLLGKKETAEMADRNKEVLLEECFCGSSVTVPEIEGVLWLKDDGKKSWKKRYFLLRASGIYYVPKGKAKVSRDLVCFLQLDHVNVYYGQDYRNKYKAPTDYCLVLKHPQIQKKSQYIKYLCCDDVRTLHQWVNGIRIAKYGKQLYMNYQEALKRTESAYDWTSLSSSSIKSGSSSSSIPESQSNHSNQSDSGVSDTQPAGHVRSQSIVSSVFSEAWKRGTQLEESSKARMESMNRPYTSLVPPLSPQPKIVTPYTASQPSPPLPPPPPPPPPPPPPPPPPPPPLPSQSAPSAGSAAPMFVKYSTITRLQNASQHSGALFKPPTPPVMQSQSVKPQILVPPNGVVPPPPPPPPPPTPGSAMAQLKPAPCAPSLPQFSAPPPPLKIHQVQHITQVAPPTPPPPPPIPAPLPPQAPPKPLVTIPAPTSTKTVAPVVTQAAPPTPTPPVPPAKKQPAFPASYIPPSPPTPPVPVPPPTLPKQQSFCAKPPPSPLSPVPSVVKQIASQFPPPPTPPAMESQPLKPVPANVAPQSPPAVKAKPKWQPSSIPVPSPDFPPPPPESSLVFPPPPPSPVPAPPPPPPPTASPTPDKSGSPGKKTSKTSSPGGKKPPPTPQRNSSIKSSSGAEHPEPKRPSVDSLVSKFTPPAESGSPSKETLPPPAAPPKPGKLNLSGVNLPGVLQQGCVSAKAPVLSGRGKDSVVEFPSPPSDSDFPPPPPETELPLPPIEIPAVFSGNTSPKVAVVNPQPQQWSKMSVKKAPPPTRPKRNDSTRLTQAEISEQPTMATVVPQVPTSPKSSLSVQPGFLADLNRTLQRKSITRHGSLSSRMSRAEPTATMDDMALPPPPPELLSDQQKAGYGGSHISGYATLRRGPPPAPPKRDQNTKLSRDW

SEQ ID NO: 45135 - protein, 1255 aa, Homo sapiens
MEPVKRSPLRQETNMANFSYRFSIYNLNEALNQGETVDLDALMADLCSIEQELSSIGSGNSKRQITETKATQKLPVSRHTLKHGTLKGLSSSSNRIAKPSHASYSLDDVTAQLEQASLSMDEAAQQSVLEDTKPLVTNQHRRTASAGTVSDAEVHSISNSSHSSITSAASSMDSLDIDKVTRPQELDLTHQGQPITEHAISLRCSSKQAKRHIDFTEEQAELTPHSYLDRETSLLLRNIAGKPSHLLTKEEQAAKLKAEKIRVALEKIKEAQVKKLVIRVHMSDDSSKTMMVDERQTVRQVLDNLMDKSHCGYSLDWSLVETVSELQMERIFEDHENLVENLLNWTRDSQNKLIFMERIEKYALFKNPQNYLLGKKETAEMADRNKEVLLEECFCGSSVTVPEIEGVLWLKDDGKKSWKKRYFLLRASGIYYVPKGKAKVSRDLVCFLQLDHVNVYYGQDYRNKYKAPTDYCLVLKHPQIQKKSQYIKYLCCDDVRTLHQWVNGIRIAKYGKQLYMNYQEALKRTESAYDWTSLSSSSIKSGSSSSSIPESQSNHSNQSDSGVSDTQPAGHVRSQSIVSSVFSEAWKRGTQLEESSKARMESMNRPYTSLVPPLSPQPKIVTPYTASQPSPPLPPPPPPPPPPPPPPPPPPPPLPSQSAPSAGSAAPMFVKYSTITRLQNASQHSGALFKPPTPPVMQSQSVKPQILVPPNGVVPPPPPPPPPPTPGSAMAQLKPAPCAPSLPQFSAPPPPLKIHQVQHITQVAPPTPPPPPPIPAPLPPQAPPKPLVTIPAPTSTKTVAPVVTQAAPPTPTPPVPPAKKQPAFPASYIPPSPPTPPVPVPPPTLPKQQSFCAKPPPSPLSPVPSVVKQIASQFPPPPTPPAMESQPLKPVPANVAPQSPPAVKAKPKWQPSSIPVPSPDFPPPPPESSLVFPPPPPSPVPAPPPPPPPTASPTPDKSGSPGKKTSKTSSPGGKKPPPTPQRNSSIKSSSGAEHPEPKRPSVDSLVSKFTPPAESGSPSKETLPPPAAPPKPGKLNLSGVNLPGVLQQGCVSAKAPVLSGRGKDSVVEFPSPPSDSDFPPPPPETELPLPPIEIPAVFSGNTSPKVAVVNPQPQQWSKMSVKKAPPPTRPKRNDSTRLTQAEISEQPTMATVVPQVPTSPKSSLSVQPGFLADLNRTLQRKSITRHGSLSSRMSRAEPTATMDDMALPPPPPELLSDQQKAGYGGSHISGYATLRRGPPPAPPKRDQNTKLSRDW

SEQ ID NO: 45136 - protein, 570 aa, Homo sapiens
MEPVKRSPLRQETNMANFSYRFSIYNLNEALNQGETVDLDALMADLCSIEQELSSIGSGNSKRQITETKATQKLPVSRHTLKHGTLKGLSSSSNRIAKPSHASYSLDDVTAQLEQASLSMDEAAQQSVLEDTKPLVTNQHRRTASAGTVSDAEVHSISNSSHSSITSAASSMDSLDIDKVTRPQELDLTHQGQPITEHSYLDRETSLLLRNIAGKPSHLLTKEEQAAKLKAEKIRVALEKIKEAQVKKLVIRVHMSDDSSKTMMVDERQTVRQVLDNLMDKSHCGYSLDWSLVETVSELQMERIFEDHENLVENLLNWTRDSQNKLIFMERIEKYALFKNPQNYLLGKKETAEMADRNKEVLLEECFCGSSVTVPEIEGVLWLKDDGKKSWKKRYFLLRASGIYYVPKGKAKVSRDLVCFLQLDHVNVYYGQDYRNKYKAPTDYCLVLKHPQIQKKSQYIKYLCCDDVRTLHQWVNGIRIAKYGKQLYMNYQEALKRTESAYDWTSLSSSSIKSGSSSSSIPESQSNHSNQSDSGVSDTQPAGHVRSQSIVSSVFSEAWKRGTQLEESSK

SEQ ID NO: 45137 - protein, 686 aa, Homo sapiens
MVEPGTTVLQACEKVGMQIPRFCYHERLSVAGNCRMCLVEIEKAPKVVAACAMPVMKGWNILTNSEKSKKAREGVMEFLLANHPLDCPICDQGGECDLQDQSMMFGNDRSRFLEGKRAVEDKNIGPLVKTIMTRCIQCTRCIRFASEIAGVDDLGTTGRGNDMQVGTYIEKMFMSELSGNIIDICPVGALTSKPYAFTARPWETRKTESIDVMDAVGSNIVVSTRTGEVMRILPRMHEDINEEWISDKTRFAYDGLKRQRLTEPMVRNEKGLLTYTSWEDALSRVAGMLQSFQGKDVAAIAGGLVDAEALVALKDLLNRVDSDTLCTEEVFPTAGAGTDLRSNYLLNTTIAGVEEADVVLLVGTNPRFEAPLFNARIRKSWLHNDLKVALIGSPVDLTYTYDHLGDSPKILQDIASGSHPFSQVLKEAKKPMVVLGSSALQRNDGAAILAAVSSIAQKIRMTSGVTGDWKVMNILHRIASQVAALDLGYKPGVEAIRKNPPKVLFLLGADGGCITRQDLPKDCFIIYQGHHGDVGAPIADVILPGAAYTEKSATYVNTEGRAQQTKVAVTPPGLAREDWKIIRALSEIAGMTLPYDTLDQVRNRLEEVSPNLVRYDDIEGANYFQQANELSKLVNQQLLADPLVPPQLTIKDFYMTDSISRASQTMAKCVKAVTEGAQAVEEPSIC

SEQ ID NO: 45138 - protein, 68 aa, Homo sapiens
MGFGDLKSPAGLQVLNDYLADKSYIEGYVPSQADVAVFEAVSSPPPADLCHALRWYNHIKSYEKEKAR

SEQ ID NO: 45139 - protein, 235 aa, Homo sapiens
MFASVFFLTVISLDHYIHLIHPVLSHRHRTLKNSLIVIIFIWLLASLIGGPALYFRDTVEFNNHTLCYNNFQKHDPDLTLIRHHVLTWVKFIIGYLFPLLTMSICYLCLIFKVKKRSILISSRHFWTILVVVVAFVVCWTPYHLFSIWELTIHHNSYSHHVMQAGIPLSTGLAFLNSCLNPILYVLISKKFQARFRSSVAEILKYTLWEVSCSGTVSEQLRNSETKNLCLLETAQ

SEQ ID NO: 45140 - protein, 2091 aa, Homo sapiens
MNSDKLVLWKDVKSQGKTLSAGLKFHERMGTKGSLRVKSPSKLAVNPNKTDMPSNKGIFEDTIAKNHEEFFSNMDCTQEEKHLVFNKTAFWEQKCSVSSEMKFDCISLQSASDQPQETAQDLSLWKEEQIDQEDNYESRGSEMSFDCSSSFHSLTDQSKVSAKEVNLSKEVRTDVQYKNNKSYVSKISSDCDDILHLVTNQSQMIVKEISLQNARHISLVDQSYESSSSETNFDCDASPQSTSDYPQQSVTEVNLPKEVHIGLVDKNYGSSSSEVSADSVFPLQSVVDRPPVAVTETKLRKKAHTSLVDNYGSSCSETSFDCDVSLESVVDHPQLTVKGRNLKGRQVHLKHKKRKPSSAKAHLDCDVSLGTVADESQRAVEKINLLKEKNADLMDMNCESHGPEMGFQADAQLADQSQVAEIERQKVDVDLENKSVQSSRSSLSSDSPASLYHSAHDEPQEALDEVNLKELNIDMEVRSYDCSSSELTFDSDPPLLSVTEQSHLDAEGKERHIDLEDESCESDSSEITFDSDIPLYSVIDQPEVAVYEEETVDLESKSNESCVSEITFDSDIPLHSGNDHPEVAVKEVIQKEEYIHLERKNDEPSGSEISSDSHAPLHSVTNSPEVAVKKLNPQKEEQVHLENKENEPIDSEVSLDYNIIFHSVTGRSEDPIKEISLHTKEHMYLENKSVFETSLDSDVPLQAATHKPEVIVKETWLQREKHAEFQGRSTEFSGSKTSLDSGVPHYSVTEPQVAVNKINRKKQYVLENKNDKCSGSEIILDSNVPPQSMTDQPQLAFLKEKHVNLKDKNSKSGDSKITFDSEQLQEAVKKIDQWKEEVIGLKNKINEPSTYKLIHHPDVSVQSVADQPKVAIKHVNLGNENHMYLEVKNSQYSCSEMNLDSGFLGQSIVNRPQITILEQEHIELEGKHNQCCGSEVSFDSDDPLQSVADRLRETVKEISLWKDEEVDTEDRRNEAKGFEIMYDSDVLQPVAGQPEEVVKEVSLWKEHVDLENKIVKPTDSRINFDSHEPLQSVTNKIPGANKEINLLREEHVCLDDKGYVPSDSEIIYVSNIPLQSVIKQPHILEEEHASLEDKSSNSYSPEESSDSNDSFQAAADELQKPVKEINLWKEDHIYLEDKSYKLGDFDVSYASHIPVQFVTDQSSVPVKEINLQKKDHNDLENKNCEVCGSEIKCHSCVHLQSEVDQPQVSYKEADLQKEEHVVMEEKTDQPSDSEMMYDSDVPFQIVVNQFPGSVKETHLPKVVLVDLVPGDSDYEVISDDIPLQLVTDPPQLTVKDISCINTECIDIEDKSCDFFGSEVRCNCKASTPSMTNQCKETFKIINRKKDYIILGEPSCQSCGSEMNFNVDASDQSMTYESQGPDEKMVKYIDSEDKSCGYNGSKGKFNLEDTSHRTTHRLQKAHKEASLRKDPRNAGLKGKSCQSSASAVDFGASSKSALHRRADKKKRSKLKHRDLEVSCEPDGFEMNFQCAPPLPSDTDQPQETVKKRHPCKKVSSDLKEKNHDSQSSSVLKVDSVRNLKKAKDVIEDNPDEPVLEALPHVPPSFVGKTWSQIMREDDIKINALVKEFREGRFHCYFDDDCETKKVSSKGKKKVTWADLQGKEDTAPTQAVSESDDIVCGISDIDDLSVALDKPCHRHPPAERPPKQKGRVASQCQTAKISHSTQTSCKNYPVMKRKIIRQEEDPPKSKCSRLQDDRKTKKKVKIGTVEFPASCTKVLKPMQPKALVCVLSSLNIKLKEGEGLPFPKMRHHSWDNDIRFICKYKRNIFDYYEPLIKQIVISPPLSVIVPEFERRNWVKIHFNRSNQNSSAGDNDADGQGSASAPLMAVPARYGFNSHQGTSDSSLFLEESKVLHARELPKKRNFQLTFLNHDVVKISPKSVRNKLLESQSKKKIHGKRVTTSSNKLGFPKKVYKPIILQQKPRKASEKQSIWIRTKPSDIIRKYISKYSVFLRHRYQSRSAFLGRYLKKKKSVVSRLKKAKRTAKVLLNSSVPPAGAEELSSAMANPPPKRPVRASCRVARRRKKTDESYHGRQKGPSTPVRAYDLRSSSCLQQRERMMTRLANKLRGNEVK

SEQ ID NO: 45141 - protein, 726 aa, Homo sapiens
MQKEITLPSRLIYYINQDSESPYHVLDTKARHQQKHNKAVHLAQASFQIEAFGSKFILDLILNNGLLSSDYVEIHYENGKPQYSKGGEHCYYHGSIRGVKDSKVALSTCNGLHGMFEDDTFVYMIEPLELVHDEKSTGRPHIIQKTLAGQYSKQMKNLTMERGDQWPFLSELQWLKRRKRAVNPSRGIFEEMKYLELMIVNDHKTYKKHRSSHAHTNNFAKSVVNLVDSIYKEQLNTRVVLVAVETWTEKDQIDITTNPVQMLHEFSKYRQRIKQHADAVHLISRVTFHYKRSSLSYFGGVCSRTRGVGVNEYGLPMAVAQVLSQSLAQNLGIQWEPSSRKPKCDCTESWGGCIMEETGVSHSRKFSKCSILEYRDFLQRGGGACLFNRPTKLFEPTECGNGYVEAGEECDCGFHVECYGLCCKKCSLSNGAHCSDGPCCNNTSCLFQPRGYECRDAVNECDITEYCTGDSGQCPPNLHKQDGYACNQNQGRCYNGECKTRDNQCQYIWGTKAAGSDKFCYEKLNTEGTEKGNCGKDGDRWIQCSKHDVFCGFLLCTNLTRAPRIGQLQGEIIPTSFYHQGRVIDCSGAHVVLDDDTDVGYVEDGTPCGPSMMCLDRKCLQIQALNMSSCPLDSKGKVCSGHGVCSNEATCICDFTWAGTDCSIRDPVRNLHPPKDEGPKGPSATNLIIGSIAGAILVAAIVLGGTGWGFKNVKKRRFDPTQQGPI

SEQ ID NO: 45142 - protein, 632 aa, Homo sapiens [sequence omitted]

SEQ ID NO: 45143 - protein, 1591 aa, Homo sapiens
MKQKTEPSLVVPGIDLPKEPPTPKEQKDWFIEMPTEAKKDEWGLVAPISPGPLTPMREKDVFDDIPKWEGKQFDSPMPSPFQGGSFTLPLDVMKNEIVTETSPFAPAFLQPDDKKSLQQTSGPATAKDSFKIEEPHEAKPDKMAEAPPSEAMTLPKDAHIPVVEEHVMGKVLEEEKEAINQETVQQRDTFTPSGQEPILTEKETELKLEEKTTISDKEAVPKESKPPKPADEEIGIIQTSTEHTFSEQKDQEPTTDMLKQDSFPVSLEQAVTDSAMTSKTLEKAMTEPSALIEKSSIQELFEMRVDDKDKIEGVGAATSAELDMPFYEDKSGMSKYFETSALKEEATKSIEPGSDYYELSDTRESVHESIDTMSPMHKNGDKEFQTGKESQPSPPAQEAGYSTLAQSYPSDLPEEPSSPQERMFTIDPKVYGEKRDLHSKNKDDLTLSRSLGLGGRSAIEQRSMSINLPMSCLDSIALGFNFGRGHDLSPLASDILTNTSGSMDEGDDYLPATTPALEKAPCFPVESKEEEQIEKVKATGEESTQAEISCESPFLAKDFYKNGTVMAPDLPEMLDLAGTRSRLASVSADAEVARRKSVPSETVVEDSRTGLPPVTDENHVIVKTDSQLEDLGYCVFNKYTVPLPSPVQDSENLSGESGTFYEGTDDKVRRDLATDLSLIEVKLAAAGRVKDEFSVDKEASAHISGDKSGLSKEFDQEKKANDRLDTVLEKSEEHADSKEHAKKTEEAGDEIETFGLGVTYEQALAKDLSIPTDASSEKAEKGLSSVPEIAEVEPSKKVEQGLDFAVQGQLDVKISDFGQMASGLNIDDRRATELKLEATQDMTPSSKAPQEADAFMGVESGHMKEGTKVSETEVKEKVAKPDLVHQEAVDKEESYESSGEHESLTMESLKADEGKKETSPESSLIQDEIAVKLSVEIPCPPAVSEADLATDERADVQMEFIQGPKEESKETPDISITPSDVAEPLHETIVSEPAEIQSEEEEIEAQGEYDKLLFRSDTLQITDLGVSGAREEFVETCPSEHKGVIESVVTIEDDFITVVQTTTDEGESGSHSVRFAALEQPEVERRPSPHDEEEFEVEEAAEAQAEPKDGSPEAPASPEREEVALSEYKTETYDDYKDETTIDDSIMDADSLWVDTQDDDRSIMTEQLETIPKEEKAEKEARRSSLEKHRKEKPFKTGRGRISTPERKVAKKEPSTVSRDEVRRKKAVYKKAELAKKTEVQAHSPSRKFILKPAIKYTRPTHLSCVKRKTTAAGGESALAPSVFKQAKDKVSDGVTKSPEKRSSLPRPSSILPPRRGVSGDRDENSFSLNSSISSSARRTTRSEPIRRAGKSGTSTPTTPGSTAITPGTPPSYSSRTPGTPGTPSYPRTPHTPGTPKSAILVPSEKKVAIIRTPPKSPATPKQLRLINQPLPDLKNVKSKIGSTDNIKYQPKGGQVQIVTKKIDLSHVTSKCGSLKNIRHRPGGGRVKIESVKLDFKEKAQAKVGSLDNAHHVPGGGNVKIDSQKLNFREHAKARVDHGAEIITQSPGRSSVASPRRLSNVSSSGSINLLESPQLATLAEDVTAALAKQGL

SEQ ID NO: 45144 - protein, 276 aa, Homo sapiens [sequence omitted]

SEQ ID NO: 45145 - protein, 1445 aa, Homo sapiens
MKGYSFGHPSSVAGEVVFNTGLGGYPEAITDPAYKGQILTMANPIIGNGGAPDTTALDELGLSKYLESNGIKVSGLLVLDYSKDYNHWLATKSLGQWLQEEKVPAIYGVDTRMLTKIIRDKGTMLGKIEFEGQPVDFVDPNKQNLIAEVSTKDVKVYGKGNPTKVVAVDCGIKNNVIRLLVKRGAEVHLVPWNHDFTKMEYDGILIAGGPGNPALAEPLIQNVRKILESDRKEPLFGISTGNLITGLAAGAKTYKMSMANRGQNQPVLNITNKQAFITAQNHGYALDNTLPAGWKPLFVNVNDQTNEGIMHESKPFFAVQFHPEVTPGPIDTEYLFDSFFSLIKKGKATTITSVLPKPALVASRVEVSKVLILGSGGLSIGQAGEFDYSGSQAVKAMKEENVKTVLMNPNIASVQTNEVGLKQADTVYFLPITPQFVTEVIKAEQPDGLILGMGGQTALNCGVELFKRGVLKEYGVKVLGTSVESIMATEDRQLFSDKLNEINEKIAPSFAVESIEDALKAADTIGYPVMIRSAYALGGLGSGICPNRETLMDLSTKAFAMTNQILVEKSVTGWKEIEYEVVRDADDNCVTVCNMENVDAMGVHTGDSVVVAPAQTLSNAEFQMLRRTSINVVRHLGIVGECNIQFALHPTSMEYCIIEVNARLSRSSALASKATGYPLAFIAAKIALGIPLPEIKNVVSGKTSACFEPSLDYMVTKIPRWDLDRFHGTSSRIGSSMKSVGEVMAIGRTFEESFQKALRMCHPSIEGFTPRLPMNKEWPSNLDLRKELSEPSSTRIYAIAKAIDDNMSLDEIEKLTYIDKWFLYKMRDILNMEKTLKGLNSESMTEETLKRAKEIGFSDKQISKCLGLTEAQTRELRLKKNIHPWVKQIDTLAAEYPSVTNYLYVTYNGQEHDVNFDDHGMMVLGCGPYHIGSSVEFDWCAVSSIRTLRQLGKKTVVVNCNPETVSTDFDECDKLYFEELSLERILDIYHQEACGGCIISVGGQIPNNLAVPLYKNGVKIMGTSPLQIDRAEDRSIFSAVLDELKVAQAPWKAVNTLNEALEFAKSVDYPCLLRPSYVLSGSAMNVVFSEDEMKKFLEEATRVSQEHPVVLTKFVEGAREVEMDAVGKDGRVISHAISEHVEDAGVHSGDATLMLPTQTISQGAIEKVKDATRKIAKAFAISGPFNVQFLVKGNDVLVIECNLRASRSFPFVSKTLGVDFIDVATKVMIGENVDEKHLPTLDHPIIPADYVAIKAPMFSWPRLRDADPILRCEMASTGEVACFGEGIHTAFLKAMLSTGFKIPQKGILIGIQQSFRPRFLGVAEQLHNEGFKLFATEATSDWLNANNVPATPVAWPSQEGQNPSLSSIRKLIRDGSIDLVINLPNNNTKFVHDNYVIRRTAVDSGIPLLTNFQVTKLFAEAVQKSRKVDSKSLFHYRQYSAGKAA

SEQ ID NO: 45146 - protein, 505 aa, Homo sapiens
MARLDFNLIRVVACNLYPFVKTVASPGVTVEEAVEQIDIGGVTLLRAAAKNHARVTVVCEPEDYVVVSTEMQSSESKDTSLETRRQLALKAFTHTAQYDEAISDYFRKQYSKGVSQMPLRYGMNPHQTPAQLYTLQPKLPITVLNGAPGFINLCDALNAWQLVKELKEALGIPAAASFKHVSPAGAAVGIPLSEDEAKVCMVYDLYKTLTPISAAYARARGADRMSSFGDFVALSDVCDVPTAKIISREVSDGIIAPGYEEEALTILSKKKNGNYCVLQMDQSYKPDENEVRTLFGLHLSQKRNNGVVDKSLFSNVVTKNKDLPESALRDLIVATIAVKYTQSNSVCYAKNGQVIGIGAGQQSRIHCTRLAGDKANYWWLRHHPQVLSMKFKTGVKRAEISNAIDQYVTGTIGEDEDLIKWKALFEEVPELLTEAEKKEWVEKLTEVSISSDAFFPFRDNVDRAKRSGVAYIAAPSGSAADKVVIEACDELGIILAHTNLRLFHH

SEQ ID NO: 45147 - protein, 79 aa, Homo sapiens
MVSTTTITFSMSRYLGSRSCFKAEYHIASKPLHKSCHSTCNAMNLKKLLVRESKCCDQATAANQWALGNCASLQKGKSI

SEQ ID NO: 45148 - protein, 281 aa, Homo sapiens
MSGLLKVWQVDTKEEVWSFEAGDLEWMEWHPRAPVLLAGTADGNTWMWKVPNGDCKTFQGPNCPATCGRVLPDGKRAVVGYEDGTIRIWDLKQGSPIHVLKGTEGHQGPLTCVAANQDGSLILTGSVDCQAKLVSATTGKVVGVFRPETVASQPSLGEGEESESNSVESLGFCSVMPLAAVGYLDGTLAIYDLATQTLRHQCQHQSGIVQLLWEAGTAVVYTCSLDGIVRLWDARTGRLLTDYRGHTAEILDFALSKDASLVVTTSGDHKAKVFCVQRPDR

SEQ ID NO: 45149 - protein, 71 aa, Homo sapiens [sequence omitted]

SEQ ID NO: 45150 - protein, 120 aa, Homo sapiens
MGELFECVLFTASLAKYADPVADLLDKWGAFRARLFRESCVFHRGNYVKDLSRLGRDLRRVLILDNSPASYVFHPDNAVPVASWFDNMSDTELHDLLPFFEQLSRVDDVYSVLRQPRPGS

SEQ ID NO: 45151 - protein, 135 aa, Homo sapiens
MGELFECVLFTASLAKYADPVADLLDKWGAFRARLFRESCVFHRGNYVKDLSRLGRDLRRVLILDNSPASYVFHPDNAVSAGWTGTGTGAETQEGVSPFRPPWPLGSPVGGWVPSQSFLHSLPVPAAHSPHPPAL

SEQ ID NO: 45152 - protein, 863 aa, Homo sapiens
MRLFLDAVHQNRLPAAMKPSQGSGSFGAILGSRTSQKETSRQLSYSDNQASAKRGSLETKDDIPFRKVLGNPGRGSIKTVAGSGIARTIPSLTSTSTPLRSGLLENRTEKRKRMISTGSELNEDYPKENDSSSNNKAMTDPSRKYLTSSREKQLSLKQSEENRTSGLLPLQSSSFYGSRAGSKEHSSGGTNLDRTNVSSQTPSAKRSLGFLPQPVPLSVKKLRCNQDYTGWNKPRVPLSSHQQQQLQGFSNLGNTCYMNAILQSLFSLQSFANDLLKQGIPWKKIPLNALIRRFAHLLVKKDICNSETKKDLLKKVKNAISATAERFSGYMQNDAHEFLSQCLDQLKEDMEKLNKTWKTEPVSGEENSPDISATRAYTCPVITNLEFEVQHSIICKACGEIIPKREQFNDLSIDLPRRKKPLPPRSIQDSLDLFFRAEELEYSCEKCGGKCALVRHKFNRLPRVLILHLKRYSFNVALSLNNKIGQQVIIPRYLTLSSHCTENTKPPFTLGWSAHMAMKFTFKSKSSLALCLDSDSEDELKRSVALSQRLCEMLGNEQQQEDLEKDSKLCPIEPDKSELENSGFDRMSEEELLAAVLEISKRDASPSLSHEDDDKPTSSPDTGFAEDDIQEMPENPDTMETEKPKTITELDPASFTEITKDCDENKENKTPEGSQGEVDWLQQYDMEREREEQELQQALAQSLQEQEAWEQKEDDDLKRATELSLQEFNNSFVDALGSDEDSGNEDVFDMEYTEAEAEELKRNAETGNLPHSYRLISVVSHIGSTSSSGHYISDVYDIKKQAWFTYNDLEVSKIQEAAVQSDRDRSGYIFFYMHKEIFDELLETEKNSQSLSTEVGKTTRQAL

SEQ ID NO: 45153 - protein, 245 aa, Homo sapiens
MLWHSFGTIAALLQEIVNIYPSINPPTLTAHQSNRVCNALALLQCVASHPETRSAFLAAHIPLFLYPFLHTVSKTRPFEYLRLTSLGVIGALVKTDEQEVINFLLTTEIIPLCLRIMESGSELSKTVATFILQKILLDDTGLAYICQTYERFSHVAMILGKMVLQLSKEPSARLLKHVVRCYLRLSDNPRAREALRQCLPDQLKDTTFAQVLKDDTTTKRWLAQLVKNLQEGQVTDPRGIPLPPQ

SEQ ID NO: 45154 - protein, 204 aa, Homo sapiens
MLWHSFGTIAALLQEIVNIYPSINPPTLTAHQSNRVCNALALLQCVASHPETRSAFLAAHIPLFLYPFLHTVSKTRPFEYLRLTSLGVIGALVKTDEQEVINFLLTTEIIPLCLRIMESGSELSKTVATFILQKILLDDTGLAYICQTYERFSHVAMILGKMVLQLSKEPSARLLKHVVRCYLRLSDNPRFSDLTFCWSSFQRK

SEQ ID NO: 45155 - protein, 1524 aa, Homo sapiens
MCPECKRCFKKRTHLVEHLHLHFPDPSLQCPNCQKFFTSKSKLKTHLLRELGEKAHHCPLCHYSAVERNALNRHMASMHEDISNFYSDTYACPVCREEFRLSQALKEHLKSHTAAAAAEPLPLRCFQEGCSYAAPDRKAFIKHLKETHGVRAVECRHHSCPMLFATAEAMEAHHKSHYAFHCPHCDFACSNKHLFRKHKKQGHPGSEELRCTFCPFATFNPVAYQDHVGKMHAHEKIHQCPECNFATAHKRVLIRHMLLHTGEKPHKCELCDFTCRDVSYLSKHMLTHSNTKDYMCTECGYVTKWKHYLRVHMRKHAGDLRYQCNQCSYRCHRADQLSSHKLRHQGKSLMCEVCAFACKRKYELQKHMASQHHPGTPAPLYPCHYCSYQSRHKQAVLSHENCKHTRLREFHCALCDYRTFSNTTLLFHKRKAHGYVPGDQAWQLRYASQEPEGAMQGPTPPPDSEPSNQLSARPEGPGHEPGTVVDPSLDQALPEMSEEVNTGRQEGSEAPHGGDLGGSPSPAEVEEGSCTLHLEALGVELESVTEPPLEEVTETAPMEFRPLGLEGPDGLEGPELSSFEGIGTSDLSAEENPLLEKPVSEPSTNPPSLEEAPNNWVGTFKTTPPAETAPLPPLPESESLLKALRRQDKEQAEALVLEGRVQMVVIQGEGRAFRCPHCPFITRREKALNLHSRTGCQGRREPLLCPECGASFKQQRGLSTHLLKKCPVLLRKNKGLPRPDSPIPLQPVLPGTQASEDTESGKPPPASQEAELLLPKDAPLELPREPEETEEPLATVSGSPVPPAGNSLPTEAPKKHCFDPVPPAGNSSPTEAPKKHHLDPVPPAGNSSPTEALKKHRFEQGKFHCNSCPFLCSRLSSITSHVAEGCRGGRGGGGKRGTPQTQPDVSPLSNGDSAPPKNGSTESSSGDGDTVLVQKQKGARFSCPTCPFSCQQERALRTHQIRGCPLEESGELHCSLCPFTAPAATALRLHQKRRHPTAAPARGPRPHLQCGDCGFTCKQSRCMQQHRRLKHEGVKPHQCPFCDFSTTRRYRLEAHQSRHTGIGRIPCSSCPQTFGTNSKLRLHRLRVHDKTPTHFCPLCDYSGYLRHDITRHVNSCHQGTPAFACSQCEAQFSSETALKQHALRRHPEPAQPAPGSPAETTEGPLHCSRCGLLCPSPASLRGHTRKQHPRLECGACQEAFPSRLALDEHRRQQHFSHRCQLCDFAARERVGLVKHYLEQHEETSAAVAASDGDGDAGQPPLHCPFCDFTCRHQLVLDHHVKGHGGTRLYKCTDCAYSTKNRQKITWHSRIHTGEKPYHCHLCPYACADPSRLKYHMRIHKEERKYLCPECGYKCKWVNQLKYHMTKHTGLKPYQCPECEYCTNRADALRVHQETRHREARAFMCEQCGKAFKTRFLLRTHLRKHSEAKPYVCNVCHRAFRWAAGLRHHALTHTDRHPFFCRLCNYKAKQKFQVVKHVRRHHPDQADPNQGVGKDPTTPTVHLHDVQLEDPSPPAPAAPHTGPEG

SEQ ID NO: 45156 - protein, 437 aa, Homo sapiens
MWMSYLGPQMHVNLASAPLLEQVMRQEGKYPVRNDMELWKEHRDQHDLTYGPFTTEGHHWYQLRQALNQRLLKPAEAALYTDAFNEVIDDFMTRLDQLRAESASGNQVSDMAQLFYYFALEAICYILFEKRIGCLQRSIPEDTVTFVRSIGLMFQNSLYATFLPKWTRPVLPFWKRYLDGWNAIFSFGKKLIDEKLEDMEAQLQAAGPDGIQVSGYLHFLLASGQLSPREAMGSLPELLMAGVDTTSNTLTWALYHLSKDPEIQEALHEEVVGVVPAGQVPQHKDFAHMPLLKAVLKETLRLYPVVPTNSRIIEKEIEVDGFLFPKNTQFVFCHYVVSRDPTAFSEPESFQPHRWLRNSQPATPRIQHPFGSVPFGYGVRACLGRRIAELEMQLLLARLIQKYKVVLAPETGELKSVARIVLVPNKKVGLQFLQRQC

SEQ ID NO: 45157 - protein, 160 aa, Homo sapiens
MGMSLALQCQVRELATLLHMKDLEIQDYQESGATLIRDRLKTEPFEENSFLEQFMIEKLPEACSIGDGKPFVMNLQDLYMAVTTQEVQVGQKHQGAGDPHTSNSASLQGIDSQCVNQPEQLVSSAPTLSAPEKESTGTSGPLQRPQLSKVKRKKPRGLFS

SEQ ID NO: 45158 - protein, 165 aa, Homo sapiens
MGMSLALQCQVRELATLLHMKDLEIQDYQESGATLIRDRLKTEPFEENSFLEQFMIEKLPEACSIGDGKPFVMNLQDLYMAVTTQEVQVGQKHQGAGEPSRGDPHTSNSASLQGIDSQCVNQPEQLVSSAPTLSAPEKESTGTSGPLQRPQLSKVKRKKPRGLFS

SEQ ID NO: 45159 - protein, 312 aa, Homo sapiens [sequence omitted]

SEQ ID NO: 45160 - protein, 147 aa, Homo sapiens [sequence omitted]

SEQ ID NO: 45161 - protein, 824 aa, Homo sapiens
MQDGLSPCFFFTLVPSTRMALGTLALVLALPCRRRERPAGADSLSWGAGPRISPYVLQLLLATLQAALPLAGLAGRVGTARGAPLPSYLLLASVLESLAGACGLWLLVVERSQARQRLAMGIWIKFRHSPGLLLLWTVAFAAENLALVSWNSPQWWWARADLGQQVQFSLWVLRYVVSGGLFVLGLWAPGLRPQSYTLQVHEEDQDVERSQVRSAAQQSTWRDFGRKLRLLSGYLWPRGSPALQLVVLICLGLMGLERALNVLVPIFYRNIVNLLTEKAPWNSLAWTVTSYVFLKFLQGGGTGSTGFVSNLRTFLWIRVQQFTSRRVELLIFSHLHELSLRWHLGRRTGEVLRIADRGTSSVTGLLSYLVFNVIPTLADIIIGIIYFSMFFNAWFGLIVFLCMSLYLTLTIVVTEWRTKFRRAMNTQENATRARAVDSLLNFETVKYYNAESYEVERYREAIIKYQGLEWKSSASLVLLNQTQNLVIGLGLLAGSLLCAYFVTEQKLQVGDYVLFGTYIIQLYMPLNWFGTYYRMIQTNFIDMENMFDLLKEETEVKDLPGAGPLRFQKGRIEFENVHFSYADGRETLQDVSFTVMPGQTLALVGPSGAGKSTILRLLFRFYDISSGCIRIDGQDISQVTQASLRSHIGVVPQDTVLFNDTIADNIRYGRVTAGNDEVEAAAQAAGIHDAIMAFPEGYRTQVGERGLKLSGGEKQRVAIARTILKAPGIILLDEATSALDTSNERAIQASLAKVCANRTTIVVAHRLSTVVNADQILVIKDGCIVERGRHEALLSRGGVYADMWQLQQGQEETSEDTKPQTMER

SEQ ID NO: 45162 - protein, 140 aa, Homo sapiens
MENGQERVEVEEDGQLKSVTINGVPDDLALGLELSRREQQPSVTSRSGGTQVQQTPASCPLDSDLSEDEDLQLAMAYSLSEMEAAGKKPAGGREAQHRRQGRPKAQHQDPGLGGTQEGARGEATKRSPSPEEKASRCLIL

SEQ ID NO: 45163 - protein, 93 aa, Homo sapiens [sequence omitted]

SEQ ID NO: 45164 - protein, 709 aa, Homo sapiens [sequence omitted]

SEQ ID NO: 45165 - protein, 167 aa, Homo sapiens
MEPLNSTHPGTAASSSPLESRAAGGGSGNGNEYFYILVVMSFYGIFLIGIMLGYMKSKRREKKSSLLLLYKDEERLWGEAMKPLPVVSGLRSVQVPLMLNMLQESVAPALSCTLCSMEGDSVSSESSSPDVHLTIQEEGADDELEETSETPLNESSEGSSENIHQNS

SEQ ID NO: 45166 - protein, 753 aa, Homo sapiens [sequence omitted]

SEQ ID NO: 45167 - protein, 2146 aa, Homo sapiens
MQEKPRLLEPLDYETVIEELEKTYRNDPLQDLLFFPSDDFSAATVSWDIRTLYSTVPEDAEHKAENLLVKEACKFYSSQWHVVNYKYEQYSGDIRQLPRAEYKPEKLPSHSFEIDHEDADKDEDTTSHSSSKGGGGAGGTGVFKSGWLYKGNFNSTVNNTVTVRSFKKRYFQLTQLPDNSYIMNFYKDEKISKEPKGCIFLDSCTGVVQNNRLRKYAFELKMNDLTYFVLAAETESDMDEWIHTLNRILQISPEGPLQGRRSTELTDLGLDSLDNSVTCECTPEETDSSENNLHADFAKYLTETEDTVKTTRNMERLNLFSLDPDIDTLKLQKKDLLEPESVIKPFEEKAAKRIMIICKALNSNLQGCVTENENDPITNIEPFFVSVALYDLRDSRKISADFHVDLNHAAVRQMLLGASVALENGNIDTITPRQSEEPHIKGLPEEWLKFPKQAVFSVSNPHSEIVLVAKIEKVLMGNIASGAEPYIKNPDSNKYAQKILKSNRQFCSKLGKYRMPFAWAVRSVFKDNQGNVDRDSRFSPLFRQESSKISTEDLVKLVSDYRRADRISKMQTIPGSLDIAVDNVPLEHPNCVTSSFIPVKPFNMMAQTEPTVEVEEFVYDSTKYCRPYRVYKNQIYIYPKHLKYDSQKCFNKARNITVCIEFKNSDEESAKPLKCIYGKPGGPLFTSAAYTAVLHHSQNPDFSDEVKIELPTQLHEKHHILFSFYHVTCDINAKANAKKKEALETSVGYAWLPLMKHDQIASQEYNIPIATSLPPNYLSFQDSASGKHGGSDIKWVDGGKPLFKVSTFVVSTVNTQDPHVNAFFQECQKREKDMSQSPTSNFIRSCKNLLNVEKIHAIMSFLPIILNQLFKVLVQNEEDEITTTVTRVLTDIVAKCHEEQLDHSVQSYIKFVFKTRACKERTVHEELAKNVTGLLKSNDSTTVKHVLKHSWFFFAIILKSMAQHLIDTNKIQLPRPQRFPESYQNELDNLVMVLSDHVIWKYKDALEETRRANHSVARFLKRCFTFMDRGYVFKMVNNYISMFSSGDLKTLCQYKFDFLQEVCQHEHFIPLCLPIRSANIPDPLTPSESTQELHASDMPEYSVTNEFCRKHFLIGILLREVGFALQEDQDVRHLALAVLKNLMAKHSFDDRYREPRKQAQIASLYMPLYGMLLDNMPRIYLKDLYPFTVNTSNQGSRDDLSTNGGFQSQTAIKHANSVDTSFSKDVLNSIAAFSSIAISTVNHADSRASLASLDSNPSTNEKSSEKTDNCEKIPRPLSLIGSTLRFDKLDQAETRSLLMCFLHIMKTISYETLIAYWQRAPSPEVSDFFSILDVCLQNFRYLGKRNIIRKIAAAFKFVQSTQNNGTLKGSNPSCQTSGLLSQWMHSTSSHEGHKQHRSQTLPIIRGKNALSNPKLLQMLDNTMTSNSNEIDIVHHVDTEANIATEVCLTILDLLSLFTQTHQRQLQQCDCQNSLMKRVFDTYMLFFQVNQSATALKHVFASLRLFVCKFPSAFFQGPADLCGSFCYEVLKCCNHRSRSTQTEASALLYFFMRKNFEFNKQKSIVRSHLQLIKAVSQLIADAGIGGSRFQHSLAITNNFANGDKQMKNSNFPAEVKDLTKRIRTVLMATAQMKEHEKDPEMLVDLQYSLANSYASTPELRRTWLESMAKIHARNGDLSEAAMCYIHIAALIAEYLKRKGYWKVEKICTASLLSEDTHPCDSNSLLTTPSGGSMFSMGWPAFLSITPNIKEEGAMKEDSGMQDTPYNENILVEQLYMCVEFLWKSERYELIADVNKPIIAVFEKQRDFKKLSDLYYDIHRSYLKVAEVVNSEKRLFGRYYRVAFYGQGFFEEEEGKEYIYKEPKLTGLSEISQRLLKLYADKFGADNVKIIQDSNKVNPKDLDPKYAYIQVTYVTPFFEEKEIEDRKTDFEMHHNINRFVFETPFTLSGKKHGGVAEQCKRRTILTTSHLFPYVKKRIQVISQSSTELNPIEVAIDEMSKKVSELNQLCTMEEVDMIRLQLKLQGSVSVKVNAGPMAYARAFLEETNAKKYPDNQVKLLKEIFRQFADACGQALDVNERLIKEDQLEYQEELRSHYKDMLSELSTVMNEQITGRDDLSKRGVDQTCTRVISKATPALPTVSISSSAEV

SEQ ID NO: 45168 - protein, 228 aa, Homo sapiens [sequence omitted]

SEQ ID NO: 45169 - protein, 354 aa, Homo sapiens
MLEYEKHGELKTKSIDLLDLGPSTDVSALVEEIQKAEPLLTASRTEQVKLLIQRLQEKLGQNSNHTFYLFKVLKAHILPLTNVALNKSGSCFITGSYDRTCKLWDTASGEELNTLEGHRNVVYAIAFNNPYGDKIATGSFDKTCKLWSVETGKCYHTFRGHTAEIVCLSFNPQSTLVATGSMDTTAKLWDIQNGEEVYTLRGHSAEIISLSFNTSGDRIITGSFDHTVVVWDADTGRKVNILIGHCAEISSASFNWDCSLILTGSMDKTCKLWDATNGKCVATLTGHDDEILDSCFDYTGKLIATASADDGVSLCRPGWSAVARSWLTATCASQVQAILLPQPPELCHVLGNHV

SEQ ID NO: 45170 - protein, 239 aa, Homo sapiens
MLEESRTCSSPELLDGVWPCQPLHFGLPASEMHFQTMLKSKLNVLTLKKEPLPAVIFHEPEAIELCTTTPLMKTRTHSGCKVTYLGKVSTTGMQFLSGCTEKPVIELWKKHTLAREDVFPANALLEIRPFQVWLHHLDHKGEATVHMDTFQVARIAYCTADHNVSPNIFAWVYREINDDLSYQMDCHAVECESKLEAKKLAHAMMEAFRKTFHSMKSDGRIHSNSSSEEVSQELESDDG

SEQ ID NO: 45171 - protein, 706 aa, Homo sapiens
MEEALFQHFMHQKLGIAYAIHKPFPFFEGLLDNSIITKRMYMESLEACRNLIPVSRVVHNILTQLERTFNLSLLVTLFSQINLREYPNLVTIYRSFKRVGASYEWQSRDTPILLEAPTGLAEGSSLHTPLALPPPQPPQPSCSPCAPRVSEPGTSSQQSDEILSESPSPSDPVLPLPALIQEGRSTSVTNDKLTSKMNAEEDSEEMPSLLTSTVQVASDNLIPQIRDKEDPQEMPHSPLGSMPEIRDNSPEPNDPEEPQEVSSTPSDKKGKKRKRCIWSTPKRRHKKKSLPGGTASSRHGIQKKLKRVDQVPQKKDDSTCNSTVETRAQKARTECARKSRSEEIIDGTSEMNEGKRSQKTPSTPRRVTQGAASPGHGIQEKLQVVDKVTQRKDDSTWNSEVMMRVQKARTKCARKSRLKEKKKEKDICSSSKRRFQKNIHRRGKPKSDTVDFHCSKLPVTCGEAKGILYKKKMKHGSSVKCIRNEDGTWLTPNEFEVEGKGRNAKNWKRNIRCEGMTLGELLKRKNSDECEVCCQGGQLLCCGTCPRVFHEDCHIPPVEAKRMLWSCTFCRMKRSSGSQQCHHVSKTLERQMQPQDQLKCEFLLLKAYCHPQSSFFTGIPFNIRDYGEPFQEAMWLDLVKERLITEMYTVAWFVRDMRLMFRNHKTFYKASDFGQVGLDLEAEFEKDLKDVLGFHEANDGGFWTLP

SEQ ID NO: 45172 - protein, 542 aa, Homo sapiens
MEEALFQHFMHQKLGIAYAIHKPFPFFEGLLDNSIITKRMYMESLEACRNLIPVSRVVHNILTQLERTFNLSLLVTLFSQINLREYPNLVTIYRSFKRVGASYEWQSRDTPILLEAPTGLAEGSSLHTPLALPPPQPPQPSCSPCAPRVSEPGTSSQQSDEILSESPSPSDPVLPLPALIQEGRSTSVTNDKLTSKMNAEEDSEEMPSLLTSTVQVASDNLIPQIRDKEDPQEMPHSPLGSMPEIRDNSPEPNDPEEPQEVSSTPSDKKGKKRKRCIWSTPKRRHKKKSLPGGTASSRHGIQKKLKRVDQVPQKKDDSTCNSTVETRAQKARTECARKSRSEEIIDGTSEMNEGKRSQKTPSTPRRVTQGAASPGHGIQEKLQVVDKVTQRKDDSTWNSEVMMRVQKARTKCARKSRLKEKKKEKDICSSSKRRFQKNIHRRGKPKSDTVDFHCSKLPVTCGEAKGILYKKKMKHGSSVKCIRNEDGTWLTPNEFEVEGKGRNAKNWKRNIRCEGMTLGELLKSGLLLCPPRINLKRELNSK

SEQ ID NO: 45173 - protein, 159 aa, Homo sapiens
MPHSPLGSMPEIRDNSPEPNDPEEPQEVSSTPSDKKGKKRKRCIWSTPKRRHKKKSLPGGTASSRHGIQKKLKRVDQVPQKKDDSTCNSTVETRAQKARTECARKSRSEEIIDGTSEMNEGKRSQKTPSTPRRVTQGKTWRLLVSEYSHQESKFRAVLH

SEQ ID NO: 45174 - protein, 557 aa, Homo sapiens
MNHLPAHSQSLQRLFTEDQDVDEGLVYDTVFKHFKRHKLEISNAIKKTFPFLEGLRDRELITNKMFEDSEDSCRNLVPVQRVVYNVLSELEKTFNLSVLEALFSEVNMQEYPDLIHIYKSFKNAIQDKLSFQESDRKEREERPDIKLSLKQGEVPESPEARKESDQACGKMDTVDIANNSTLGKPKRKRRKKKGHGWSRMGTRTQKNNQQNDNSKADGQLVSSEKKANMNLKDLSKIRGRKRGKPGTHFTQSDRAPQKRVRSRASRKHKDETVDFQAPLLPVTCGGVKGILHKEKLEQGTLAKCIQTEDGKWFTPMEFEIKGGYARSKNWRLSVRCGGWPLRRLMEEGSLPNPPRIYYRNKKRILKSQNNSSVDPCMRNLDECEVCRDGGELFCCDTCSRVFHEDCHIPPVESEKTPWNCIFCRMKESPGSQQCCQESEVLERQMCPEEQLKCEFLLLKVYCCSESSFFAKIPYYYYIREACQGLKEPMWLDKIKKRLNEHGYPQVEGFVQDMRLIFQNHRASYKYKDFGQMGLRLEAEFEKDFKEVFAIQETNGNS

SEQ ID NO: 45175 - protein, 171 aa, Homo sapiens
MKCIPYSVLLKDLEMRNLRELEDLIIEAVYTDIIQGKLDQRNQLLEVDFCIGRDIRKKDINNIVKTLHEWCDGCEAVLLGIEQQVLRANQYKENHNRTQQQVEAEIACFQREKRDVPLLNLITTAFFWLPTSRRHSKPPHPPRLRRWSSSWLNGSVPLTLSRGSPPRRCPK

SEQ ID NO: 45176 - protein, 91 aa, Homo sapiens
MLGEQFMVGEEICGAVVSVRFQEDIISIWNKTASDQATTARIRDTLRRVLNLPPNTIMEYKTHTDSIKMPGRLGPQRLLFQNLWKPRLNVP

SEQ ID NO: 45177 - protein, 80 aa, Homo sapiens
MLGEQFMVGEEICGAVVSVRFQEDIISIWNKTASDQATTARIRDTLRRVLNLPPNTIMEYKTHTDSIKDNSSFRNTKITL

SEQ ID NO: 45178 - protein, 82 aa, Homo sapiens
MLGEQFMVGEEICGAVVSVRFQEDIISIWNKTASDQATTARIRDTLRRVLNLPPNTIMEYKTHTDSIKAWEEFHGLVNSSGR

SEQ ID NO: 45179 - protein, 1031 aa, Homo sapiens
MYVEEEVFDCDNLYHCGTCDRLVKAAKSAKLRKLPPFLTVSLLRFNFDFVKCERYKETSCYTFPLRINLKPFCEQSELDDLEYIYDLFSVIIHKGGCYGGHYHVYIKDVDHLGNWQFQEEKSKPDVNLKDLQSEEEIDHPLMILKAILLEENNLIPVDQLGQKLLKKIGISWNKKYRKQHGPLRKFLQLHSQIFLLSSDESTVRLLKNSSLQAESDFQRNDQQIFKMLPPESPGLNNSISCPHWFDINDSKVQPIREKDIEQQFQGKESAYMLFYRKSQLQRPPEARANPRYGVPCHLLNEMDAANIELQTKRAECDSANNTFELHLHLGPQYHFFNGALHPVVSQTESVWDLTFDKRKTLGDLRQSIFQLLEFWEGDMVLSVAKLVPAGLHIYQSLGGDELTLCETEIADGEDIFVWNGVEVGGVHIQTGIDCEPLLLNVLHLDTSSDGEKCCQVIESPHVFPANAEVGTVLTALAIPAGVIFINSAGCPGGEGWTAIPKEDMRKTFREQGLRNGSSILIQDSHDDNSLLTKEEKWVTSMNEIDWLHVKNLCQLESEEKQVKISATVNTMVFDIRIKAIKELKLMKELADNSCLRPIDRNGKLLCPVPDSYTLKEAELKMGSSLGLCLGKAPSSSQLFLFFAMGSDVQPGTEMEIVVEETISVRDCLKLMLKKSGLQGDAWHLRKMDWCYEAGEPLCEEDATLKELLICSGDTLLLIEGQLPPLGFLKVPIWWYQLQGPSGHWESHQDQTNCTSSWGRVWRATSSQGASGNEPAQVSLLYLGDIEISEDATLAELKSQAMTLPPFLEFGVPSPAHLRAWTVERKRPGRLLRTDRQPLREYKLGRRIEICLEPLQKGENLGPQDVLLRTQVRIPGERTYAPALDLVWNAAQGGTAGSLRQRVADFYRLPVEKIEIAKYFPEKFEWLPISSWNQQITKRKKKKKQDYLQGAPYYLKDGDTIGVKNLLIDDDDDFSTIRDDTGKEKQKQRALGRRKSQEALHEQSSYILSSAETPARPRAPETSLSIHVGSFR

SEQ ID NO: 45180 - protein, 472 aa, Homo sapiens
MPEVSWQLGRSLNCTVKTYSTSYTLEDQDREFMVFADARWTAPLRSAFSLLTSSSNGIFDLFFSNCRSLFNDRKLVEYLKESCFDAVFLDPFDACGLIVAKYFSLPSVVFARGIFCHYLEEGAQCPAPLSYVPRLLLGFSDAMTFKERVWNHIMHLEEHLFCPYFFKNVLEIASEILQTPVTAYDLYSHTSIWLLRTDFVLEYPKPVMPNMIFIGGINCHQGKPVPMEFEAYINASGEHGIVVFSLGSMVSEIPEKKAMAIADALGKIPQTVLWRYTGTRPSNLANNTILVKWLPQNDLLGHPMTRAFITHAGSHGVYESICNGVPMVMMPLFGDQMDNAKRMETKGAGVTLNVLEMTSEDLENALKAVINDKSYKENIMRLSSLHKDRPVEPLDLAVFWVEFVMRHKGAPHLRPAAHDLTWYQYHSLDVIGFLLAVVLTVAFITFKCCAYGYRKCLGKKGRVKKAHKSKTH

SEQ ID NO: 45181 - protein, 491 aa, Homo sapiens
MKDIVEVLSDRGHEIVVVVPEVNLLLKESKYYTRKIYPVPYDQEELKNRYQSFGNNHFAERSFLTAPQTEYRNNMIVIGLYFINCQSLLQDRDTLNFFKESKFDALFTDPALPCGVILAEYLGLPSVYLFRGFPCSLEHTFSRSPDPVSYIPRCYTKFSDHMTFSQRVANFLVNLLEPYLFYCLFSKYEELASAVLKRDVDIITLYQKVSVWLLRYDFVLEYPRPVMPNMVFIGGINCKKRKDLSQEFEAYINASGEHGIVVFSLGSMVSEIPEKKAMAIADALGKIPQTVLWRYTGTRPSNLANNTILVKWLPQNDLLGHPMTRAFITHAGSHGVYESICNGVPMVMMPLFGDQMDNAKRMETKGAGVTLNVLEMTSEDLENALKAVINDKSYKENIMRLSSLHKDRPVEPLDLAVFWVEFVMRHKGAPHLRPAAHDLTWYQYHSLDVIGFLLAVVLTVAFITFKCCAYGYRKCLGKKGRVKKAHKSKTH

SEQ ID NO: 45182 - protein, 459 aa, Homo sapiens
MQNWNSRRRHRYKSRMNKTYCKGARRSQRSSKENFIPCSEPVKGTGALRDCKNVLDVSCRKTGLKLEKAFLEVNRPQIHKLDPSWKERKVTPSKYSSLIYFDSSATYNLDEENRFRTLKWLISPVKIVSRPTIRQGHGENRQREIEIRFDQLHREYCLSPRNQPRRMCLPDSWAMNMYRGGPASPGGLQGLETRRLSLPSSKAKAKSLSEAFENLGKRSLEAGRCLPKSDSSSSLPKTNPTHSATRPQQTSDLHVQGNSSGIFRKSVSPSKTLSVPDKEVPGHGRNRYDEIKEEFDKLHQKYCLKSPGQMTVPLCIGVSTDKASMEVRYQTEGFLGKLNPDPHFQGFQKLPSSPLGCRKSLLGSTAIEAPSSTCVARAITRDGTRDHQFPAKRPRLSEPQGSGRQGNSLGASDGVDNTVRPGDQGSSSQPNSEERGENTSYRMEEKSDFMLEKLETKSV

SEQ ID NO: 45183 - protein, 2983 aa, Homo sapiens
MHMFNLENFTSLHDIVGNLVSCVHSSVSPERAGDTETLKDITAQDSADIIFLIDGSNNTGSVNFAVILDFLVNLLEKLPIGTQQIRVGVVQFSDEPRTMFSLDTYSTKAQVLGAVKALGFAGGELANIGLALDFVVENHFTRAGGSRVEEGVPQVLVLISAGPSSDEIRYGVVALKQASVFSFGLGAQAASRAELQHIATDDNLVFTVPEFRSFGDLQEKLLPYIVGVAQRHIVLKPPTIVTQVIEVNKRDIVFLVDGSSALGLANFNAIRDFIAKVIQRLEIGQDLIQVAVAQYADTVRPEFYFNTHPTKREVITAVRKMKPLDGSALYTGSALDFVRNNLFTSSAGYRAAEGIPKLLVLITGGKSLDEISQPAQELKRSSIMAFAIGNKGADQAELEEIAFDSSLVFIPAEFRAAPLQGMLPGLLAPLRTLSGTPEVHSNKRDIIFLLDGSANVGKTNFPYVRDFVMNLVNSLDIGNDNIRVGLVQFSDTPVTEFSLNTYQTKSDILGHLRQLQLQGGSGLNTGSALSYVYANHFTEAGGSRIREHVPQLLLLLTAGQSEDSYLQAANALTRAGILTFCVGASQANKAELEQIAFNPSLVYLMDDFSSLPALPQQLIQPLTTYVSGGVEEVPLAQPESKRDILFLFDGSANLVGQFPVVRDFLYKIIDELNVKPEGTRIAVAQYSDDVKVESRFDEHQSKPEILNLVKRMKIKTGKALNLGYALDYAQRYIFVKSAGSRIEDGVLQFLVLLVAGRSSDRVDGPASNLKQSGVVPFIFQAKNADPAELEQIVLSPAFILAAESLPKIGDLHPQIVNLLKSVHNGAPAPVSGEKDVVFLLDGSEGVRSGFPLLKEFVQRVVESLDVGQDRVRVAVVQYSDRTRPEFYLNSYMNKQDVVNAVRQLTLLGGPTPNTGAALEFVLRNILVSSAGSRITEGVPQLLIVLTADRSGDDVRNPSVVVKRGGAVPIGIGIGNADITEMQTISFIPDFAVAIPTFRQLGTVQQVISERVTQLTREELSRLQPVLQPLPSPGVGGKRDVVFLIDGSQSAGPEFQYVRTLIERLVDYLDVGFDTTRVAVIQFSDDPKVEFLLNAHSSKDEVQNAVQRLRPKGGRQINVGNALEYVSRNIFKRPLGSRIEEGVPQFLVLISSGKSDDEVDDPAVELKQFGVAPFTIARNADQEELVKISLSPEYVFSVSTFRELPSLEQKLLTPITTLTSEQIQKLLASTRYPPPAVESDAADIVFLIDSSEGVRPDGFAHIRDFVSRIVRRLNIGPSKVRVGVVQFSNDVFPEFYLKTYRSQAPVLDAIRRLRLRGGSPLNTGKALEFVARNLFVKSAGSRIEDGVPQHLVLVLGGKSQDDVSRFAQVIRSSGIVSLGVGDRNIDRTELQTITNDPRLVFTVREFRELPNIEERIMNSFGPSAATPAPPGVDTPPPSRPEKKKADIVFLLDGSINFRRDSFQEVLRFVSEIVDTVYEDGDSIQVGLVQYNSDPTDEFFLKDFSTKRQIIDAINKVVYKGGRHANTKVGLEHLRVNHFVPEAGSRLDQRVPQIAFVITGGKSVEDAQDVSLALTQRGVKVFAVGVRNIDSEEVGKIASNSATAFRVGNVQELSELSEQVLETLHDAMHETLCPGVTDAAKACNLDVILGFDGSRDQNVFVAQKGFESKVDAILNRISQMHRVSCSGGRSPTVRVSVVANTPSGPVEAFDFDEYQPEMLEKFRNMRSQHPYVLTEDTLKVYLNKFRQSSPDSVKVVIHFTDGADGDLADLHRASENLRQEGVRALILVGLERVVNLERLMHLEFGRGFMYDRPLRLNLLDLDYELAEQLDNIAEKACCGVPCKCSGQRGDRGPIGSIGPKGIPGEDGYRGYPGDEGGPGERGPPGVNGTQGFQGCPGQRGVKGSRGFPGEKGEVGEIGLDGLDGEDGDKGLPGSSGEKGNPGRRGDKGPRGEKGERGDVGIRGDPGNPGQDSQERGPKGETGDLGPMGVPGRDGVPGGPGETGKNGGFGRRGPPGAKGNKGGPGQPGFEGEQGTRGAQGPAGPAGPPGLIGEQGISGPRGSGGAAGAPGERGRTGPLGRKGEPGEPGPKGGIGNRGPRGETGDDGRDGVGSEGRRGKKGERGFPGYPGPKGNPGEPGLNGTTGPKGIRGRRGNSGPPGIVGQKGDPGYPGPAGPKGNRGDSIDQCALIQSIKDKCPCCYGPLECPVFPTELAFALDTSEGVNQDTFGRMRDVVLSIVNDLTIAESNCPRGARVAVVTYNNEVTTEIRFADSKRKSVLLDKIKNLQVALTSKQQSLETAMSFVARNTFKRVRNGFLMRKVAVFFSNTPTRASPQLREAVLKLSDAGITPLFLTRQEDRQLINALQINNTAVGHALVLPAGRDLTDFLENVLTCHVCLDICNIDPSCGFGSWRPSFRDRRAAGSDVDIDMAFILDSAETTTLFQFNEMKKYIAYLVRQLDMSPDPKASQHFARVAVVQHAPSESVDNASMPPVKVEFSLTDYGSKEKLVDFLSRGMTQLQGTRALGSAIEYTIENVFESAPNPRDLKIVVLMLTGEVPEQQLEEAQRVILQAKCKGYFFVVLGIGRKVNIKEVYTFASEPNDVFFKLVDKSTELNEEPLMRFGRLLPSFVSSENAFYLSPDIRKQCDWFQGDQPTKNLVKFGHKQVNVPNNVTSSPTSNPVTTTKPVTTTKPVTTTTKPVTTTTKPVTIINQPSVKPAAAKPAPAKPVAAKPVATKMATVRPPVAVKPATAAKPVAAKPAAVRPPAAAAAKPVATKPEVPRPQAAKPAATKPATTKPMVKMSREVQVFEITENSAKLHWERAEPPGPYFYDLTVTSAHDQSLVLKQNLTVTDRVIGGLLAGQTYHVAVVCYLRSQVRATYHGSFSTKKSQPPPPQPARSASSSTINLMVSTEPLALTETDICKLPKDEGTCRDFILKWYYDPNTKSCARFWYGGCGGNENKFGSQKECEKVCAPVLAKPGVISVMGT

SEQ ID NO: 45184 - protein, 709 aa, Homo sapiens
MPGLSAATLASLGGTSSRRGSGDTSISIDTEASIREIKELNELKDQIQDVEGKYMQGLKEMKDSLAEVEEKYKKAMVSNAQLDNEKTNFMYQVDTLKDMLLELEEQLAESRRQYEEKNKEFEREKHAHSILQFQFAEVKEALKQREEMLEKHGIILNSEIATNGETSDTLNNVGYQGPTKMTKEELNALKSTGDGTLGRASEVEVKNEIVANVGKREILHNTEKEQHTEDTVKDCVDIEVFPAGENTEDQKSSEDTAPFLGTLAGATYEEQVQSQILESSSLPENTVQVESNEVMGAPDDRTRTPLEPSNCWSDLDGGNHTENVGEAAVTQVEEQAGTVASCPLGHSDDTVYHDDKCMVEVPQELETSTGHSLEKEFTNQEAAEPKEVPAHSTEVGRDHNEEEGEETGLRDEKPIKTEVPGSPAGTEGNCQEATGPSTVDTQNEPLDMKEPDEEKSDQQGEALDSSQKKTKNKKKKNKKKKSPVPVETLKDVKKELTYQNTDLSEIKEEEQVKSTDRKSAVEAQNEVTENPKQKIAAESSENVDCPENPKIKLDGKLDQEGDDVQTAAEEVLADGDTLDFEDDTVQSSGPRAGGEELDEGVAKDNAKIDGATQSSPAEPKSEDADRCTLPEHESPSQDISDACEAESTERCEMSEHPSQTVRKALDSNSLENDDLSAPGREPGHFNPESREDTRGGNEKGKSKEDCTMS

SEQ ID NO: 45185 - protein, 40 aa, Homo sapiens
MSEDLLNFDDPLNIEAAEHHLRDKEDFRNKVDDYIKRYAR

SEQ ID NO: 45186 - protein, 284 aa, Homo sapiens [sequence omitted]

SEQ ID NO: 45187 - protein, 1172 aa, Homo sapiens
MMAKSEHNPSTSGCSSDQSSKVDTHKELIKTLKELKVHLPADKKAKGKASTLATLKYALRSVKQVKANEEYYQLLMSSEGHPCGADVPSYTVEEMESVTSEHIVKNADMFAVAVSLVSGKILYISDQVASIFHCKRDAFSDAKFVEFLAPHDVGVFHSFTSPYKLPLWSMCSGADSFTQECMEEKSFFCRVSVRKSHENEIRYHPFRMTPYLVKVRDQQGAESQLCCLLLAERVHSGYEAPRIPPEKRIFTTTHTPNCLFQDVDERAVPLLGYLPQDLIETPVLVQLHPSDRPLMLAIHKKILQSGGQPFDYSPIRFRARNGEYITLDTSWSSFINPWSRKISFIIGRHKVRVGPLNEDVFAAHPCTEEKALHPSIQELTEQIHRLLLQPVPHSGSSGYGSLGSNGSHEHLMSQTSSSDSNGHEDSRRRRAEICKNGNKTKNRSHYSHESGEQKKKSVTEMQTNPPAEKKAVPAMEKDSLGVSFPEELACKNQPTCSYQQISCLDSVIRYLESCNEAATLKRKCEFPANVPALRSSDKRKATVSPGPHAGEAEPPSRVNSRTGVGTHLTSLALPGKAESVASLTSQCSYSSTIVHVGDKKPQPELEMVEDAASGPESLDCLAGPALACGLSQEKEPFKKLGLTKEVLAAHTQKEEQSFLQKFKEIRKLSIFQSHCHYYLQERSKGQPSERTAPGLRNTSGIDSPWKKTGKNRKLKSKRVKPRDSSESTGSGGPVSARPPLVGLNATAWSPSDTSQSSCPAVPFPAPVPAAYSLPVFPAPGTVAAPPAPPHASFTVPAVPVDLQHQFAVQPPPFPAPLAPVMAFMLPSYSFPSGTPNLPQAFFPSQPQFPSHPTLTSEMASASQPEFPSRTSIPRQPCACPATRATPPSAMGRASPPLFQSRSSSPLQLNLLQLEEAPEGGTGAMGTTGATETAAVGADCKPGTSRDQQPKAPLTRDEPSDTQNSDALSTSSGLLNLLLNEDLCSASGSAASESLGSGSLGCDASPSGAGSSDTSHTSKYFGSIDSSENNHKAKMNTGMEESEHFIKCVLQDPIWLLMADADSSVMMTYQLPSRNLEAVLKEDREKLKLLQKLQPRFTESQKQELREVHQWMQTGGLPAAIDVAECVYCENKEKGNICIPYEEDIPSLGLSEVSDTKEDENGSPLNHRIEEQT

SEQ ID NO: 45188 - protein, 19 aa, Homo sapiens
MQWEHSRMIKSKTMSPAST

SEQ ID NO: 45189 - protein, 1089 aa, Homo sapiens
MSSQSHPDGLSGRDQPVELLNPARVNHMPSTVDVATALPLQVAPSAVPMDLRLDHQFSLPVAEPALREQQLQQELLALKQKQQIQRQILIAEFQRQHEQLSRQHEAQLHEHIKQQQEMLAMKHQQELLEHQRKLERHRQEQELEKQHREQKLQQLKNKEKGKESAVASTEVKMKLQEFVLNKKKALAHRNLNHCISSDPRYWYGKTQHSSLDQSSPPQSGVSTSYNHPVLGMYDAKDDFPLRKTASEPNLKLRSRLKQKVAERRSSPLLRRKDGPVVTALKKRPLDVTDSACSSAPGSGPSSPNNSSGSVSAENGIAPAVPSIPAETSLAHRLVAREGSAAPLPLYTSPSLPNITLGLPATGPSAGTAGQQDAERLTLPALQQRLSLFPGTHLTPYLSTSPLERDGGAAHSPLLQHMVLLEQPPAQAPLVTDWYLSGLGALPLHAQSLVGADRVSPSIHKLRQHRPLGRTQSAPLPQNAQALQHLVIQQQHQQFLEKHKQQFQQQQLQMNKIIPKPSEPARQPESHPEETEEELREHQALLDEPYLDRLPGQKEAHAQAGVQVKQEPIESDEEEAEPPREVEPGQRQPSEQELLFRQQALLLEQQRIHQLRNYQASMEAAGIPVSFGGHRPLSRAQSSPASATFPVSVQEPPTKPRFTTGLVYDTLMLKHQCTCGSSSSHPEHAGRIQSIWSRLQETGLRGKCECIRGRKATLEELQTVHSEAHTLLYGTNPLNRQKLDSKKLLGSLASVFVRLPCGGVGVDSDTIWNEVHSAGAARLAVGCVVELVFKVATGELKNGFAVVRPPGHHAEESTPMGFCYFNSVAVAAKLLQQRLSVSKILIVDWDVHHGNGTQQAFYSDPSVLYMSLHRYDDGNFFPGSGAPDEVGTGPGVGFNVNMAFTGGLDPPMGDAEYLAAFRTVVMPIASEFAPDVVLVSSGFDAVEGHPTPLGGYNLSARCFGYLTKQLMGLAGGRIVLALEGGHDLTAICDASEACVSALLGNELDPLPEKVLQQRPNANAVRSMEKVMEIHSKYWRCLQRTTSTAGRSLIEAQTCENEEAETVTAMASLSVGVKPAEKRPDEEPMEEEPPL

SEQ ID NO: 45190 - protein, 476 aa, Homo sapiens
MEHPVPAYLVALVAGDLKPADIGPRSRVWAEPCLLPTATSKLSGAVEQWLSAAERLYGPYMWGRYDIVFLPPSFPIVAMENPCLTFIISSILESDEFLVIDVIHEVAHSWFGNAVTNATWEEMWLSEGLATYAQRRITTETYGAAFTCLETAFRLDALHRQMKLLGEDSPVSKLQVKLEPGVNPSHLMNLFTYEKGYCFVYYLSQLCGDPQRFDDFLRAYVEKYKFTSVVAQDLLDSFLSFFPELKEQSVDCRAGLEFERWLNATGPPLAEPDLSQGSSLTRPVEALFQLWTAEPLDQAAASASAIDISKWRTFQTALFLDRLLDGSPLPQEVVMSLSKCYSSLLDSMNAEIRIRWLQIVVRNDYYPDLHRVRRFLESQMSRMYTIPLYEDLCTGALKSFALEVFYQTQGRLHPNLRRAIQQILSQGLGSSTEPASEPSTELGKAEADTDSDAQALLLGDEAPSSAISLRDVNVSA

SEQ ID NO: 45191 - protein, 444 aa, Homo sapiens
MLDGYAVTYVSSDGSYRRTDFVDRTRSSHQLQALAAGRAYNISVFSVKRNSNNKNDISRPAVLLARTRPRPVEGFEVTNVTASTISVQWALHRIRHATVSGVRVSIRHPEALRDQATDVDRSVDRFTFRALLPGKRYTIQLTTLSGLRGEEHPTESLATAPTHVWTRPLPPANLTAARVTATSAHVVWDAPTPGSLLEAYVINVTTSQSTKSRYVPNGKLASYTVRDLLPGRRYQLSVIAVQSTELGPQHSEPAHLYIITSPRDGADRRWHQGGHHPRVLKNRPPPARLPELRLLNDHSAPETPTQPPRFSELVDGRGRVSARFGGSPSKAATVRSHVPGNCSENPCQNGGTCVPGADAHSCDCGPGFKGRRCELACIKVSRPCTRLFSETKAFPVWEGGVCHHVYKRVYRVHQDICFKESCESTSLKKTPNRKQSKSQTLEKS

SEQ ID NO: 45192 - protein, 360 aa, Homo sapiens [sequence omitted]

SEQ ID NO: 45193 - protein, 266 aa, Homo sapiens
MMEVDRRVESEESGDEEGKKHSSGIVADLSEQSLKDGEERGEEDPEEEHELPVDMETINLDRDAEDVDLNHYRIGKIEGFEVLKKVKTLCLRQNLIKCIENLEELQSLRELDLYDNQIKKIENLEALTELEILDISFNLLRNIEGVDKLTRLKKLFLVNNKISKIENLSNLHQLQMLELGSNRIRAIENIDTLTNLESLFLGKNKITKLQNLDALTNLTVLSMQSNRLTKIEGLQNLVNLRELYLSHNGIEVIEGLENNVQDSLTY

SEQ ID NO: 45194 - protein, 346 aa, Homo sapiens [sequence omitted]

SEQ ID NO: 45195 - protein, 1016 aa, Homo sapiens
MQEKHLHLRVKLLDNTMEIFDIEPKCDGQVLLTQVWKRLNLVECDYFGMEFQNTQSYWIWLEPMKPIIRQIRRPKNVVLRLAVKFFPPDPGQLQEEYTRYLFALQLKRDLLEERLTCADTTAALLTSHLLQSEIGDYDETLDREHLKVNEYLPGQQHCLEKILEFHQKHVGQTPAESDFQVLEIARKLEMYGIRFHMASDREGTKIQLAVSHMGVLVFQGTTKINTFNWSKVRKLSFKRKRFLIKLHPEVHGPYQDTLEFLLGSRDECKNFWKICVEYHTFFRLLDQPKPKAKAVFFSRGSSFRYSGRTQKQLVDYFKDSGMKRIPYERRHSKTHTSVRALTADLPKQSISFPEGLRTPASPSSANAFYSLSPSTLVPSGLPEFKDSSSSLTDPQVSYVKSPAAERRSGAVAGGPDTPSAQPLGPPALQPGPGLSTKSPQPSPSSRKSPLSLSPAFQVPLGPAEQGSSPLLSPVLSDAGGAGMDCEEPRHKRVPADEAYFIVKEILATERTYLKDLEVITVWFRSAVVKEDAMPATLMTLLFSNIDPIYEFHRGFLREVEQRLALWEGPSKAHTKGSHQRIGDILLRNMRQLKEFTSYFQRHDEVLTELEKATKRCKKLEAVYKEFELQKVCYLPLNTFLLKPIQRLLHYRLLLRRLCGHYSPGHHDYADCHDALKAITEVTTTLQHILIRLENLQKLTELQRDLVGIENLIAPGREFIREGCLHKLTKKGLQQRMFFLFSDMLLYTSKGVAGTSHFRIRGLLPLQGMLVEESDNEWSVPHCFTIYAAQKTIVVAASTRLEKEKWMLDLNSAIQAAKSGGDTAPALPGRTVCTRPPRSPNEVSLEQESEDDARGVRSSLEGHGQHRANTTMHVCWYRNTSVSRADHSAAVENQLSGYLLRKFKNSHGWQKLWVVFTNFCLFFYKTHQDDYPLASLPLLGYSVSIPREADGIHKDYVFKLQFKSHVYFFRAESKYTFERWMEVIQGASSSAGRAPSIVQDGPQPSSGLEGMVRGKEE

SEQ ID NO: 45196 - protein, 236 aa, Homo sapiens
MYLEHYLDSIENLPCELQRNFQLMRELDQRTEDKKAEIDILAAEYISTVKTLSPDQRVERLQKIQNAYSKCKEYSDDKVQLAMQTYEMVDKHIRRLDADLARFEADLKDKMEGSDFESSGGRGLKKGRGQKEKRGSRGRGRRTSEEDTPKKKKHKGGSEFTDTILSVHPSDVLDMPVDPNEPTYCLCHQVSYGEMIGCDNPDCPIEWFHFACVDLTTKPKGKWFCPRCVQEKRKKK

SEQ ID NO: 45197 - protein, 202 aa, Homo sapiens
MYLEHYLDSIENLPCELQRNFQLMRELDQRTEDKKAEIDILAAEYISTVKTLSPDQRVERLQKIQNAYSKCKEYSDDKVQLAMQTYEMVDKHIRRLDADLARFEADLKDKMEGSDFESSGGRGLKKGRGQKEKRGSRGRGRRTSEEDTPKKKKHKGGGNSVLSLPAPSCSEPEGPVPTVPFLRESGTPPGLFLTQCCFSRVC

SEQ ID NO: 45198 - protein, 215 aa, Homo sapiens [sequence omitted]

SEQ ID NO: 45199 - protein, 483 aa, Homo sapiens
MKCAIWLAEQRVPLSVQLKPEVSPTQDIRLWVSVEDAQMHTVTIWLTVRPDMTVASLKDMVFLDYGFPPVLQQWVIGQRLARDQETLHSHGVRQNGDSAYLYLLSARNTSLNPQELQRERQLRMLEDLGFKDLTLQPRGPLEPGPPKPGVPQEPGRGQPDAVPEPPPVGWQCPGCTFINKPTRPGCEMCCRARPEAYQVPASYQPDEEERARLAGEEEALRQYQQRKQQQQEGNYLQHVQLDQRSLVLNTEPAECPVCYSVLAPGEAVVLRECLHTFCRECLQGTIRNSQEAEVSCPFIDNTYSCSGKLLEREIKALLTPEDYQRFLDLGISIAENRSAFSYHCKTPDCKGWCFFEDDVNEFTCPVCFHVNCLLCKAIHEQMNCKEYQEDLALRAQNDVAARQTTEMLKVMLQQGEAMRCPQCQIVVQKKDGCDWIRCTVCHTEICWVTKGPRWGPGGPGDTSGGCRCRVNGIPCHPSCQNCH

SEQ ID NO: 45200 - protein, 497 aa, Homo sapiens
MLQGSLLLVVATMSVAQQTRQEADRGCETLVVQHGHCSYTFLLPKSEPCPPGPEVSRDSNTLQRESLANPLHLGKLPTQQVKQLEQALQNNTQWLKKLERAIKTILRSKLEQVQQQMAQNQTAPMLELGTSLLNQTTAQIRKLTDMEAQLLNQTSRMDAQMPETFLSTNKLENQLLLQRQKLQQLQGQNSALEKRLQALETKQQEELASILSKKAKLLNTLSRQSAALTNIERGLRGVRHNSSLLQDQQHSLRQLLVLLRHLVQERANASAPAFIMAGEQVFQDCAEIQRSGASASGVYTIQVSNATKPRKVFCDLQSSGGRWTLIQRRENGTVNFQRNWKDYKQGFGDPAGEHWLGNEVVHQLTRRAAYSLRVELQDWEGHEAYAQYEHFHLGSENQLYRLSVVGYSGSAGRQSSLVLQNTSFSTLDSDNDHCLCKCAQVMSGGWWFDACGLSNLNGVYYHAPDNKYKMDGIRWHYFKGPSYSLRASRMMIRPLDI

SEQ ID NO: 45201 - protein, 232 aa, Homo sapiens
MLQHIDYRMRCILQDGRIFIGTFKAFDKHMNLILCDCDEFRKIKPKNSKQAEREEKRVLGLVLLRGENLVSMTVEGPPPKDTGIARVPLAGAAGGPGIGRAAGRGIPAGVPMPQAPAGLAGPVRGVGGPSQQVMTPQGRGTVAAAAAAATASIAGAPTQYPPGRGGPPPPMGRGAPPPGMMGPPPGMRPPMGPPMGIPPGRGTPMGMPPPGMRPPPPGMRGPPPPGMRPPRP

SEQ ID NO: 45202 - protein, 223 aa, Homo sapiens
MLQHIDYRMRCILQDGRIFIGTFKAFDKHMNLILCDCDEFRKIKPKNSKQAEREEKRVLGLVLLRGENLVSMTVEGPPPKDTGIARVPLAGAAGGPGIGRAAGRGIPAGVPMPQAPAGLAGPVRGVGGPSQQVMTPQGRGTVAAAAAAATASIAGAPTQYPPGRGGPPPPMGRGAPPPGMMGPPPGMRPPMGPPMGIPPGRGTPMGMPPPGMRPPPPGMRGLL

SEQ ID NO: 45203 - protein, 428 aa, Homo sapiens
MIIQSISLLDQLDKDINTFSMRVREWYGYHFPELVKIINDNATYCRLAQFIGNRRELNEDKLEKLEELTMDGAKAKAILDASRSSMGMDISAIDLINIESFSSRVVSLSEYRQSLHTYLRSKMSQVAPSLSALIGEAVGARLIAHAGSLTNLAKYPASTVQILGAEKALFRALKTRGNTPKYGLIFHSTFIGRAAAKNKGRISRYLANKCSIASRIDCFSEVPTSVFGEKLREQVEERLSFYETGEIPRKNLDVMKEAMVQAEEAAAEITRKLEKQEKKRLKKEKKRLAALALASSENSSSTPEECEEMSEKPKKKKKQKPQEVPQENGMEDPSISFSKPKKKKSFSKEELMSSDLEETAGSTSIPKRKKSTPKEETVNDPEEAGHRSGSKKKRKFSKEEPVSSGPEEAVGKSSSKKKKKFHKASQED

SEQ ID NO: 45204 - protein, 386 aa, Homo sapiens
MVHFQASEVQQLLHNKFVVILGDSIQRAVYKDLVLLLQKDSLLTAAQLKAKYLEDVLEELTYGPAPDLVIINSCLWDLSRYGRCSMESYRENLERVFVRMDQVLPDSCLLVWNMAMPLGERITGGFLLPELQPLAGSLRRDVVEGNFYSATLAGDHCFDVLDLHFHFRHAVQHRHRDGVHWDQHAHRHLSHLLLTHVADAWGVELPKRGYPPDPWIEDWAEMNHPFQGSHRQTPDFGEHLALLPPPPSSLPPPMPFPYPLPQPSPPPLFPPLPQDTPFFPGQPFPPHEFFNYNPVEDFSMPPHLGCGPGVNFVPGPLPPPIPGPNPHGQHWGPVVHRGMPRYVPNSPYHVRRMGGPCRQRLRHSERLIHTYKLDRRPPAHSGTWPG

SEQ ID NO: 45205 - protein, 437 aa, Homo sapiens
MVHFQASEVQQLLHNKFVVILGDSIQRAVYKDLVLLLQKDSLLTAAQLKAKGELSFEQDQLVAGGQLGELHNGTQYREVRQFCSGSGHHLVRFYFLTRVYSEYLEDVLEELTYGPAPDLVIINSCLWDLSRYGRCSMESYRENLERVFVRMDQVLPDSCLLVWNMAMPLGERITGGFLLPELQPLAGSLRRDVVEGNFYSATLAGDHCFDVLDLHFHFRHAVQHRHRDGVHWDQHAHRHLSHLLLTHVADAWGVELPKRGYPPDPWIEDWAEMNHPFQGSHRQTPDFGEHLALLPPPPSSLPPPMPFPYPLPQPSPPPLFPPLPQDTPFFPGQPFPPHEFFNYNPVEDFSMPPHLGCGPGVNFVPGPLPPPIPGPNPHGQHWGPVVHRGMPRYVPNSPYHVRRMGGPCRQRLRHSERLIHTYKLDRRPPAHSGTWPG

SEQ ID NO: 45206 - protein, 397 aa, Homo sapiens
MEATLPSPAVVAQELWNKGALSLSHVAHLRICITHVTGGGIPCIKRLEVWGQPAKTCSQEVIDSILLVTSENLPQDVALQAPALPMESDCDPGDQPESQQAPSSLQKLAEIIQDVPEEFLDPITLEIMPCPMLLPSGKVIDQSTLEKCNRSEATWGRVPSDPFTGVAFTPHSQPLPHPSLKARIDHFLLQHSIPGCHLLGRAQTALAVIPSSIVLPSQKRKIEQAEHVPDSNFGVNASCFSATSPLVLPTTSEHTAKKMKATNEPSLTHMDCSTGPLSHEQKLSQSLEIALASTLGSMPSFTARLTRGQLQHLGTRGSNTSWRPGTGSEQPGSILGPECASCKRVFSPYFKKEPVYQLPCGHLLCRPCLGEKQRSLPMTCTACQRPVASQDVLRVHF

SEQ ID NO: 45207 - protein, 108 aa, Homo sapiens
MTEEQSQSFLTEFINYIKQSKVVLLEDLASQVGLRTQDTINRIQDLLAEGTITGVIDDRGKFIYITPEELAAVANFIRQRGRVSIAELAQASNSLIAWGRESPAQAPA

SEQ ID NO: 45208 - protein, 749 aa, Homo sapiens
MGLVALEAEGQELLLELEKNHRLLAPGYIETHYGPDGQPVVLAPNHTDHCHYQGRVRGFPDSWVVLCTCSGMSGLITLSRNASYYLRPWPPRGSKDFSTHEIFRMEQLLTWKGTCGHRDPGNKAGMTSLPGGPQSRGRREARRTRKYLELYIVADHTLFLTRHRNLNHTKQRLLEVANYVDQLLRTLDIQVALTGLEVWTERDRSRVTQDANATLWAFLQWRRGLWAQRPHDSAQLLTGRAFQGATVGLAPVEGMCRAESSGGVSTDHSELPIGAAATMAHEIGHSLGLSHDPDGCCVEAAAESGGCVMAAATGHPFPRVFSACSRRQLRAFFRKGGGACLSNAPDPGLPVPPALCGNGFVEAGEECDCGPGQECRDLCCFAHNCSLRPGAQCAHGDCCVRCLLKPAGALCRQAMGDCDLPEFCTGTSSHCPPDVYLLDGSPCARGSGYCWDGACPTLEQQCQQLWGPGSHPAPEACFQVVNSAGDAHGNCGQDSEGHFLPCAGRDALCGKLQCQGGKPSLLAPHMVPVDSTVHLDGQEVTCRGALALPSAQLDLLGLGLVEPGTQCGPRMVCQSRRCRKNAFQELQRCLTACHSHGVCNSNHNCHCAPGWAPPFCDKPGFGGSMDSGPVQAENHDTFLLAMLLSVLLPLLPGAGLAWCCYRLPGAHLQRCSWGCRRDPACSGPKDGPHRDHPLGGVHPMELGPTATGQPWPLDPENSHEPSSHPEKPLPAVSPDPQADQVQMPRSCLW

SEQ ID NO: 45209 - protein, 748 aa, Homo sapiens
MGLVALEAEGQELLLELEKNHRLLAPGYIETHYGPDGQPVVLAPNHTDHCHYQGRVRGFPDSWVVLCTCSGMSGLITLSRNASYYLRPWPPRGSKDFSTHEIFRMEQLLTWKGTCGHRDPGNKAGMTSLPGGPQSRGRREARRTRKYLELYIVADHTLFLTRHRNLNHTKQRLLEVANYVDQLLRTLDIQVALTGLEVWTERDRSRVTQDANATLWAFLQWRRGLWAQRPHDSAQLLTGRAFQGATVGLAPVEGMCRAESSGGVSTDHSELPIGAAATMAHEIGHSLGLSHDPDGCCVEAAAESGGCVMAAATGHPFPRVFSACSRRQLRAFFRKGGGACLSNAPDPGLPVPPALCGNGFVEAGEECDCGPGQECRDLCCFAHNCSLRPGAQCAHGDCCVRCLLKPAGALCRQAMGDCDLPEFCTGTSSHCPPDVYLLDGSPCARGSGYCWDGACPTLEQQCQQLWGPGSHPAPEACFQVVNSAGDAHGNCGQDSEGHFLPCAGRDALCGKLQCQGGKPSLLAPHMVPVDSTVHLDGQEVTCRGALALPSAQLDLLGLGLVEPGTQCGPRMVCQSRRCRKNAFQELQRCLTACHSHGVCNSNHNCHCAPGWAPPFCDKPGFGGSMDSGPVQAENHDTFLLAMLLSVLLPLLPGAGLAWCCYRLPGAHLQRCSWGCRRDPACSGPKDGPHRDHPLGGVHPMELGPTATGQPWPLDPENSHEPSSHPEKPLPAVSPDPQDQVQMPRSCLW

SEQ ID NO: 45210 - protein, 522 aa, Homo sapiens [sequence omitted]

SEQ ID NO: 45211 - protein, 481 aa, Homo sapiens
MHDLAGLGSETPKSQVGTLLFRSRSRLTHLSLSRRASESSLSSESSESSDAGLCMDSPSPMDPHMAEQTFEQAIQAASRIIRNEQFAIRRFQSMPDGFVFKMPWKPTHPSSTHALAEWASRREAFAQRPSSAPDLMCLSPDRKMEVEELSPLALGRFSLTPAEGDTEEDDGFVDILESDLKDDDAVPPGMESLISAPLVKTLEKEEEKDLVMYSKCQRLFRSPSMPCSVIRPILKRLERPQDRDTPVQNKRRRSVTPPEEQQEAEEPKARVLRSKSLCHDEIENLLDSDHRELIGDYSKAFLLQTVDGKHQDLKYISPETMVALLTGKFSNIVDKFVIVDCRYPYEYEGGHIKTAVNLPLERDAESFLLKSPIAPCSLDKRVILIFHCEFSSERGPRMCRFIRERDRAVNDYPSLYYPEMYILKGGYKEFFPQHPNFCEPQDYRPMNHEAFKDELKTFRLKTRSWAGERSRRELCSRLQDQ

SEQ ID NO: 45212 - protein, 257 aa, Homo sapiens
MQDDNERIRPPPSSSSWHSGCNLGAQGTTLKPLTVPKVQISEVDAPPEGDQMPSSTDSRGLKPLQEDTPQLMRTRSDVGVRRRGNVRTPSDQRRIRRHRFSINGHFYNHKTSVFTPAYGSVTNVRINSTMTTPQVLKLLLNKFKIENSAEEFALYVVHTSGEKQKLKATDYPLIARILQGPCEQISKVFLMEKDQVEEVTYDVAQYIKFEMPVLKSFIQKLQEEEDREVKKLMRKYTVLRLMIRQRLEEIAETPATI

SEQ ID NO: 45213 - protein, 594 aa, Homo sapiens
MAIYTTENGIAEKSSLAETLDSTGSLDPQRSDMIYTIEDVPPWYLCIFLGLQHYLTCFSGTIAVPFLLADAMCVGYDQWATSQLIGTIFFCVGITTLLQTTFGCRLPLFQASAFAFLAPARAILSLDKWKCNTTDVSVANGTAELLHTEHIWYPRIREIQGAIIMSSLIEVVIGLLGLPGALLKYIGPLTITPTVALIGLSGFQAAGERAGKHWGIAMLTIFLVLLFSQYARNVKFPLPIYKSKKGWTAYKLQLFKMFPIILAILVSWLLCFIFTVTDVFPPDSTKYGFYARTDARQGVLLVAPWFKVPYPFQWGLPTVSAAGVIGMLSAVVASIIESIGDYYACARLSCAPPPPIHAINRGIFVEGLSCVLDGIFGTGNGSTSSSPNIGVLGITKVGSRRVIQCGAALMLALGMIGKFSALFASLPDPVLGALFCTLFGMITAVGLSNLQFIDLNSSRNLFVLGFSIFFGLVLPSYLRQNPLVTGITGIDQVLNVLLTTAMFVGGCVAFILDNTIPGTPEERGIRKWKKGVGKGNKSLDGMESYNLPFGMNIIKKYRCFSYLPISPTFVGYTWKGLRKSDNSRSSDEDSQATG

SEQ ID NO: 45214 - protein, 623 aa, Homo sapiens
MLWKATIVLSRGVSVQYRYFKGYFLEPKTIGGPCQVIVHKWETHLQPRSITPLESEIIIDDGQFGIHNGVETLDSGWLTCQTEIRLRLHYSEKPPVSITKKKLKKSRFRVKLTLEGLEEDDDDRVSPTVLHKMSNSLEISLISDNEFKCRHSQPECGYGLQPDRWTEYSIQTMEPDNLELIFDFFEEDLSEHVVQGDALPGHVGTACLLSSTIAESGKSAGILTLPIMSRNSRKTIGKVRVDYIIIKPLPGYSCDMKSSFSKYWKPRIPLDVGHRGAGNSTTTAQLAKVQENTIASLRNAASHGAAFVEFDVHLSKDFVPVVYHDLTCCLTMKKKFDADPVELFEIPVKELTFDQLQLLKLTHVTALKSKDRKESVVQEENSFSENQPFPSLKMVLESLPEDVGFNIEIKWICQQRDGMWDGNLSTYFDMNLFLDIILKTVLENSGKRRIVFSSFDADICTMVRQKQNKYPILFLTQGKSEIYPELMDLRSRTTPIAMSFAQFENLLGINVHTEDLLRNPSYIQEAKAKGLVIFCWGDDTNDPENRRKLKELGVNGLIYDRIYDWMPEQPNIFQVEQLERLKQELPELKSCLCPTVSRFVPSSLCGESDIHVDANGIDNVENA

SEQ ID NO: 45215 - protein, 318 aa, Homo sapiens
MLDLYRRHSGQPGSPAPDHRLERAASRANTVRSFHHEESLEELPETSGKTTRRFFFNLSSIPTEEFITSAELQVFREQMQDALGNNSSFHHRINIYEIIKPATANSKFPVTRLLDTRLVNQNASRWESFDVTPAVMRWTAQGHANHGFVVEVAHLEEKQGVSKRHVRISRSLHQDEHSWSQIRPLLVTFGHDGKGHPLHKREKRQAKHKQRKRLKSSCKRHPLYVDFSDVGWNDWIVAPPGYHAFYCHGECPFPLADHLNSTNHAIVQTLVNSVNSKIPKACCVPTELSAISMLYLDENEKVVLKNYQDMVVEGCGCR

SEQ ID NO: 45216 - protein, 1177 aa, Homo sapiens
MQNVNGELQNGNCCGGARNPGDRKCTRDECDTYFKVCLKEYQSRVTAGGPCSFGSGSTPVIGGNTFNLKASRGNDRNRIVLPFSFAWPRSYTLLVEAWDSSNDTVQPDSIIEKASHSGMINPSRQWQTLKQNTGVAHFEYQIRVTCDDYYYGFGCNKFCRPRDDFFGHYACDQNGNKTCMEGWMGPECNRAICRQGCSPKHGSCKLPGDCRCQYGWQGLYCDKCIPHPGCVHGICNEPWQCLCETNWGGQLCDKDLNYCGTHQPCLNGGTCSNTGPDKYQCSCPEGYSGPNCEIAEHACLSDPCHNRGSCKETSLGFECECSPGWTGPTCSTNIDDCSPNNCSHGGTCQDLVNGFKCVCPPQWTGKTCQLDANECEAKPCVNAKSCKNLIASYYCDCLPGWMGQNCDININDCLGQCQNDASCRDLVNGYRCICPPGYAGDHCERDIDECASNPCLNGGHCQNEINRFQCLCPTGFSGNLCQLDIDYCEPNPCQNGAQCYNRASDYFCKCPEDYEGKNCSHLKDHCRTTPCEVIDSCTVAMASNDTPEGVRYISSNVCGPHGKCKSQSGGKFTCDCNKGFTGTYCHENINDCESNPCRNGGTCIDGVNSYKCICSDGWEGAYCETNINDCSQNPCHNGGTCRDLVNDFYCDCKNGWKGKTCHSRDSQCDEATCNNGGTCYDEGDAFKCMCPGGWEGTTCNIARNSSCLPNPCHNGGTCVVNGESFTCVCKEGWEGPICAQNTNDCSPHPCYNSGTCVDGDNWYRCECAPGFAGPDCRININECQSSPCAFGATCVDEINGYRCVCPPGHSGAKCQEVSGRPCITMGSVIPDGAKWDDDCNTCQCLNGRIACSKVWCGPRPCLLHKGHSECPSGQSCIPILDDQCFVHPCTGVGECRSSSLQPVKTKCTSDSYYQDNCANITFTFNKEMMSPGLTTEHICSELRNLNILKNVSAEYSIYIACEPSPSANNEIHVAISAEDIRDDGNPIKEITDKIIDLVSKRDGNSSLIAAVAEVRVQRRPLKNRTDFLVPLLSSVLTVAWICCLVTAFYWCLRKRRKPGSHTHSASEDNTTNNVREQLNQIKNPIEKHGANTVPIKDYENKNSKMSKIRTHNSEVEEDDMDKHQQKARFAKQPAYTLVDREEKPPNGTPTKHPNWTNKQDNRDLESAQSLNRMEYIV

SEQ ID NO: 45217 - protein, 404 aa, Homo sapiens
MADVHFVVGPPGGTQRLPGHKYVLAVGSSVFHAMFYGELAEDKDEIRIPDVEPAAFLAMLKYIYCDEIDLAADTVLATLYAAKKYIVPHLARACVNFLETSLSAKNACVLLSQSCLFEEPDLTQRCWEVIDAQAELALKSEGFCDIDFQTLESILRRETLNAKEIVVFEAALNWAEVECQRQDLALSIENKRKVLGKALYLIRIPTMALDDFANGAAQSGVLTLNETNDIFLWYTAAKKPELQFVSKARKGLVPQRCHRFQSCAYRSNQWRYRGRCDSIQFAVDKRVFIAGFGLYGSSCGSAEYSAKIELKRQGVVLGQNLSKYFSDGSSNTFPVWFEYPVQIEPDTFYTASVILDGNELSYFGQEGMTEVQCGKVTVQFQCSSDSTNGTGVQGGQIPELIFYA

SEQ ID NO: 45218 - protein, 1102 aa, Homo sapiens
MNDVSSRSHAIFTIKFTQAKFDSEMPCETVSKIHLVDLAGSERADATGATGVRLKEGGNINKSLVTLGNVISALADLSQDAANTLAKKKQVFVPYRDSVLTWLLKDSLGGNSKTIMIATISPADVNYGETLSTLRYANRAKNIINKPTINEDANVKLIRELRAEIARLKTLLAQGNQIALLDSPTALSMEEKLQQNEARVQELTKEWTNKWNETQNILKEQTLALRKEGIGVVLDSELPHLIGIDDDLLSTGIILYHLKEGQTYVGRDDASTEQDIVLHGLDLESEHCIFENIGGTVTLIPLSGSQCSVNGVQIVEATHLNQGAVILLGRTNMFRFNHPKEAAKLREKRKSGLLSSFSLSMTDLSKSRENLSAVMLYNPGLEFERQQREELEKLESKRKLIEEMEEKQKSDKAELERMQQEVETQRKETEIVQLQIRKQEESLKRRSFHIENKLKDLLAEKEKFEEERLREQQEIELQKKRQEEETFLRVQEELQRLKELNNNEKAEKFQIFQELDQLQKEKDEQYAKLELEKKRLEEQEKEQVMLVAHLEEQLREKQEMIQLLRRGEVQWVEEEKRDLEGIRESLLRVKEARAGGDEDGEELEKAQLRFFEFKRRQLVKLVNLEKDLVQQKDILKKEVQEEQEILECLKCEHDKESRLLEKHDESVTDVTEVPQDFEKIKPVEYRLQYKERQLQYLLQNHLPTLLEEKQRAFEILDRGPLSLDNTLYQVEKEMEEKEEQLAQYQANANQLQKLQATFEFTANIARQEEKVRKKEKEILESREKQQREALERALARLERRHSALQRHSTLGMEIEEQRQKLASLNSGSREQSGLQASLEAEQEALEKDQERLEYEIQQLKQKIYEVDGVQKDHHGTLEGKVASSSLPVSAEKSHLVPLMDARINAYIEEEVQRRLQDLHRVISEGCSTSADTMKDNEKLHNGTIQRKLKYERMVSRSLGANPDDLKDPIKISIPRYVLCGQGKDAHFEFEVKITVLDETWTVFRRYSRFREMHKTLKLKYAELAALEFPPKKLFGNKDERVIAERRSHLEKYLRDFFSVMLQSATSPLHINKVGLTLSKHTICEFSPFFKKGVFDYSSHGTG

SEQ ID NO: 45219 - protein, 117 aa, Homo sapiens
MAAVPELLQQQEEDRSKLRSVSVDLNVDPSLQIDIPDALSERDKVKFTVHTKTTLPTFQSPEFSVTRQHEDFVWLHDTLIETTDYAGLIEWSGCLLWTSKSRMRHQLENIAAGTRGS

SEQ ID NO: 45220 - protein, 189 aa, Homo sapiens [sequence omitted]

SEQ ID NO: 45221 - protein, 890 aa, Homo sapiens
MGARGLDKRGSFFKLIDTIASEIGELKQEMVRTDVNLENGLEPAETHSMVRHKDGGYSEEEDVKTCARDSGYDSLSNRLSILDRLLHTHPIWLQLSLSEEEAAEVLQAQPPGIFLVHKSTKMQKKVLSLRLPCEFGAPLKEFAIKESTYTFSLEGSGISFADLFRLIAFYCISRDVLPFTLKLPYAISTAKSEAQLEELAQMGLNFWSSPADSKPPNLPPPHRPLSSDGVCPASLRQLCLINGVHSIKTRTPSELECSQTNGALCFINPLFLKVHSQDLSGGLKRPSTRTPNANGTERTRSPPPRPPPPAINSLHTSPRLARTETQTSMPETVNHNKHGNVALPGTKPTPIPPPRLKKQASFLEAEGGAKTLSGGRPGAGPELELGTAGSPGGAPPEAAPGDCTRAPPPSSESRPPCHGGRQRLSDMSISTSSSDSLEFDRSMPLFGYEADTNSSLEDYEGESDQETMAPPIKSKKKRSSSFVLPKLVKSQLQKVSGVFSSFMTPEKRMVRRIAELSRDKCTYFGCLVQDYVSFLQENKECHVSSTDMLQTIRQFMTQVKNYLSQSSELDPPIESLIPEDQIDVVLEKAMHKCILKPLKGHVEAMLKDFHMADGSWKQLKENLQLVRQRNPQELGVFAPTPDFVDVEKIKVKFMTMQKMYSPEKKVMLLLRVCKLIYTVMENNSGRMYGADDFLPVLTYVIAQCDMLELDTEIEYMMELLDPSLLHGEGGYYLTSAYGALSLIKNFQEEQAARLLSSETRDTLRQWHKRRTTNRTIPSVDDFQNYLRVAFQEVNSGCTGKTLLVRPYITTEDVCQICAEKFKVGDPEEYSLFLFVDETWQQLAEDTYPQKIKAELHSRPQPHIFHFVYKRIKNDPYGIIFQNGEEDLTTS

SEQ ID NO: 45222 - protein, 1655 aa, Homo sapiens [sequence omitted]

SEQ ID NO: 45223 - protein, 526 aa, Homo sapiens
MSRGLYQPATIFMGRQMSAILSMRDFSTEHKSPQPTKNFSIPDPHSHRQTAQSSNVTDSCVVQTSNDTQCLNKSDNIDGKASLQIGEKMPVTASVLSEEEQTHCLEIGSNTRHGKSNLSEGKKSAELNSPLRERLSPENRTTDLKCDSSSGSEGEILTREHIEVEEKRASPPVSPIPVSEYCESENKWSQEKHSPWEGVSDHLAHREPKSQKPFRKMQEEEEESWSTSSDLTISISEDDLILESPEPQPNPGGKMEGEDGIEALKLIHAEQERVALSTEKNCILQTLSSPDSEKESSTNAPTREPGQTPDSDVPRAQVGQHVATLKEHDNSVKEEATALLRKALTEECGRRSAIHSSESSCSLPSILNDNSGIKEAKPAVWLNSVPTREQEVSSGCGDKSKKENVAADIPITETEAYQLLKKATLQDNTNQTENRFQKTDASVSHLSGLNIGSGAFETKTANKIASEASFSSSEGSPLSRHENKKKPVINLKSNALWDESDDSNSEIEAALRPRNHNTDDSDDFYD

SEQ ID NO: 45224 - protein, 292 aa, Homo sapiens
MQEEEEESWSTSSDLTISISEDDLILESPEPQPNPGGKMEGEDGIEALKLIHAEQERVALSTEKNCILQTLSSPDSEKESSTNAPTREPGQTPDSDVPRAQATALLRKALTEECGRRSAIHSSESSCSLPSILNDNSGIKEAKPAVWLNSVPTREQEVSSGCGDKSKKENVAADIPITETEAYQLLKKATLQDNTNQTENRFQKTDASVSHLSGLNIGSGAFETKTANKIASEASFSSSEGSPLSRHENKKKPVINLKSNALWDESDDSNSEIEAALRPRNHNTDDSDDFYD

SEQ ID NO: 45225 - protein, 873 aa, Homo sapiens
MVAIFEYIDRLFSIVRPRRLLYMAIDGVAPRAKMNQQRSRRFRASKEGMEAAVEKQRVREEILAKGGFLPPEEIKERFDSNCITPGTEFMDNLAKCLRYYIADRLNNDPGWKNLTVILSDASAPGEGEHKIMDYIRRQRAQPNHDPNTHHCLCGADADLIMLGLATHEPNFTIIREEFKPNKPKPCGLCNQFGHEVKDCEGLPREKKGKHDELADSLPCAEGEFIFLRLNVLREYLERELTMASLPFTFDVERSIDDWVFMCFFVGNDFLPHLPSLEIRENAIDRLVNIYKNVVHKTGGYLTESGYVNLQRVQMIMLAVGEVEDSIFKKRKDDEDSFRRRQKEKRKRMKRDQPAFTPSGILTPHALGSRNSPGSQVASNPRQAAYEMRMQNNSSPSISPNTSFTSDGSPSPLGGIKRKAEDSDSEPEPEDNVRLWEAGWKQRYYKNKFDVDAADEKFRRKVVQSYVEGLCWVLRYYYQGCASWKWYYPFHYAPFASDFEGIADMPSDFEKGTKPFKPLEQLMGVFPAASGNFLPPSWRKLMSDPDSSIIDFYPEDFAIDLNGKKYAWQGVALLPFVDERRLRAALEEVYPDLTPEETRRNSLGGDVLFVGKHHPLHDFILELYQTGSTEPVEVPPELCHGIQGKFSLDEEAILPDQIVCSPVPMLRDLTQNTVVSINFKDPQFAEDYIFKAVMLPGARKPAAVLKPSDWEKSSNGRQWKPQLGFNRDRRPVHLDQAAFRTLGHVMPRGSGTGIYSNAAPPPVTYQGNLYRPLLRGQAQIPKLMSNMRPQDSWRGPPPLFQQQRFDRGVGAEPLLPWNRMLQTQNAAFQPNQYQMLAGPGGYPPRRDDRGGRQGYPREGRKYPLPPPSGRYNWN

SEQ ID NO: 45226 - protein, 608 aa, Homo sapiens [sequence omitted]

SEQ ID NO: 45227 - protein, 355 aa, Homo sapiens
MADKRAGTPEAAARPPPGLAREGDARTVPAARAREAGGRGSLHPAAGPGTAFPSPGRGEAASTATTPSLENGRVRDEAPETCGAEGLGTRAGASEKAEDANKEEGAIFKKEPAEEVEKQQEGEEKQEVAAEAQEGPRLLNLGALIVDPLEAIQWEAEAVSAQADRAYLPLERRFGRMHRLYLARRSFIIQNIPGFWVTAFLNHPQLSAMISPRDEDMLCYLMNLEVRELRHSRTGCKFKFRFWSNPYFQNKVIVKEYECRASGRVVSIATRIRWHWGQEPPALVHRNRDTVRSFFSWFSQHSLPEADRVAQIIKDDLWPNPLQYYLLGDRPCRARGGLARWPTETPSRPYGFQSG

SEQ ID NO: 45228 - protein, 1495 aa, Homo sapiens
MSGTSPLACLNAMLHSNSRGGEGLFYKLPGRISLFTLKKDALQWSRHPATVEGEEPEDTADVESCGSNEASTVSGENDVSLDETSSNASCSTESQSRPLSNPRDSYRASSQANKQKKKTGVMLPRVVLTPLKVNGAHVESASGFSGCHADGESGSPSSSSSGSLALGSAAIRGQAEVTQDPAPLLRGFRKPATGQMKRNRGEEIDFETPGSILVNTNLRALINSRTFHALPSHFQQQLLFLLPEVDRQVGTDGLLRLSSSALNNEFFTHAAQSWRERLADGEFTHEMQVRIRQEMEKEKKVEQWKEKFFEDYYGQKLGLTKEESLQQNVGQEEAEIKSGLCVPGESVRIQRGPATRQRDGHFKKRSRPDLRTRARRNLYKKQESEQAGVAKDAKSVASDVPLYKDGEAKTDPAGLSSPHLPGTSSAAPDLEGPEFPVESVASRIQAEPDNLARASASPDRIPSLPQETVDQEPKDQKRKSFEQAASASFPEKKPRLEDRQSFRNTIESVHTEKPQPTKEEPKVPPIRIQLSRIKPPWVVKGQPTYQICPRIIPTTESSCRGWTGARTLADIKARALQVRGARGHHCHREAATTAIGGGGGPGGGGGGATDEGGGRGSSSGDGGEACGHPEPRGGPSTPGKCTSDLQRTQLLPPYPLNGEHTQAGTAMSRARREDLPSLRKEESCLLQRATVGLTDGLGDASQLPVAPTGDQPCQALPLLSSQTSVAERLVEQPQLHPDVRTECESGTTSWESDDEEQGPTVPADNGPIPSLVGDDTLEKGTGQALDSHPTMKDPVNVTPSSTPESSPTDCLQNRAFDDELGLGGSCPPMRESDTRQENLKTKALVSNSSLHWIPIPSNDEVVKQPKPESREHIPSVEPQVGEEWEKAAPTPPALPGDLTAEEGLDPLDSLTSLWTVPSRGGSDSNGSYCQQVDIEKLKINGDSEALSPHGESTDTASDFEGHLTEDSSEADTREAAVTKGSSVDKDEKPNWNQSAPLSKVNGDMRLVTRTDGMVAPQSWVSRVCAVRQKIPDSLLLASTEYQPRAVCLSMPGSSVEATNPLVMQLLQGSLPLEKVLPPAHDDSMSESPQVPLTKDQSHGSLRMGSLHGLGKNSGMVDGSSPSSLRALKEPLLPDSCETGTGLARIEATQAPGAPQKNCKAVPSFDSLHPVTNPITSSRKLEEMDSKEQFSSFSCEDQKEVRAMSQDSNSNAAPGKSPGDLTTSRTPRFSSPNVISFGPEQTGRALGDQSNVTGQGKKLFGSGNVAATLQRPRPADPMPLPAEIPPVFPSGKLGPSTNSMSGGVQTPREDWAPKPHAFVGSVKNEKTFVGGPLKANAENRKATGHSPLELVGHLEGMPFVMDLPFWKLPREPGKGLSEPLEPSSLPSQLSIKQAFYGKLSKLQLSSTSFNYSSSSPTFPKGLAGSVVQLSHKANFGASHSASLSLQMFTDSSTVESISLQCACSLKAMIMCQGCGAFCHDDCIGPSKLCVLCLVVR

SEQ ID NO: 45229 - protein, 893 aa, Homo sapiens
MGSLTMKSQLQITVISAKLKENKKNWFGPSPYVEVTVDGQSKKTEKCNNTNSPKWKQPLTVIVTPVSKLHFRVWSHQTLKSDVLLGTAALDIYETLKSNNMKLEEVVVTLQLGGDKEPTETIGDLSICLDGLQLESEVVTNGETTCSENGVSLCLPRLECNSAISAHCNLCLPGLSDSPISASRVAGFTGASQNDDGSRSKDETRVSTNGSDDPEDAGAGENRRVSGNNSPSLSNGGFKPSRPPRPSRPPPPTPRRPASVNGSPSATSESDGSSTGSLPPTNTNTNTSEGATSGLIIPLTISGGSGPRPLNPVTQAPLPPGWEQRVDQHGRVYYVDHVEKRTTWDRPEPLPPGWERRVDNMGRIYYVDHFTRTTTWQRPTLESVRNYEQWQLQRSQLQGAMQQFNQRFIYGNQDLFATSQSKEFDPLGPLPPGWEKRTDSNGRVYFVNHNTRITQWEDPRSQGQLNEKPLPEGWEMRFTVDGIPYFVDHNRRTTTYIDPRTGKSALDNGPQIAYVRDFKAKVQYFRFWCQQLAMPQHIKITVTRKTLFEDSFQQIMSFSPQDLRRRLWVIFPGEEGLDYGGVAREWFFLLSHEVLNPMYCLFEYAGKDNYCLQINPASYINPDHLKYFRFIGRFIAMALFHGKFIDTGFSLPFYKRILNKPVGLKDLESIDPEFYNSLIWVKENNIEECDLEMYFSVDKEILGEIKSHDLKPNGGNILVTEENKEEYIRMVAEWRLSRGVEEQTQAFFEGFNEILPQQYLQYFDAKELEVLLCGMQEIDLNDWQRHAIYRHYARTSKQIMWFWQFVKEIDNEKRMRLLQFVTGTCRLPVGGFADLMGSNGPQKFCIEKVGKENWLPRSHTCFNRLDLPPYKSYEQLKEKLLFAIEETEGFGQE

SEQ ID NO: 45230 - protein, 852 aa, Homo sapiens
MGSLTMKSQLQITVISAKLKENKKNWFGPSPYVEVTVDGQSKKTEKCNNTNSPKWKQPLTVIVTPVSKLHFRVWSHQTLKSDVLLGTAALDIYETLKSNNMKLEEVVVTLQLGGDKEPTETIGDLSICLDGLQLESEVVTNGETTCSESASQNDDGSRSKDETRVSTNGSDDPEDAGAGENRRVSGNNSPSLSNGGFKPSRPPRPSRPPPPTPRRPASVNGSPSATSESDGSSTGSLPPTNTNTNTSEGATSGLIIPLTISGGSGPRPLNPVTQAPLPPGWEQRVDQHGRVYYVDHVEKRTTWDRPEPLPPGWERRVDNMGRIYYVDHFTRTTTWQRPTLESVRNYEQWQLQRSQLQGAMQQFNQRFIYGNQDLFATSQSKEFDPLGPLPPGWEKRTDSNGRVYFVNHNTRITQWEDPRSQGQLNEKPLPEGWEMRFTVDGIPYFVDHNRRTTTYIDPRTGKSALDNGPQIAYVRDFKAKVQYFRFWCQQLAMPQHIKITVTRKTLFEDSFQQIMSFSPQDLRRRLWVIFPGEEGLDYGGVAREWFFLLSHEVLNPMYCLFEYAGKDNYCLQINPASYINPDHLKYFRFIGRFIAMALFHGKFIDTGFSLPFYKRILNKPVGLKDLESIDPEFYNSLIWVKENNIEECDLEMYFSVDKEILGEIKSHDLKPNGGNILVTEENKEEYIRMVAEWRLSRGVEEQTQAFFEGFNEILPQQYLQYFDAKELEVLLCGMQEIDLNDWQRHAIYRHYARTSKQIMWFWQFVKEIDNEKRMRLLQFVTGTCRLPVGGFADLMGSNGPQKFCIEKVGKENWLPRSHTCFNRLDLPPYKSYEQLKEKLLFAIEETEGFGQE

SEQ ID NO: 45231 - protein, 606 aa, Homo sapiens
MKGATTNICYNVLDRNVHEKKLGDKVAFYWEGNEPGETTQITYHQLLVQVCQFSNVLRKQGIQKGDRVAIYMPMIPELVVAMLACARIGALHSIVFAGFSSESLCERILDSSCSLLITTDAFYRGEKLVNLKELADEALQKCQEKGFPVRCCIVVKHLGRAELGMGDSTSQSPPIKRSCPDVQISWNQGIDLWWHELMQEAGDECEPEWCDAEDPLFILYTSGSTGKPKGVVHTVGGYMLYVATTFKYVFDFHAEDVFWCTADIGWITGHSYVTYGPLANGATSVLFEGIPTYPDVNRLWSIVDKYKVTKFYTAPTAIRLLMKFGDEPVTKHSRASLQVLGTVGEPINPEAWLWYHRVVGAQRCPIVDTFWQTETGGHMLTPLPGATPMKPGSATFPFFGVAPAILNESGEELEGEAEGYLVFKQPWPGIMRTVYGNHERFETTYFKKFPGYYVTGDGCQRDQDGYYWITGRIDDMLNVSGHLLSTAEVESALVEHEAVAEAAVVGHPHPVKGECLYCFVTLCDGHTFSPKLTEELKKQIREKIGPIATPDYIQNAPGLPKTRSGKIMRRVLRKIAQNDHDLGDMSTVADPSVISHLFSHRCLTIQ

SEQ ID NO: 45232 - protein, 329 aa, Homo sapiens
MLSLYRTLSDADRKGGNSSVKLEAGLANTITSFIDKGQDDRGPVVRKQRYVFDISALEKDGLLGAELRILRKKPSDTAKPAAPGGGRAAQLKLSSCPSGRQPAALLDVRSVPGLDGSGWEVFDIWKLFRNFKNSAQLCLELEAWERGRAVDLRGLGFDRAARQVHEKALFLVFGRTKKRDLFFNEIKARSGQDDKTVYEYLFSQRRKRRAPLATRQGKRPSKNLKARCSRKALHVNFKDMGWDDWIIAPLEYEAFHCEGLCEFPLRSHLEPTNHAVIQTLMNSMDPESTPPTCCVPTRLSPISILFIDSANNVVYKQYEDMVVESCGCR

SEQ ID NO: 45233 - protein, 2249 aa, Homo sapiens
MKSATDRDLMELKAEHVRLSGSLLTCCLRLTVGAQSREPNGSGRMDGREPAQLLLLLAKTQELEKEAHERSQELIQLKSQGDLEKAELQDRVTELSALLTQSQKQNEDYEKMIKALRETVEILETNHTELMEHEASLSRNAQEEKLSLQQVIKDITQVMVEEGDNIAQGSGHENSLELDSSIFSQFDYQDADKALTLVRSVLTRRRQAVQDLRQQLAGCQEAVNLLQQQHDQWEEEGKALRQRLQKLTGERDTLAGQTVDLQGEVDSLSKERELLQKAREELRQQLEVLEQEAWRLRRVNVELQLQGDSAQGQKEEQQEELHLAVRERERLQEMLMGLEAKQSESLSELITLREALESSHLEGELLRQEQTEVTAALARAEQSIAELSSSENTLKTEVADLRAAAVKLSALNEALALDKVGLNQQLLQLEEENQSVCSRMEAAEQARNALQVDLAEAEKRREALWEKNTHLEAQLQKAEEAGAELQADLRDIQEEKEEIQKKLSESRHQQEAATTQLEQLHQEAKRQEEVLARAVQEKEALVREKAALEVRLQAVERDRQDLAEQLQGLSSAKELLESSLFEAQQQNSVIEVTKGQLEVQIQTVTQAKEVIQGEVRCLKLELDTERSQAEQERDAAARQLAQAEQEGKTALEQQKAAHEKEVNQLREKWEKERSWHQQELAKALESLEREKMELEMRLKEQQTEMEAIQAQREEERTQAESALCQMQLETEKERVSLLETLLQTQKELADASQQLERLRQDMKVQKLKEQETTGILQTQLQEAQRELKEAARQHRDDLAALQEESSSLLQDKMDLQKQVEDLKSQLVAQDDSQRLVEQEVQEKLRETQEYNRIQKELEREKASLTLSLMEKEQRLLVLQEADSIRQQELSALRQDMQEAQGEQKELSAQMELLRQEVKEKEADFLAQEAQLLEELEASHITEQQLRASLWAQEAKAAQLQLRLRSTESQLEALAAEQQPGNQAQAQAQLASLYSALQQALGSVCESRPELSGGGDSAPSVWGLEPDQNGARSLFKRGPLLTALSAEAVASALHKLHQDLWKTQQTRDVLRDQVQKLEERLTDTEAEKSQVHTELQDLQRQLSQNQEEKSKWEGKQNSLESELMELHETMASLQSRLRRAELQRMEAQGERELLQAAKENLTAQVEHLQAAVVEARAQASAAGILEEDLRTARSALKLKNEEVESERERAQALQEQGELKVAQGKALQENLALLTQTLAEREEEVETLRGQIQELEKQREMQKAALELLSLDLKKRNQEVDLQQEQIQELEKCRSVLEHLPMAVQEREQKLTVQREQIRELEKDRETQRNVLEHQLLELEKKDQMIESQRGQVQDLKKQLVTLECLALELEENHHKMECQQKLIKELEGQRETQRVALTHLTLDLEERSQELQAQSSQIHDLESHSTVLARELQERDQEVKSQREQIEELQRQKEHLTQDLERRDQELMLQKERIQVLEDQRTRQTKILEEDLEQIKLSLRERGRELTTQRQLMQERAEEGKGPSKAQRGSLEHMKLILRDKEKEVECQQEHIHELQELKDQLEQQLQGLHRKVGETSLLLSQREQEIVVLQQQLQEAREQGELKEQSLQSQLDEAQRALAQRDQELEALQQEQQQAQGQEERVKEKADALQGALEQAHMTLKERHGELQDHKEQARRLEEELAVEGRRVQALEEVLGDLRAESREQEKALLALQQQCAEQAQEHEVETRALQDSWLQAQAVLKERDQELEALRAESQSSRHQEEAARARAEALQEALGKAHAALQGKEQHLLEQAELSRSLEASTATLQASLDACQAHSRQLEEALRIQEGEIQDQDLRYQEDVQQLQQALAQRDEELRHQQEREQLLEKSLAQRVQENMIQEKQNLGQEREEEEIRGLHQSVRELQLTLAQKEQEILELRETQQRNNLEALPHSHKTSPMEEQSLKLDSLEPRLQRELERLQAALRQTEAREIEWREKAQDLALSLAQTKASVSSLQEVAMFLQASVLERDSEQQRLQDELELTRRALEKERLHSPGATSTAELGSRGEQGVQLGEVSGVEAEPSPDGMEKQSWRQRLEHLQQAVARLEIDRSRLQRHNVQLRSTLEQVERERRKLKREAMRAAQAGSLEISKATASSPTQQDGRGQKNSDAKCVAELQKEVVLLQAQLTLERKQKQDYITRSAQTSRELAGLHHSLSHSLLAVAQAPEATVLEAETRRLDESLTQSLTSPGPVLLHPSPSTTQAASR

SEQ ID NO: 45234 - protein, 521 aa, Homo sapiens
MLEAPYKKDENKLSSANGHEERSKKRKKSKSRSRSHERKRSKSKERKRSRDRERKKSKSRERKRSRSKERRRSRSRSRDRRFRGRYRSPYSGPKFNSAIRGKIGLPHSIKLSRRRSRSKSPFRKDKSPVREPIDNLTPEERDARTVFCMQLAARIRPRDLEEFFSTVGKVRDVRMISDRNSRRSKGIAYVEFVDVSSVPLAIGLTGQRVLGVPIIVQASQAEKNRAAAMANNLQKGSAGPMRLYVGSLHFNITEDMLRGIFEPFGRIESIQLMMDSETGRSKGYGFITFSDSECAKKALEQLNGFELAGRPMKVGHVTERTDASSASSFLDSDELERTGIDLGTTGRLQLMARLAEGTGLQIPPAAQQALQMSGSLAFGAVAEFSFVIDLQTRLSQQTEASALAAAASVQPLATQCFQLSNMFNPQTEEEVGWDTEIKDDVIEECNKHGGVIHIYVDKNSAQGNVYVKCPSIAAAIAAVNALHGRWFAGKMITAAYVPLPTYHNLFPDSMTATQLLVPSRR

SEQ ID NO: 45235 - protein, 515 aa, Homo sapiens
MLEAPYKKDENKLSSANGHEERSKKRKKSKSRSRSHERKRSKSKERKRSRDRERKKSKSRERKRSRSKERRRSRSRSRDRRFRGRYRSPYSGPKFNSAIRGKIGLPHSIKLSRRRSRSKSPFRKDKSPVREPIDNLTPEERDARTVFCMQLAARIRPRDLEEFFSTVGKVRDVRMISDRNSRRSKGIAYVEFVDVSSVPLAIGLTGQRVLGVPIIVQASQAEKNRAAAMANNLQKGSAGPMRLYVGSLHFNITEDMLRGIFEPFGRIESIQLMMDSETGRSKGYGFITFSDSECAKKALEQLNGFELAGRPMKVGHVTERTDASSASSFLDSDELERTGIDLGTTGRLQLMARLAEGTGLQIPPAAQQALQMSGSLAFGAVADLQTRLSQQTEASALAAAASVQPLATQCFQLSNMFNPQTEEEVGWDTEIKDDVIEECNKHGGVIHIYVDKNSAQGNVYVKCPSIAAAIAAVNALHGRWFAGKMITAAYVPLPTYHNLFPDSMTATQLLVPSRR

SEQ ID NO: 45236 - protein, 499 aa, Homo sapiens
MLEAPYKKDENKLSSANGHEERSKKRKKSKSRSRSHERKRSKSKERKRSRDRERKKSKSRERKRSRSKERRRSRSRSRDRRFRGRYRSPYRRRSRSKSPFRKDKSPVREPIDNLTPEERDARTVFCMQLAARIRPRDLEEFFSTVGKVRDVRMISDRNSRRSKGIAYVEFVDVSSVPLAIGLTGQRVLGVPIIVQASQAEKNRAAAMANNLQKGSAGPMRLYVGSLHFNITEDMLRGIFEPFGRIESIQLMMDSETGRSKGYGFITFSDSECAKKALEQLNGFELAGRPMKVGHVTERTDASSASSFLDSDELERTGIDLGTTGRLQLMARLAEGTGLQIPPAAQQALQMSGSLAFGAVAEFSFVIDLQTRLSQQTEASALAAAASVQPLATQCFQLSNMFNPQTEEEVGWDTEIKDDVIEECNKHGGVIHIYVDKNSAQGNVYVKCPSIAAAIAAVNALHGRWFAGKMITAAYVPLPTYHNLFPDSMTATQLLVPSRR

SEQ ID NO: 45237 - protein, 604 aa, Homo sapiens [sequence omitted]

SEQ ID NO: 45238 - protein, 30 aa, Homo sapiens
MLVQEQLLAILPEAARARRIRRRTDVRITG

SEQ ID NO: 45239 - protein, 819 aa, Homo sapiens
MEEKDYSEADGLSERTTPSKAQKSPQKIAKKYKSAICRVTLLDASEYECEVEKHGRGQVLFDLVCEHLNLLEKDYFGLTFCDADSQKNWLDPSKEIKKQIRSSPWNFAFTVKFYPPDPAQLTEDITRYYLCLQLRADIITGRLPCSFVTHALLGSYAVQAELGDYDAEEHVGNYVSELRFAPNQTRELEERIMELHKTYRGMTPGEAEIHFLENAKKLSMYGVDLHHAKDSEGIDIMLGVCANGLLIYRDRLRINRFAWPKILKISYKRSNFYIKIRPGEYEQFESTIGFKLPNHRSAKRLWKVCIEHHTFFRLVSPEPPPKGFLVMGSKFRYSGRTQAQTRQASALIDRPAPFFERSSSKRYTMSRSLDGAEFSRPASVSENHDAGPDGDKRDEDGESGGQRSEAEEGEVRTPTKIKELKPEQETTPRHKQEFLDKPEDVLLKHQASINELKRTLKEPNSKLIHRDRDWERERRLPSSPASPSPKGTPEKANERAGLREGSEEKVKPPRPRAPESDTGDEDQDQERDTVFLKDNHLAIERKCSSITVSSTSSLEAEVDFTVIGDYHGSAFEDFSRSLPELDRDKSDSDTEGLLFSRDLNKGAPSQDDESGGIEDSPDRGACSTPDMPQFEPVKTETMTVSSLAIRKKIEPEAVLQTRVSAMDNTQQVDGSASVGREFIATTPSITTETISTTMENSLKSGKGAAAMIPGPQTVATEIRSLSPIIGKDVLTSTYGATAETLSTSTTTHVTKTVKGGFSETRIEKRIIITGDEDVDQDQALALAIKEAKLQHPDMLVTKAVVYRETDPSPEERDKKPQES

SEQ ID NO: 45240 - protein, 1533 aa, Homo sapiens
MEEKDYSEADGLSERTTPSKAQKSPQKIAKKYKSAICRVTLLDASEYECEVEKHGRGQVLFDLVCEHLNLLEKDYFGLTFCDADSQKNWLDPSKEIKKQIRSSPWNFAFTVKFYPPDPAQLTEDITRYYLCLQLRADIITGRLPCSFVTHALLGSYAVQAELGDYDAEEHVGNYVSELRFAPNQTRELEERIMELHKTYRGMTPGEAEIHFLENAKKLSMYGVDLHHAKDSEGIDIMLGVCANGLLIYRDRLRINRFAWPKILKISYKRSNFYIKIRPGEYEQFESTIGFKLPNHRSAKRLWKVCIEHHTFFRLVSPEPPPKGFLVMGSKFRYSGRTQAQTRQASALIDRPAPFFERSSSKRYTMSRSLDGAEFSRPASVSENHDAGPDGDKRDEDGESGGQRSEAEEGEVRTPTKIKELKPEQETTPRHKQEFLDKPEDVLLKHQASINELKRTLKEPNSKLIHRDRDWERERRLPSSPASPSPKGTPEKANESQRTQDISQRDLVPEPGAAAGLEVFTQKSLAASPEGSEHWVFIEREYTRPEELGLLKVTTMQQEERQAGLAGILANGRLSKVDVLVDKFKVEVATEEMVGNRRANTQQQGKMIASPEDFESVGEEGPWIRESPGGAALASGRTLAEKLLEGSELRADTREATIRNRCMSDGQPEGQTELRKGLEEPHTCGRPTAPGTRPAEVDVLSPASDKGGLQSFLLDPAHAEARAELSNETDTSFAERSFYLNYEEKDSEDQVLPPPLEERKGRLDAPPGGEPRPTLNSLDLRVSAAASSRSKDEAHMTSPKEGAGTPKNHGGPGDLKGSPAGQTFAEGWEDAQWGVEGEFPHLTASAAREEGTPVSGDLLGKAEESPTEELKKHPPHRGQGVHPDPQACALPRAIPLNVRKPVKPDRGNFPPKERGVVPTQKGGAELKDREASAFLHMEVIIPLPASPGHSEDLAALEEASPSPTSHGSGEPSELREPFLRHVHLSKASPEPKDQVGFVVSPATGGERRPPPITSRKPRVVPEEAEGRIPLGFGFPSGKRREMTSFQAGDQEGSLEDISKTSVANKIRIFETHGAETRRMSEGEARSLPNDVSSEAPVGQAEQQRSTLSDLGFAQLQPPGDFASPKATHSTVIPLATRHFREDTSASYQEAHTELEPVSPNSGCETTLAEATGTGNKSGDAVREEKRSTNLAANTPGKGGRLRFASPSGPQRAGLREGSEEKVKPPRPRAPESDTGDEDQDQERDTVFLKDNHLAIERKCSSITVSSTSSLEAEVDFTVIGDYHGSAFEDFSRSLPELDRDKSDSDTEGLLFSRDLNKGAPSQDDESGGIEDSPDRGACSTPDMPQFEPVKTETMTVSSLAIRKKIEPEAVLQTRVSAMDNTQVDGSASVGREFIATTPSITTETISTTMENSLKSGKGAAAMIPGPQTVATEIRSLSPIIGKDVLTSTYGATAETLSTSTTTHVTKTVKGGFSETRIEKRIIITGDEDVDQDQALALAIKEAKLQHPDMLVTKAVVYRETDPSPEERDKKPQES

SEQ ID NO: 45241 - protein, 21 aa, Homo sapiens
MTSFALFMVIWIIFYTAIHYD

SEQ ID NO: 45242 - protein, 263 aa, Homo sapiens [sequence omitted]

SEQ ID NO: 45243 - protein, 276 aa, Homo sapiens
MDELAEMLPPVLTHLSLKSIIGIGVGAGAYILSRFALNHPELVEGLVLINVDPCAKGWIDWAASKLSGLTTNVVDIILAHHFGQEELQANLDLIQTYRMHIAQDINQDNLQLFLNSYNGRRDLEIERPILGQNDNKSKTLKCSTLLVVGDNSPAVEAVVECNSRLNPINTTLLKMADCGGLPQVVQPGKLTEAFKYFLQGMGYIPYVQLSHLSTESVPSASMTRLARSRTHSTSSSLGSGESPFSRSVTSNQSDGTQESCESPDVLDRHQTMEVSC

SEQ ID NO: 45244 - protein, 989 aa, Homo sapiens [sequence omitted]

SEQ ID NO: 45245 - protein, 812 aa, Homo sapiens
MRQEVFVTIADLSYQDVHLLLGSEDRAELFSLTIKSIITLPSVRTLTQIQEIMPNGTCNTECLYRQTFQAFSEMLQSLVVKDPHLENLDTIIKHLVPWLQSVKDHERERATASMAQVLKCLSKHLNLKLPLRFQRLGHLVALMALLCGDPQEKVAEEAAEGIHSLLHITLRLKYITHDKKDQQNLKRALTKCREFLELHSSAAKCFYNCPFRIAQVFEGFLDSNELCQFIMTTFDTLKTLKHPCIQRSAGELLLTLAKNTESQFEKVPEIMGVICAQLSIISQPRVRQQIINTVSLFISRPKYTDIVLSFLLCHPVPYNRHLAEVWRMLSVELPSTTWILWRLLRKLQKCHNEPAQEKMAYVAVAATDALYEVFLGNRLRAATFRLFPQLLMTLLIQIHHSIGLTMSDVDIPSGLYTEQEVPSEVTPLCFAMQATKTLLLRTCCLQEFNIMEKNKGWALLGGKDGHLQGLFLLANALLERNQLLAQKVMYLLVPLLNRGNDKHKLTSAGFFVELLRSPVAKRLPSIYSVARFKDWLQDGNHLFRILGLRGLYNLVGHQEMREDIKSLLPYIVDSLRETDEKIVLSAIQILLQLVRTMDFTTLAAMMRTLFSLFGDVRSDVHRFSVTLFGAAIKSVKNPDKKSIENQVLDSLVPLLLYSQDENDAVAEESRQVLTICAQFLKWKLPQEVYSKDPWHIKPTEAGTICRFFEKKCKGKINILEQTLMYSKNPKLPIRRSAVLFVGLLSKYMDHNELRRMGTDWIEDDLRDLLCDPEPSLCIIASQTLLLVQMARAEPKPKQRVNWLQKLMGRSSA

SEQ ID NO: 45246 - protein, 155 aa, Homo sapiens [sequence omitted]

SEQ ID NO: 45247 - protein, 1428 aa, Homo sapiens
MEVICYGLTLPLDGETVKYCVDVYTDWIMALVLPKDSIPLPVIKEPNQYVQTILKHLQNLFVPRQEQGSSQIRLCLQVLRAIQKLARESSLMARETWEVLLLFLLQINDILLAPPTVQGGIAENLAEKLIGVLFEVWLLACTRCFPTPPYWKTAKEMVANWRHHPAVVEQWSKVICALTSRLLRFTYGPSFPAFKVPDEDASLIPPEMDNECVAQTWFRFLHMLSNPVDLSNPAIISSTPKFQEQFLNVSGMPQELNQYPCLKHLPQIFFRAMRGISCLVDAFLGISRPRSDSAPPTPVNRLSMPQSAAVSTTPPHNRRHRAVTVNKATMKTSTVSTAHASKVQHQTSSTSPLSSPNQTSSEPRPLPAPRRPKVNSILNLFGSWLFDAAFVHCKLHNGINRDSSMTAITTQASMEFRRKGSQMSTDTMVSNPMFDASEFPDNYEAGRAEACGTLCRIFCSKKTGEEILPAYLSRFYMLLIQGLQINDYVCHPVLASVILNSPPLFCCDLKGIDVVVPYFISALETILPDRELSKFKSYVNPTELRRSSINILLSLLPLPHHFGTVKSEVVLEGKFSNDDSSSYDKPITFLSLKLRLVNILIGALQTETDPNNTQMILGAMLNIVQDSALLEAIGCQMEMGGGENNLKSHSRTNSGISSASGGSTEPTTPDSERPAQALLRDYALNTDSAAGLLIRSIHLVTQRLNSQWRQDMSISLAALELLSGLAKVKVMVDSGDRKRAISSVCTYIVYQCSRPAPLHSRDLHSMIVAAFQCLCVWLTEHPDMLDEKDCLKEVLEIVELGISGSKSKNNEQEVKYKGDKEPNPASMRVKDAAEATLTCIMQLLGAFPSPSGPASPCSLVNETTLIKYSRLPTINKHSFRYFVLDNSVILAMLEQPLGNEQNDFFPSVTVLVRGMSGRLAWAQQLCLLPRGAKANQKLFVPEPRPVPKNDVGFKYSVKHRPFPEEVDKIPFVKADLSIPDLHEIVTEELEERHEKLRSGMAQQIAYEIHLEQQSEEELQKRSFPDPVTDCKPPPPAQEFQTARLFLSHFGFLSLEALKEPANSRLPPHLIALDSTIPGFFDDIGYLDLLPCRPFDTVFIFYMKPGQKTNQEILKNVESSRTVQPHFLEFLLSLGWSVDVGRHPGWTGHVSTSWSINCCDDGEGSQQEVISSEDIGASIFNGQKKVLYYADALTEIAFVVPSPVESLTDSLESNISDQDSDSNMDLMPGILKQPSLTLELFPNHTDNLNSSQRLSPSSRMRKLPQGRPVPPLGPETRVSVVWVERYDDIENFPLSELMTEISTGVETTANSSTSLRSTTLEKEVPVIFIHPLNTGLFRIKIQGATGKFNMVIPLVDGMIVSRRALGFLVRQTVINICRRKRLESDSYSPPHVRRKQKITDIVNKYRNKQLEPEFYTSLFQEVGLKNCSS

SEQ ID NO: 45248 - protein, 1425 aa, Homo sapiens
MEVICYGLTLPLDGETVKYCVDVYTDWIMALVLPKDSIPLPVIKEPNQYVQTILKHLQNLFVPRQEQGSSQIRLCLQVLRAIQKLARESSLMARETWEVLLLFLLQINDILLAPPTVQGGIAENLAEKLIGVLFEVWLLACTRCFPTPPYWKTAKEMVANWRHHPAVVEQWSKVICALTSRLLRFTYGPSFPAFKVPDEDASLIPPEMDNECVAQTWFRFLHMLSNPVDLSNPAIISSTPKFQEQFLNVSGMPQELNQYPCLKHLPQIFFRAMRGISCLVDAFLGISRPRSDSAPPTPVNRLSMPQSAAVSTTPPHNRRHRAVTVNKATMKTSTVSTAHASKVQHQTSSTSPLSSPNQTSSEPRPLPAPRRPKVNSILNLFGSWLFDAAFVHCKLHNGINRDSSMTAITTQASMEFRRKGSQMSTDTMVSNPMFDASEFPDNYEAGRAEACGTLCRIFCSKKTGEEILPAYLSRFYMLLIQGLQINDYVCHPVLASVILNSPPLFCCDLKGIDVVVPYFISALETILPDRELSKFKSYVNPTELRRSSINILLSLLPLPHHFGTVKSEVVLEGKFSNDDSSSYDKPITFLSLKLRLVNILIGALQTETDPNNTQMILGAMLNIVQDSALLEAIGCQMEMGGGENNLKSHSRTNSGISSASGGSTEPTTPDSERPAQALLRDYDSAAGLLIRSIHLVTQRLNSQWRQDMSISLAALELLSGLAKVKVMVDSGDRKRAISSVCTYIVYQCSRPAPLHSRDLHSMIVAAFQCLCVWLTEHPDMLDEKDCLKEVLEIVELGISGSKSKNNEQEVKYKGDKEPNPASMRVKDAAEATLTCIMQLLGAFPSPSGPASPCSLVNETTLIKYSRLPTINKHSFRYFVLDNSVILAMLEQPLGNEQNDFFPSVTVLVRGMSGRLAWAQQLCLLPRGAKANQKLFVPEPRPVPKNDVGFKYSVKHRPFPEEVDKIPFVKADLSIPDLHEIVTEELEERHEKLRSGMAQQIAYEIHLEQQSEEELQKRSFPDPVTDCKPPPPAQEFQTARLFLSHFGFLSLEALKEPANSRLPPHLIALDSTIPGFFDDIGYLDLLPCRPFDTVFIFYMKPGQKTNQEILKNVESSRTVQPHFLEFLLSLGWSVDVGRHPGWTGHVSTSWSINCCDDGEGSQQEEVISSEDIGASIFNGQKKVLYYADALTEIAFVVPSPVESLTDSLESNISDQDSDSNMDLMPGILKQPSLTLELFPNHTDNLNSSQRLSPSSRMRKLPQGRPVPPLGPETRVSVVWVERYDDIENFPLSELMTEISTGVETTANSSTSLRSTTLEKEVPVIFIHPLNTGLFRIKIQGATGKFNMVIPLVDGMIVSRRALGFLVRQTVINICRRKRLESDSYSPPHVRRKQKITDIVNKYRNKQLEPEFYTSLFQEVGLKNCSS

SEQ ID NO: 45249 - protein, 419 aa, Homo sapiens
MDVFTDIDIFRDLQEICRKQGVAVYILLDQALLSQFLDMCMDLKVHPEQEKLMTVRTITGNIYYARSGTKIIGKVHEKFTLIDGIRVATGSYSFTWTDGKLNSSNLVILSGQVVEHFDLEFRILYAQSKPISPKLLSHFQSSNKFDHLTNRKPQSKELTLGNLLRMRLARLSSTPRKADLDPEMPAEGKAERKPHDCESSTVSEEDYFSSHRDELQSRKAIDAATQTEPGEEMPGLSVSEVGTQTSITTACAGTQTAVITRIASSQTTIWSRSTTTQTDMDENILFPRGTQSTEGSPVSKMSVSRSSSLKSSSSVSSQGSVASSTGSPASIRTTDFHNPGYPKYLGTPHLELYLSDSLRNLNKERQFHFAGIRSRLNHMLAMLSRRTLFTENHLGLHSGNFSRVNLLAVRDVALYPSYQ

SEQ ID NO: 45250 - protein, 519 aa, Homo sapiens
MKLSPKAEEVATFFAKMLDHEYTTKEIFRKNFFKDWRKEMTNEEKNIITNLSKCDFTQMSQYFKAQTEARKQMSKEEKLKIKEENEKLLKEYGFCIMDNHKERIANFKIEPPGLFRGRGNHPKMGMLKRRIMPEDIIINCSKDAKVPSPPPGHKWKEVRHDNKVTWLVSWTENIQGSIKYIMLNPSSRIKGEKDWQKYETARRLKKCVDKIRNQYREDWKSKEMKVRQRAVALYFIDKLALRAGNEKEEGETADTVGCCSLRVEHINLHPELDGQEYVVEFDFLGKDSIRYYNKVPVEKRVFKNLQLFMENKQPEDDLFDRLNTGILNKHLQDLMEGLTAKVFRTYNASITLQQQLKELTAPDENIPAKILSYNRANRAVAILCNHQRAPPKTFEKSMMNLQTKIDAKKEQLADARRDLKSAKADAKVMKDAKTKKVVESKKKAVQRLEEQLMKLEVQATDREENKQIALGTSKLNYLDPRITVAWCKKWGVPIEKIYNKTQREKFAWAIDMADEDYEF

SEQ ID NO: 45251 - protein, 657 aa, Homo sapiens
MDSNSFLKNSFHKFPYPTKAELCYLTVVTKYPEEQLKIWFTAQRLKQGISWSPEEIEDARKKMFNTVIQSVPQPTITVLNTPLVASAGNVQHLIQAALPGHVVGQPEGTGGGLLVTQPLMANGLQATSSPLPLTVTSVPKQPGVAPINTVCSNTTSAVKVVNAAQSLLTACPSITSQAFLDASIYKNKKSHEQLSALKGSFCRNQFPGQSEVEHLTKVTGLSTREVRKWFSDRRYHCRNLKGSRAMIPGDHSSIIIDSVPEVSFSPSSKVPEVTCIPTTATLATHPSAKRQSWHQTPDFTPTKYKERAPEQLRALESSFAQNPLPLDEELDRLRSETKMTRREIDSWFSERRKKVNAEETKKAEENASQEEEEAAEDEGGEEDLASELRVSGENGSLEMPSSHILAERKVSPIKINLKNLRVTEANGRNEIPGLGACDPEDDESNKLAEQLPGKVSCKKTAQQRHLLRQLFVQTQWPSNQDYDSIMAQTGLPRPEVVRWFGDSRYALKNGQLKWYEDYKRGNFPPGLLVIAPGNRELLQDYYMTHKMLYEEDLQNLCDKTQMSSQQVKQWFAEKMGEETRAVADTGSEDQGPGTGELTAVHKGMGDTYSEVSENSESWEPRVPEASSEPFDTSSPQAGRQLGSWSLSSQPLPSLLTL

SEQ ID NO: 45252 - protein, 2693 aa, Homo sapiens
MSDASVNFDYKSPSPFDCSTDQEEKIEDVASHCLPQKDLYTAEEEAATLFPRKMTSHNGMEDSGGGGTGVKKKRKKKEPGDQEGAAKGSKDREPKPKRKREPKEPKEPRKAKEPKKAKEHKEPKQKDGAKKARKPREASGTKEAKEKRSCTDSAARTKSRKASKEQGPTPVEKKKKGKRKSETTVESLELDQGLTNPSLRSPEESTESTDSQKRRSGRQVKRRKYNEDLDFKVVDDDGETIAVLGAGRTSALSASTLAWQAEEPPEDDANIIEKILASKTVQEVHPGEPPFDLELFYVKYRNFSYLHCKWATMEELEKDPRIAQKIKRFRNKQAQMKHIFTEPDEDLFNPDYVEVDRILEVAHTKDAETGEEVTHYLVKWCSLPYEESTWELEEDVDPAKVKEFESLQVLPEIKHVERPASDSWQKLEKSREYKNSNQLREYQLEGMNWLLFNWYNRKNCILADEMGLGKTIQSITFLSEIFLRGIHGPFLIIAPLSTITNWEREFRTWTEMNAIVYHGSQISRQMIQQYEMVYRDAQGNPLSGVFKFHVVITTFEMILADCPELKKIHWSCVIIDEAHRLKNRNCKLLEGLKLMALEHKVLLTGTPLQNSVEELFSLLNFLEPSQFPSETAFLEEFGDLKTEEQVKKLQSILKPMMLRRLKDDVEKNLAPKQETIIEVELTNIQKKYYRAILEKNFSFLTKGANQHNMPNLINTMMELRKCCNHPYLINGAEEKILEDFRKTHSPDAPDFQLQAMIQAAGKLVLIDKLLPKLIAGGHKVLIFSQMVRCLDILEDYLIQRRYTYERIDGRVRGNLRQAAIDRFCKPDSDRFVFLLCTRAGGLGINLTAADTCIIFDSDWNPQNDLQAQARCHRIGQSKAVKVYRLITRNSYEREMFDKASLKLGLDKAVLQDINRKGGTNGVQQLSKMEVEDLLRKGAYGALMDEEDEGSKFCEEDIDQILQRRTHTITIQSEGKGSTFAKASFVASGNRTDISLDDPNFWQKWAKIAELDTEAKNEKESLVIDRPRVRKQTKHYNSFEEDELMEFSELDSDSDERPTRSRRLNDKARRYLRAECFRVEKNLLIFGWGRWKDILTHGRFKWHLNEKDMEMICRALLVYCVKHYKGDEKIKSFIWELITPTKDGQAQTLQNHSGLSAPVPRGRKGKKTKNQLLIPELKDADWLATCNPEVVLHDDGYKKHLKQHCNKVLLRVRMLYYLKAEILGEAAEKAFEGSPARELDVPLPDIDYMEIPVDWWDAEADKSLLIGVFKHGYERYNAMRADPALCFLEKVGMPDEKSLSAEQGVTDGTSDIPERGNTDKEDNAEDKVDGLQKQTESSSDGGDGVFSEKKDDSRAAQDGSDPDKSPWPVSSALTARLRRLVTVYQRCNRKELCRPEILGPGNQGYWVQEEMFRRTSEMDLINKEAQKRWTRREQADFYRTVSSFGVVYDQEKKTFDWTQFRIISRLDKKSDESLEQYFYSFVAMCRNVCRLPTWKDGGPPDTTIYVEPITEERAARTLYRIELLRKVREQVLKCPQLHERLQLCRPSLYLPVWWECGKHDRDLLIGTAKHGLNRTDCYIMNDPQLSFLDAYRNYAQHKRSGTQAPGNLCCLYQTNSKLYESLTYSQMSRTSESLENEPENLVRVESRDDHLSLPDVTCENFISKVQDVISINHDESLLPESLESMMYGKKVLSQEPSSFQESPSTNTESRKDVITISISKDGNCQSGGPEAEIASGPTFMGSLEAGGVAQANIKNGKHLLMSISKEGELCCSEAGQRPENIGQLEAKCLASPSLNPGNESGFVDMCSLSVCDSKRNLSSDQQLIDLLENKSLESKLILSQNHSDEEEEEEENEEENLAMAVGMGERPEVLHLTEPTTNISREKNQGFQDETKKGSLEVANQTPGLQRAFPAPAACQCHCKHMERWMHGLENDEFEIEKPKAYIPDLFKSKTNTIAMEGEPTAIPSQPFKVKHELLKEPWKESAEGQNVFPTYPLEGSELKSEDMDFENKDDYDRDGNCHSQDYPGKYSEEESKSSTSGITGDIGDELQEARAPTIAQLLQEKTLYSFSEWPKDRVIINRLDNICHVVLKGKWPSSQQYEPSGTLPTPVLTSSAGSRTSLSEPEAAEHSFSNGAALAAQIHKESFLAPVFTKDEQKHRRPYEFEVERDAKARGLEQFSATHGHTPIILNGWHGESAMDLSCSSEGSPGATSPFPVSASTPKIGAISSLQGALGMDLSGILQAGLIHPVTGQIVNGSLRRDDAATRRRRGRRKHVEGGMDLIFLKEQTLQAGILEVHEDPGQATLSTTHPEGPGPATSAPEPATAASSQAEKSIPSKSLLDWLRQQADYSLEVPGFGANFSDKPKQRRPRCKEPGKLDVSSLSGEERVPAIPKEPGLRGFLPENKFNHTLAEPILRDTGPRRRGRRPRSELLKAPSIVADSPSGMGPLFMNGLIAGMDLVGLQNMRNMPGIPLTGLVGFPAGFATMPTGEEVKSTLSMLPMMLPGMAAVPQMFGVGGLLSPPMATTCTSTAPASLSSTTKSGTAVTEKTAEDKPSSHDVKTDTLAEDKPGPGPFSDQSEPAITTSSPVAFNPFLIPGVSPGLIYPSMFLSPGMGMALPAMQQARHSEIVGLESQKRKKKKTKGDNPNSHPEPAPSCEREPSGDENCAEPSAPLPAEREHGAQAGEGALKDSNNDTN

SEQ ID NO: 45253 - protein, 26 aa, Homo sapiens
MSSPALSKACCLQKRRARRMEITSER

SEQ ID NO: 45254 - protein, 75 aa, Homo sapiens [sequence omitted]

SEQ ID NO: 45255 - protein, 127 aa, Homo sapiens
MGSLLTASSHTWLYSASLQAVDILKTERLGHGYHTLEDQALYNRLRQENMHFEICPWSSYLTGAWKPDTEHAVIRLKNDQANYSLNTDDPLIFKSTLDTDYQMTKRDMGFTEEEFKRLVSGCEPYWP

SEQ ID NO: 45256 - protein, 220 aa, Homo sapiens [sequence omitted]

SEQ ID NO: 45257 - protein, 411 aa, Homo sapiens
MQQCDSPHVVKYYGSYFKNTDLWIVMEYCGAGSVSDIIRLRNKTLTEDEIATILQSTLKGLEYLHFMRKIHRDIKAGNILLNTEGHAKLADFGVAGQLTDTMAKRNTVIGTPFWMAPEVIQEIGYNCVADIWSLGITAIEMAEGKPPYADIHPMRAIFMIPTNPPPTFRKPELWSDNFTDFVKQCLVKSPEQRATATQLLQHPFVRSAKGVSILRDLINEAMDVKLKRQESQQREVDQDDEENSEEDEMDSGTMVRAVGDEMGTVRVASTMTDGANTMIEHDDTLPSQLGTMVINAEDEEEEGTMKRRDETMQPAKPSFLEYFEQKEKENQINSFGKSVPGPLKNSSDWKIPQDGDYEFLKSWTVEDLQKRLLALDPMMEQEIEEIRQKYQSKRQPILDAIEAKKRRQQNF

SEQ ID NO: 45258 - protein, 574 aa, Homo sapiens
MPLALLVLLLLGPGGWCLAEPPRDSLREELVITPLPSGDVAATFQFRTRWDSELQREGVSHYRLFPKALGQLISKYSLRELHLSFTQGFWRTRYWGPPFLQAPSGAELWVWFQDTVTDVDKSWKELSNVLSGIFCASLNFIDSTNTVTPTASFKPLGLANDTDHYFLRYAVLPREVVCTENLTPWKKLLPCSSKAGLSVLLKADRLFHTSYHSQAVHIRPVCRNARCTSISWELRQTLSVVFDAFITGQGKKDWSLFRMFSRTLTEPCPLASESRVYVDITTYNQDNETLEVHPPPTTTYQDVILGTRKTYAIYDLLDTAMINNSRNLNIQLKWKRPPENEAPPVPFLHAQRYVSGYGLQKGELSTLLYNTHPYRAFPVLLLDTVPWYLRLYVHTLTITSKGKENKPSYIHYQPAQDRLQPHLLEMLIQLPANSVTKVSIQFERALLKWTEYTPDPNHGFYVSPSVLSALVPSMVAAKPVDWEESPLFNSLFPVSDGSNYFVRLYTEPLLVNLPTPDFSMPYNVICLTCTVVAVCYGSFYNLLTRTFHIEEPRTGGLAKRLANLIRRARGVPPL

SEQ ID NO: 45259 - protein, 518 aa, Homo sapiens
MPLALLVLLLLGPGGWCLAEPPRDSLREELVITPLPSGDVAATFQFRTRWDSELQREGVSHYRLFPKALGQLISKYSLRELHLSFTQGFWRTRYWGPPFLQAPSDTDHYFLRYAVLPREVVCTENLTPWKKLLPCSSKAGLSVLLKADRLFHTSYHSQAVHIRPVCRNARCTSISWELRQTLSVVFDAFITGQGKKDWSLFRMFSRTLTEPCPLASESRVYVDITTYNQDNETLEVHPPPTTTYQDVILGTRKTYAIYDLLDTAMINNSRNLNIQLKWKRPPENEAPPVPFLHAQRYVSGYGLQKGELSTLLYNTHPYRAFPVLLLDTVPWYLRLYVHTLTITSKGKENKPSYIHYQPAQDRLQPHLLEMLIQLPANSVTKVSIQFERALLKWTEYTPDPNHGFYVSPSVLSALVPSMVAAKPVDWEESPLFNSLFPVSDGSNYFVRLYTEPLLVNLPTPDFSMPYNVICLTCTVVAVCYGSFYNLLTRTFHIEEPRTGGLAKRLANLIRRARGVPPL

SEQ ID NO: 45260 - protein, 117 aa, Homo sapiens
MINNSRNLNIQLKWKRPPENEAPPVPFLHAQRYVSGYGLQKGELSTLLYNTHPYRAFPVLLLDTVPWYLRLYVHTLTITSKGKENKPSEDLSPEPGPQPALSCPLQVPQTLISQGSS

SEQ ID NO: 45261 - protein, 289 aa, Homo sapiens
MIKHRQVQRRGRRSQMTTSFTDPAISMDLLRAVLQPSINEEIQTVFNKYMKFFQKAALNVRDNVGEEVDAEQLIQEACRSCLEQAKLLFSDGEKVIPRLTHELPGIKRGRQAEEECAHRGSPLPKKRKGRPPGHILSSDRAAAGMVWKPKSCEPIRREGPKWDPARLNESTTFVLGSRANKALGMGGTRGRIYIKHPHLFKYAADPQDKHWLAEQHHMRATGGKMAYLLIEEDIRDLAASDDYRGCLDLKLEELKSFVLPSWMVEKMRKYMETLRTENEHRAVEAPPQT

SEQ ID NO: 45262 - protein, 106 aa, Homo sapiens
MQHQFSMPTVPPPEELLDCETLIDQYLRDPNLQKRYPLALNRIAAQEVPIEIKPVNPSPLSQLQRMEPKQMFWVRARGYIGKSTPWMGGNHSPRGLPLICCVALGT

SEQ ID NO: 45263 - protein, 452 aa, Homo sapiens [sequence omitted]

SEQ ID NO: 45264 - protein, 550 aa, Homo sapiens
MWGTSPEDKQQAALLRPTEVYWDLDIQTNAVIKHRGPSEVLPPHPEVELLRSQLILKLRQHYRELCQQREGIEPPRESFNRWMLERKVVDKGSDPLLPSNCEPVVSPSMFREIMNDIPIRLSRIKFREEAKRLLFKYAEAARRLIESRSASPDSRKVVKWNVEDTFSWLRKDHSASKEDYMDRLEHLRRQCGPHVSAAAKDSVEGICSKIYHISLEYVKRIREKHLAILKENNISEEVEAPEVEPRLVYCYPVRLAVSAPPMPSVEMHMENNVVCIRYKGEMVKVSRNYFSKLWLLYRYSCIDDSAFERFLPRVWCLLRRYQMMFGVGLYEGTGLQGSLPVHVFEALHRLFGVSFECFASPLNCYFRQYCSAFPDTDGYFGSRGPCLDFAPLSGSFEANPPFCEELMDAMVSHFERLLESSPEPLSFIVFIPEWREPPTPALTRMEQSRFKRHQLILPAFEHEYRSGSQHICKKEEMHYKAVHNTAVLFLQNDPGFAKWAPTPERLQELSAAYRQSGRSHSSGSSSSSSSEAKDRDSGREQGPSREPHPT

SEQ ID NO: 45265 - protein, 474 aa, Homo sapiens
MYDRYRDMRDSRDPMYRREGSYDRYLRMDDYCRRKDDSYFDRYRDSFDGRGPPGPESQSRAKERLKREERRREELYRQYFEEIQRRFDAERPVDCSVIVVNKQTKDYAESVGRKVRDLGMVVDLIFLNTEVSLSQALEDVSRGGSPFAIVITQQHQIHRSCTVNIMFGTPQEHRNMPQADAMVLVARNYERYKNECREKEREEIARQAAKMADEAILQERERGGPEEGVRGGHPPAIQSLINLLADNRYLTAEETDKIINYLRERKERLMRSSTDSLPGPISRQPLGATSGASLKTQPSSQPLQSGQVLPSATPTPSAPPTSQQELQAKILSLFNSGTVTANSSSASPSVAAGNTPNQNFSTAANSQPQQRSQASGNQPPSILGQGGSAQNMGPRPGAPSQGLFGQPSSRLAPASNMTSQRPVSSTGINFDNPSVQKALDTLIQSGPALSHLVSQTTAQMGQPQAPMGSYQRHY

SEQ ID NO: 45266 - protein, 146 aa, Homo sapiens
MPPPSDIVKVAIEWPGANAQLLEIDQKRPLASIIKEVCDGWSLPNPEYYTLRYADGPQLYITEQTRSDIKNGTILQLAISPSRAARQLMERTQSSNMETRLDAMKELAKLSADVTFATEFINMDGIIVLTRLVESGTKLLSQLQGM

SEQ ID NO: 45267 - protein, 473 aa, Homo sapiens [sequence omitted]

SEQ ID NO: 45268 - protein, 1220 aa, Homo sapiens
MKTPHDILEDINASPEMRQRYETMQCFALSQPRAMMEEGEDLQSCMICVARRITTGERTFPSNPESFITRHDLSGKVVNIDTNSLRSSMRPGFEDIIRRCIQRFFSLNDGQSWSQKRHYQEAYLNGHAETPVYRFSLADGTIVTAQTKSKLFRNPVTNDRHGFVSTHFLQREQNGYRPNPNPVGQGIRPPMAGCNSSVGGMSMSPNQGLQMPSSRAYGLADPSTTGQMSGARYGGSSNIASLTPGPGMQSPSSYQNNNYGLNMSSPPHGSPGLAPNQQNIMISPRNRGSPKIASHQFSPVAGVHSPMASSGNTGNHSFSSSSLSALQAISEGVGTSLLSTLSSPGPKLDNSPNMNITQPSKVSNQDSKSPLGFYCDQNPVESSMCQSNSRDHLSDKESKESSVEGAENQRGPLESKGHKKLLQLLTCSSDDRGHSSLTNSPLDSSCKESSVSVTSPSGVSSSTSGGVSSTSNMHGSLLQEKHRILHKLLQNGNSPAEVAKITAEATGKDTSSITSCGDGNVVKQEQLSPKKKENNALLRYLLDRDDPSDALSKELQPQVEGVDNKMSQCTSSTIPSSSQEKDPKIKTETSEEGSGDLDNLDAILGDLTSSDFYNNSISSNGSHLGTKQQVFQGTNSLGLKSSQSVQSIRPPYNRAVSLDSPVSVGSSPPVKNISAFPMLPKQPMLGGNPRMMDSQENYGSSMGGPNRNVTVTQTPSSGDWGLPNSKAGRMEPMNSNSMGRPGGDYNTSLPRPALGGSIPTLPLRSNSIPGARPVLQQQQQMLQMRPGEIPMGMGANPYGQAAASNQLGSWPDGMLSMEQVSHGTQNRPLLRNSLDDLVGPPSNLEGQSDERALLDQLHTLLSNTDATGLEEIDRALGIPELVNQGQALEPKQDAFQGQEAAVMMDQKAGLYGQTYPAQGPPMQGGFHLQGQSPSFNSMMNQMNQQGNFPLQGMHPRANIMRPRTNTPKQLRMQLQQRLQGQQFLNQSRQALELKMENPTAGGAAVMRPMMQPQQGFLNAQMVAQRSRELLSHHFRQQRVAMMMQQQQQQQQQQQQQQQQQQQQQQQQQQQQQTQAFSPPPNVTASPSMDGLLAGPTMPQAPPQQFPYQPNYGMGQQPDPAFGRVSSPPNAMMSSRMGPSQNPMMQHPQAASIYQSSEMKGWPSGNLARNSSFSQQQFAHQGNPAVYSMVHMNGSSGHMGQMNMNPMPMSGMPMGPDQKYC

SEQ ID NO: 45269 - protein, 800 aa, Homo sapiens
MEQGGAHFINAFVTTPMCCPSRSSILTGKYVHNHNTYTNNENCSSPSWQAQHESRTFAVYLNSTGYRTAFFGKYLNEYNGSYVPPGWKEWVGLLKNSRFYNYTLCRNGVKEKHGSDYSKDYLTDLITNDSVSFFRTSKKMYPHRPVLMVISHAAPHGPEDSAPQYSRLFPNASQHITPSYNYAPNPDKHWIMRYTGPMKPIHMEFTNMLQRKRLQTLMSVDDSMETIYNMLVETGELDNTYIVYTADHGYHIGQFGLVKGKSMPYEFDIRVPFYVRGPNVEAGCLNPHIVLNIDLAPTILDIAGLDIPADMDGKSILKLLDTERPVNRFHLKKKMRVWRDSFLVERGKLLHKRDNDKVDAQEENFLPKYQRVKDLCQRAEYQTACEQLGQKWQCVEDATGKLKLHKCKGPMRLGGSRALSNLVPKYYGQGSEACTCDSGDYKLSLAGRRKKLFKKKYKASYVRSRSIRSVAIEVDGRVYHVGLGDAAQPRNLTKRHWPGAPEDQDDKDGGDFSGTGGLPDYSAANPIKVTHRCYILENDTVQCDLDLYKSLQAWKDHKLHIDHEIETLQNKIKNLREVRGHLKKKRPEECDCHKISYHTQHKGRLKHRGSSLHPFRKGLQEKDKVWLLREQKRKKKLRKLLKRLQNNDTCSMPGLTCFTHDNQHWQTAPFWTLGPFCACTSANNNTYWCMRTINETHNFLFCEFATGFLEYFDLNTDPYQLMNAVNTLDRDVLNQLHVQLMELRSCKGYKQCNPRTRNMDLGLKDGGSYEQYRQFQRRKWPEMKRPSSKSLGQLWEGWEG

SEQ ID NO: 45270 - protein, 1777 aa, Homo sapiens [sequence omitted]

SEQ ID NO: 45271 - protein, 838 aa, Homo sapiens [sequence omitted]

SEQ ID NO: 45272 - protein, 782 aa, Homo sapiens
MVNRFQSGDFHVINGVLRTAHSLFKRYRHEFKSNELWTEIKLVLDAFALPLTNLFKATIELCSTHANDASALRILFSSLILISKLFYSLNFQDLPEFFEDNMETWMNNFHTLLTLDNKLLQTDLVSNAIQFLASVCERPHYKNLFEDQNTLTSICEKVIVPNMEFRAADEEAFEDNSEEYIRRDLEGSDIDTRRRAACDLVRGLCKFFEGPVTGIFSGYVNSMLQEYAKNPSVNWKHKDAAIYLVTSLASKAQTQKHGITQANELVNLTEFFVNHILPDLKSANVNEFPVLKADGIKYIMIFRNQVPKEHLLVSIPLLINHLQAESIVVHTYAAHALERLFTMRGPNNATLFTAAEIAPFVEILLTNLFKALTLPGSSENEYIMKAIMRSFSLLQEAIIPYIPTLITQLTQKLLAVSKNPSKPHFNHYMFEAICLSIRITCKANPAAVVNFEEALFLVFTEILQNDVQEFIPYVFQVMSLLLETHKNDIPSSYMALFPHLLQPVLWERTGNIPALVRLLQAFLERGSNTIASAAADKIPGLLGVFQKLIASKANDHQGFYLLNSIIEHMPPESVDQYRKQIFILLFQRLQNSKTTKFIKSFLVFINLYCIKYGALALQEIFDGIQPKMFGMVLEKIIIPEIQKVSGNVEKKICAVGITKLLTECPPMMDTEYTKLWTPLLQSLIGLFELPEDDTIPDEEHFIDIEDTPGYQTAFSQLAFAGKKEHDPVGQMVNNPKIHLAQSLHKLSTACPGRVPSMVSTSLNAEALQYLQGYLQAASVTLL

SEQ ID NO: 45273 - protein, 487 aa, Homo sapiens
MYKPVDPYSRMQSTYNYNMRGGAYPPRYFYPFPVPPLLYQVELSVGGQQFNGKGKTRQAAKHDAAAKALRILQNEPLPERLEVNGRESEEENLNKSEISQVFEIALKRNLPVNFEVARESGPPHMKNFVTKVSVGEFVGEGEGKSKKISKKNAAIAVLEELKKLPPLPAVERVKPRIKKKTKPIVKTSPEYGQGINPISRLAQIQQAKKEKEPEYTLLTERGLPRRREFVMQVKVGNHTAEGTGTNKKVAKRNAAENMLEILGFKVPQAQPTKPALKSEEKTPIKKPGDGRKVTFFEPGSGDENGTSNKEDEFRMPYLSHQQLPAGILPMVPEVAQAVGVSQGHHTKDFTRAAPNPAKATVTAMIARELLYGGTSPTAETILKNNISSGHVPHGPLTRPSEQLDYLSRVQGFQVEYKDFPKNNKNEFVSLINCSSQPPLISHGIGKDVESCHDMAALNILKLLSELDQQSTEMPRTGNGPMSVCGRC

SEQ ID NO: 45274 - protein, 489 aa, Homo sapiens [sequence omitted]

SEQ ID NO: 45275 - protein, 574 aa, Homo sapiens
MNLSRPLLKAITAMGFKQPTPIQKACIPVGLLGKDICACAATGTGKTAAFALPVLERLIYKPRQAPVTRVLVLVPTRELGIQVHSVTRQLAQFCNITTCLAVGGLDVKSQEAALRAAPDILIATPGRLIDHLHNCPSFHLSSIEVLILDEADRMLDEYFEEQMKEIIRMCSHHRQTMLFSATMTDEVKDLASVSLKNPVRIFVNSNTDVAPFLRQEFIRIRPNREGDREAIVAALLTRTFTDHVMLFTQTKKQAHRMHILLGLMGLQVGELHGNLSQTQRLEALRRFKDEQIDILVATDVAARGLDIEGVKTVINFTMPNTIKHYVHRVGRTARAGRAGRSVSLVGEDERKMLKEIVKAAKAPVKARILPQDVILKFRDKIEKMEKDVYAVLQLEAEEKEMQQSEAQINTAKRLLEKGKEAVVQEPERSWFQTKEERKKEKIAKALQEFDLALRGKKKRKKFMKDAKKKGEMTAEERSQFEILKAQMFAERLAKRNRRAKRARAMPEEEPVRGPAKKQKQGKKSVFDEELTNTSKKALKQYRAGPSFEERKQLGLPHQRRGGNFKSKSRYKRRK

SEQ ID NO: 45276 - protein, 577 aa, Homo sapiens [sequence omitted]

SEQ ID NO: 45277 - protein, 430 aa, Homo sapiens
MLETVGINLFLYPWKKEFRSIKTYTGPFVYYVKSTLLEEDIRAILSCMGYTPELGTAYKLRELVETLQVKMVSFELFLAKVECEQMLEIHSQVKDKGYSELDIVSERKSSAEDVRGCSDALRRRAEGREHLTASMSRVALQKSASERAAKDYYKPRVTKPSRSVDAYDSYWESRKPPLKASLSLRKEPVATDVGDDLKDEIIRPSPSLLTMASSPHGSPDVLPPASPSNGPALLRGTYFSTQDDVDLYTDSEPRATYRRQDALRPDVWLLRNDAHSLYHKRSPPAKESALSKCQSCGLSCSSSLCQRCDSLLTCPPASKPSAFPSKASTHDSLAHGASLREKYPGQTQGLDRLPHLHSKSKPSTTPTSRCGFCNRPGATNTCTQCSKVSCDACLSAYHYDPCYKKSELHKFMPNNQLNYKSTQLSHLVYR

SEQ ID NO: 45278 - protein, 898 aa, Homo sapiens [sequence omitted]

SEQ ID NO: 45279 - protein, 356 aa, Homo sapiens [sequence omitted]

SEQ ID NO: 45280 - protein, 951 aa, Homo sapiens
MRLGALYTYWVPLGFVLAVTVIREAVEEIRCYVRDKEVNSQVYSRLTARGTVKVKSSNIQVGDLIIVEKNQRVPADMIFLRTSEKNGSCFLRTDQLDGETDWKLRLPVACTQRLPTAADLLQIRSYVYAEEPNIDIHNFVGTFTREDSDPPISESLSIENTLWAGTVVASGTVVGVVLYTGRELRSVMNTSNPRSKIGLFDLEVNCLTKILFGALVVVSLVMVALQHFAGRWYLQIIRFLLLFSNIIPISLRVNLDMGKIVYSWVIRRDSKIPGTVVRSSTIPEQLGRISYLLTDKTGTLTQNEMIFKRLHLGTVAYGLDSMDEVQSHIFSIYTQQSQDPPAQKGPTLTTKVRRTMSSRVHEAVKAIALCHNVTPVYESNGVTDQAEAEKQYEDSCRVYQASSPDEVALVQWTESVGLTLVGRDQSSMQLRTPGDQILNFTILQIFPFTYESKRMGIIVRDESTGEITFYMKGADVVMAGIVQYNDWLEEECGNMAREGLRVLVVAKKSLAEEQYQDFEARYVQAKLSVHDRSLKVATVIESLEMEMELLCLTGVEDQLQADVRPTLETLRNAGIKVWMLTGDKLETATCTAKNAHLVTRNQDIHVFRLVTNRGEAHLELNAFRRKHDCALVISGDSLEVCLKYYEYEFMELACQCPAVVCCRCAPTQKAQIVRLLQERTGKLTCAVGDGGNDVSMIQESDCGVGVEGKEGKQASLAADFSITQFKHLGRLLMVHGRNSYKRSAALSQFVIHRSLCISTMQAVFSSVFYFASVPLYQGFLIIGYSTIYTMFPVFSLVLDKDVKSEVAMLYPELYKDLLKGRPLSYKTFLIWVLISIYQGSTIMYGALLLFESEFVHIVAISFTSLILTELLMVALTIQTWHWLMTVAELLSLACYIASLVFLHEFIDVYFIATLSFLWKVSVITLVSCLPLYVLKYLRRRFSPPSYSKLTS

SEQ ID NO: 45281 - protein, 910 aa, Homo sapiens
MTAVYANILSDSYWSGLGLGFKLSNSERRNCDTRNGSNKSDFDWHQDALSKSLQQNLPSRSVSKPSLFSSVQLYRQSSKMCGTVFTGASRFRCRQCSAAYDTLVELTVHMNETGHYQDDNRKKDKLRPTSYSKPRKRAFQDMDKEDAQKVLKCMFCGDSFDSLQDLSVHMIKTKHYQKVPLKEPVPTISSKMVTPAKKRVFDVNRPCSPDSTTGSFADSFSSQKNANLQLSSNNRYGYQNGASYTWQFEACKSQILKCMECGSSHDTLQQLTTHMMVTGHFLKVTSSASKKGKQLVLDPLAVEKMQSLSEAPNSDSLAPKPSSNSASDCTASTTELKKESKKERPEETSKDEKVVKSEDYEDPLQKPLDPTIKYQYLREEDLEDGSKGGGDILKSLENTVTTAINKAQNGAPSWSAYPSIHAAYQLSEGTKPPLPMGSQVLQIRPNLTNKLRPIAPKWKVMPLVSMPTHLAPYTQVKKESEDKDEAVKECGKESPHEEASSFSHSEGDSFRKSETPPEAKKTELGPLKEEEKLMKEGSEKEKPQPLEPTSALSNGCALANHAPALPCINPLSALQSVLNNHLGKATEPLRSPSCSSPSSSTISMFHKSNLNVMDKPVLSPASTRSASVSRRYLFENSDQPIDLTKSKSKKAESSQAQSCMSPPQKHALSDIADMVKVLPKATTPKPASSSRVPPMKLEMDVRRFEDVSSEVSTLHKRKGRQSNWNPQHLLILQAQFASSLFQTSEGKYLLSDLGPQERMQISKFTGLSMTTISHWLANVKYQLRKTGGTKFLKNMDKGHPIFYCSDCASQFRTPSTYISHLESHLGFQMKDMTRLSVDQQSKVEQEISRVSSAQRSPETIAAEEDTDSKFKCKLCCRTFVSKHAVKLHLSKTHSKSPEHHSQFVTDVDEE

SEQ ID NO: 45282 - protein, 57 aa, Homo sapiens
MSERAASLSTMVPLPRSAYWQHITRQHSTGQLYRLQDVSSPLKLHRTETFPAYRSEH

SEQ ID NO: 45283 - protein, 671 aa, Homo sapiens [sequence omitted]

SEQ ID NO: 45284 - protein, 234 aa, Homo sapiens
MVVVITCLLSHYKLSARSFISRHSQGRRREDALSSEGCLWPSESTVSGNGIPEPQVYAPPRPTDRLAVPPFAQRERFHRFQPTYPYLQHEIDLPPTISLSDGEEPPPYQGPCTLQLRDPEQQLELNRESVRAPPNRTIFDSDLMDSARLGGPCPPSSNSGISATCYGSGGRMEGPPPTYSEVIGHYPGSSFQHQQSSGPPSLLEGTRLHHTHIAPLESAAIWSKEKDKQKGHPL

SEQ ID NO: 45285 - protein, 497 aa, Homo sapiens [sequence omitted]

SEQ ID NO: 45286 - protein, 442 aa, Homo sapiens
MIAHTTWRDLFYKLAEAHPDCLMLNFTVKLISDAGYQGEITSVSTACQQLEVFSRVLRTSLATILDGGEENLEKNLPEFAKMVCHGEHTYLFAQAMMSVLAQEEQGGSAVRRIAQEVQRFAQEKGHDASQITLALGTAASYPRACQALGAMLSKGALNPADITVLFKMFTSMDPPPVELIRVPAFLDLFMQSLFKPGARINQDHKHKYIHILAYAASVVETWKKNKRVSINKDELKSTSKAVETVHNLCCNENKGASELVAELSTLYQCIRFPVVAMGVLKWVDWTVSEPRYFQLQTDHTPVHLALLDEISTCHQLLHPQVLQLLVKLFETEHSQLDVMEQLELKKTLLDRMVHLLSRGYVLPVVSYIRKCLEKLDTDISLIRYFVTEVLDVIAPPYTSDFVQLFLPILENDSIAGTIKTEGEHDPVTEFIAHCKSNFIMVN

SEQ ID NO: 45287 - protein, 203 aa, Homo sapiens [sequence omitted]

SEQ ID NO: 45288 - protein, 3520 aa, Homo sapiens
MDFGRTYQPWQFFASSKRDCLERFGPQTLERITRDDAAICTTEYSRIVPLENGEIVVSLVNGRPGAMNFSYSPLLREFTKATNVRLRFLRTNTLLGHLMGKALRDPTVTRRYYYSIKDISIGGRCVCHGHADACDAKDPTDPFRLQCTCQHNTCGGTCDRCCPGFNQQPWKPATANSANECQSCNCYGHATDCYYDPEVDRRRASQSLDGTYQGGGVCIDCQHHTTGVNCERCLPGFYRSPNHPLDSPHVCRRCNCESDFTDGTCEDLTGRCYCRPNFSGERCDVCAEGFTGFPSCYPTPSSSNDTREQVLPAGQIVNCDCSAAGTQGNACRKDPRVGRCLCKPNFQGTHCELCAPGFYGPGCQPCQCSSPGVADDRCDPDTGQCRCRVGFEGATCDRCAPGYFHFPLCQLCGCSPAGTLPEGCDEAGRCLCQPEFAGPHCDRCRPGYHGFPNCQACTCDPRGALDQLCGAGGLCRCRPGYTGTACQECSPGFHGFPSCVPCHCSAEGSLHAACDPRSGQCSCRPRVTGLRCDTCVPGAYNFPYCEAGSCHPAGLAPVDPALPEAQVPCMCRAHVEGPSCDRCKPGFWGLSPSNPEGCTRCSCDLRGTLGGVAECQPGTGQCFCKPHVCGQACASCKDGFFGLDQADYFGCRSCRCDIGGALGQSCEPRTGVCRCRPNTQGPTCSEPARDHYLPDLHHLRLELEEAATPEGHAVRFGFNPLEFENFSWRGYAQMAPVQPRIVARLNLTSPDLFWLVFRYVNRGAMSVSGRVSVREEGRSATCANCTAQSQPVAFPPSTEPAFITVPQRGFGEPFVLNPGTWALRVEAEGVLLDYVVLLPSAYYEAALLQLRVTEACTYRPSAQQSGDNCLLYTHLPLDGFPSAAGLEALCRQDNSLPRPCPTEQLSPSHPPLITCTGSDVDVQLQVAVPQPGRYALVVEYANEDARQEVGVAVHTPQRAPQQGLLSLHPCLYSTLCRGTARDTQDHLAVFHLDSEASVRLTAEQARFFLHGVTLVPIEEFSPEFVEPRVSCISSHGAFGPNSAACLPSRFPKPPQPIILRDCQVIPLPPGLPLTHAQDLTPAMSPAGPRPRPPTAVDPDAEPTLLREPQATVVFTTHVPTLGRYAFLLHGYQPAHPTFPVEVLINAGRVWQGHANASFCPHGYGCRTLVVCEGQALLDVTHSELTVTVRVPKGRWLWLDYVLVVPENVYSFGYLREEPLDKSYDFISHCAAQGYHISPSSSSLFCRNAAASLSLFYNNGARPCGCHEVGATGPTCEPFGGQCPCHAHVIGRDCSRCATGYWGFPNCRPCDCGARLCDELTGQCICPPRTIPPDCLLCQPQTFGCHPLVGCEECNCSGPGIQELTDPTCDTDSGQCKCRPNVTGRRCDTCSPGFHGYPRCRPCDCHEAGTAPGVCDPLTGQCYCKENVQGPKCDQCSLGTFSLDAANPKGCTRCFCFGATERCRSSSYTRQEFVDMEGWVLLSTDRQVVPHERQPGTEMLRADLRHVPEAVPEAFPELYWQAPPSYLGDRVSSYGGTLRYELHSETQRGDVFVPMESRPDVVLQGNQMSITFLEPAYPTPGHVHRGQLQLVEGNFRHTETRNTVSREELMMVLASLEQLQIRALFSQISSAVFLRRVALEVASPAGQGALASNVELCLCPASYRGDSCQECAPGFYRDVKGLFLGRCVPCQCHGHSDRCLPGSGVCVDCQHNTEGAHCERCQAGFVSSRDDPSAPCVSCPCPLSVPSNNFAEGCVLRGGRTQCLCKPGYAGASCERCAPGFFGNPLVLGSSCQPCDCSGNGDPNLLFSDCDPLTGACRGCLRHTTGPRCEICAPGFYGNALLPGNCTRCDCTPCGTEACDPHSGHCLCKAGVTGRRCDRCQEGHFGFDGCGGCRPCACGPAAEGSECHPQSGQCHCRPGTMGPQCRECAPGYWGLPEQGCRRCQCPGGRCDPHTGRCNCPPGLSGERCDTCSQQHQVPVPGGPVGHSIHCEVCDHCVVLLLDDLERAGALLPAIHEQLRGINASSMAWARLHRLNASIADLQSQLRSPLGPRHETAQQLEVLEQQSTSLGQDARRLGGQAVGTRDQASQLLAGTEATLGHAKTLLAAIRAVDRTLSELMSQTGHLGLANASAPSGEQLLRTLAEVERLLWEMRARDLGAPQAAAEAELAAAQRLLARVQEQLSSLWEENQALATQTRDRLAQHEAGLMDLREALNRAVDATREAQELNSRNQERLEEALQRKQELSRDNATLQATLHAARDTLASVFRLLHSLDQAKEELERLAASLDGARTPLLQRMQTFSPAGSKLRLVEAAEAHAQQLGQLALNLSSIILDVNQDRLTQRAIEASNAYSRILQAVQAAEDAAGQALQQADHTWATVVRQGLVDRAQQLLANSTALEEAMLQEQQRLGLVWAALQGARTQLRDVRAKKDQLEAHIQAAQAMLAMDTDETSKKIAHAKAVAAEAQDTATRVQSQLQAMQENVERWQGQYEGLRGQDLGQAVLDAGHSVSTLEKTLPQLLAKLSILENRGVHNASLALSASIGRVRELIAQARGAASKVKVPMKFNGRSGVQLRTPRDLADLAAYTALKFYLQGPEPEPGQGTEDRFVMYMGSRQATGDYMGVSLRDKKVHWVYQLGEAGPAVLSIDEDIGEQFAAVSLDRTLQFGHMSVTVERQMIQETKGDTVAPGAEGLLNLRPDDFVFYVGGYPSTFTPPPLLRFPGYRGCIEMDTLNEEVVSLYNFERTFQLDTAVDRPCARSKSTGDPWLTDGSYLDGTGFARISFDSQISTTKRFEQELRLVSYSGVLFFLKQQSQFLCLAVQEGSLVLLYDFGAGLKKAVPLQPPPPLTSASKAIQVFLLGGSRKRVLVRVERATVYSVEQDNDLELADAYYLGGVPPDQLPPSLRRLFPTGGSVRGCVKGIKALGKYVDLKRLNTTGVSAGCTADLLVGRAMTFHGHGFLRLALSNVAPLTGNVYSGFGFHSAQDSALLYYRASPDGLCQVSLQQGRVSLQLLRTEVKTQAGFADGAPHYVAFYSNATGVWLYVDDQLQQMKPHRGPPPELQPQPEGPPRLLLGGLPESGTIYNFSGCISNVFVQRLLGPQRVFDLQQNLGSVNVSTGCAPALQAQTPGLGPRGLQATARKASRRSRQPARHPACMLPPHLRTTRDSYQFGGSLSSHLEFVGILARHRNWPSLSMHVLPRSSRGLLLFTARLRPGSPSLALFLSNGHFVAQMEGLGTRLRAQSRQRSRPGRWHKVSVRWEKNRILLVTDGARAWSQEGPHRQHQGAEHPQPHTLFVGGLPASSHSSKLPVTVGFSGCVKRLRLHGRPLGAPTRMAGVTPCILGPLEAGLFFPGSGGVITLDLPGATLPDVGLELEVRPLAVTGLIFHLGQARTPPYLQLQVTEKQVLLRADDGAGEFSTSVTRPSVLCDGQWHRLAVMKSGNVLRLEVDAQSNHTVGPLLAAAAGAPAPLYLGGLPEPMAVQPWPPAYCGCMRRLAVNRSPVAMTRSVEVHGAVGASGCPAA

SEQ ID NO: 45289 - protein, 50 aa, Homo sapiens [sequence omitted]

SEQ ID NO: 45290 - protein, 273 aa, Homo sapiens
MNVPLQQQNKCTALVKNKTAATTTALQFTYPLFTTNACSTSGNSNLSQTQSSSNSCSVLEAAKHQDIGLPRAFSFCYQQEIESTKQTLGSRNKVLPEQVWIKVGEAALCKQALKRNRSRMRQLDTNVERRALGEIQNVGEGATATQGAWQSSESSQANLGEQAQSGPQGGRSQRRERHNRMERDRRRRIRICCDELNLLVPFCNAETDKATTLQWTTAFLKYIQERHGDSLKKEFESVFCGKTGRRLKLTRPDSLVTCPAQGSLQSSPSMEIK

SEQ ID NO: 45291 - protein, 2152 aa, Homo sapiens
MPVSLEDSGEPTSCPATDAETASEGSVESASETRSGPQSASTAVKERPASSEKVKGGDDHDDTSDSDSDGLTLKELQNRLRRKREQEPTERPLKGIQSRLRKKRREEGPAETVGSEASDTVEGVLPSKQEPENDQGVVSQAGKDDRESKLEGKAAQDIKDEEPGDLGRPKPECEGYDPNALYCICRQPHNNRFMICCDRCEEWFHGDCVGISEARGRLLERNGEDYICPNCTILQVQDETHSETADQQEAKWRPGDADGTDCTSIGTIEQKSSEDQGIKGRIEKAANPSGKKKLKIFQPVIEAPGASKCIGPGCCHVAQPDSVYCSNDCILKHAAATMKFLSSGKEQKPKPKEKMKMKPEKPSLPKCGAQAGIKISSVHKRPAPEKKETTVKKAVVVPARSEALGKEAACESSTPSWASDHNYNAVKPEKTAAPSPSLLYKSTKEDRRSEEKAAAMAASKKTAPPGSAVGKQPAPRNLVPKKSSFANVAAATPAIKKPPSGFKGTIPKRPWLSATPSSGASAARQAGPAPAAATAASKKFPGSAALVGAVRKPVVPSVPMASPAPGRLGAMSAAPSQPNSQIRQNIRRSLKEILWKRVNDSDDLIMTENEVGKIALHIEKEMFNLFQVTDNRYKSKYRSIMFNLKDPKNQGLFHRVLREEISLAKLVRLKPEELVSKELSTWKERPARSVMESRTKLHNESKKTAPRQEAIPDLEDSPPVSDSEEQQESARAVPEKSTAPLLDVFSSMLKDTTSQHRAHLFDLNCKICTGQVPSAEDEPAPKKQKLSASVKKEDLKSKHDSSAPDPAPDSADEVMPEAVPEVASEPGLESASHPNVDRTYFPGPPGDGHPEPSPLEDLSPCPASCGSGVVTTVTVSGRDPRTAPSSSCTAVASAASRPDSTHMVEARQDVPKPVLTSVMVPKSILAKPSSSPDPRYLSVPPSPNISTSESRSPPEGDTTLFLSRLSTIWKGFINMQSVAKFVTKAYPVSGCFDYLSEDLPDTIHIGGRIAPKTVWDYVGKLKSSVSKELCLIRFHPATEEEEVAYISLYSYFSSRGRFGVVANNNRHVKDLYLIPLSAQDPVPSKLLPFEGPGLESPRPNIILGLVICQKIKRPANSGELDKMDEKRTRLQPEEADVPAYPKVATVPQSEKKPSKYPLCSADAAVSTTPPGSPPPPPPLPEPPVLKVLSSLKPAAPSPATAATTAAAASTAASSTASSASKTASPLEHILQTLFGKKKSFDPSAREPPGSTAGLPQEPKTTAEDGVPAPPLLDPIVQQFGQFSKDKALEEEEDDRPYDPEEEYDPERAFDTQLVERGRRHEVERAPEAAAAEREEVAYDPEDETILEEAKVTVDDLPNRMCADVRRNSVERPAEPVAGAATPSLVEQQKMLEELNKQIEEQKRQLEEQEEALRQQRAAVGVSMAHFSVSDALMSPPPKSSLPKAELFQQEQQSADKPASLPPASQASNHRDPRQARRLATETGEGEGEPLSRLSARGAQGALPERDASRGGLVGQAPMPVPEEKEPASSPWASGEKPPAGSEQDGWKAEPGEGTRPATVGDSSARPARRVLLPTPPCGALQPGFPLQHDGERDPFTCPGFASQDKALGSAQYEDPRNLHSAGRSSSPAGETEGDREPQARPGEGTAPLPPPGQKVGGSQPPFQGQREPGPHALGMSGLHGPNFPGPRGPAPPFPEENIASNDGPRGPPPARFGAQKGPIPSLFSGQHGPPPYGDSRGPSPSYLGGPRGVAPSQFEERKDPHGEKREFQDAPYNEVTGAPAQFEGTEQAPFLGSRGGAPFQFGGQRRPLLSQLKGPRGGPPPSQFGGQRGPPPGHFVGPRGPHPSQFETARGPHPNQFEGPRGQAPNFMPGPRGIQPQQFEDQRVHSPPRFTNQRAPAPLQFGGLRGSAPFSEKNEQTPSRFHFQGQAPQVMKPGPRPLLELPSHPPQHRKDRWEEAGPPSALSSSAPGQGPEADGQWASADFREGKGHEYRNQTFEGRQRERFDVGPKEKPLEEPDAQGRASEDRRRERERGRNWSRERDWDRPREWDRHRDKDSSRDWDRNRERSANRDREREADRGKEWDRSRERSRNRERERDRRRDRDRSRSRERDRDKARDRERGRDRKDRSKSKESARDPKPEASRASDAGTASQA

SEQ ID NO: 45292 - protein, 474 aa, Homo sapiens [sequence omitted]

SEQ ID NO: 45293 - protein, 213 aa, Homo sapiens [sequence omitted]

SEQ ID NO: 45294 - protein, 28 aa, Homo sapiens
MVRLAEHLLFLRRPHLALGVVRVQVPAE

SEQ ID NO: 45295 - protein, 373 aa, Homo sapiens
MVGLKIGDVSSSAVKTVGSVVSSVALTGVLSGNGGTNVNMPVSKPTSWAAIASKPAKPQPKMKTKSGPVMGGGLPPPPIKHNMDIGTWDNKGPVPKAPVPQQAPSPQAAPQPQQVAQPLPAQPPALAQPQYQSPQQPPQTRWVAPRNRNAAFGQSGGAGSDSNSPGNVQPNSAPSVESHPVLEKLKAAHSYNPKEFEWNLKSGRVFIIKSYSEDDIHRSIKYSIWCSTEHGNKRLDSAFRCMSSKGPVYLLFSVNGSGHFCGVAEMKSPVDYGTSAGVWSQDKWKGKFDVQWIFVKDVPNNQLRHIRLENNDNKPVTNSRDTQEVPLEKAKQVLKIISSYKHTTSIFDDFAHYEKRQEEEEVVRKERQSRNKQ

SEQ ID NO: 45296 - protein, 2583 aa, Homo sapiens
MVAFDQALPWEHRSPPPGLSKFELCPKPDLCEYGDACTKAHSAQELQEWVRRTQAVELRGQAAWQDGLVPYQERLLAEYQRSSSEVLVLAETLDGVRVTCNQPLMYQAQERKTQYSWTFAVHSEEPLLHVALLKQEPGADFSLVAPGLPPGRLYARGERFRVPSSTADFQVGVRVQAASFGTFEQWVVFDFGRRPVLLQKLGLQLGQGRRPGPCRNLALGHPEEMERWHTGNRHVVPGVERTAEQTALMAKYKGPALALEFNRSSVASGPISPTNYRQRMHQFLYEEEAAQQQLVAKLTLRGQVFLKTALQTPALNMLFAPPGALYAEVPVPSSLMPDTDQGFLLGRAVSTALVAPVPAPDNTVFEVRLERRASSEQALWLLLPARCCLALGLQPEARLVLEVQFQIDPMTFRLWHQAVDTLPEEQLVVPDLPTCALPRPWSVPPLRRGNRKQELAVALIAGWGPGDGRRVPPLLIYGPFGTGKTYTLAMASLEVIRRPETKVLICTHTNSAADIYIREYFHSHVSGGHPEATPLRVMYTDRPLSQTDPVTLQYCCLTDDRQAFRPPTRAELARHRVVVTTTSQARELRVPVGFFSHILIDEAAQMLECEALTPLAYASHGTRLVLAGDHMQVTPRLFSVARARAAEHTLLHRLFLCYQQETHEVARQSRLVFHENYRCTDAIVSFISRHFYVAKGNPIHARGKVPPHPRHYPLMFCHVAGSPDRDMSMASWLNLAEIAQVVEKVQEAYNTWPSCWGGREQRCICVVSHGAQVSALRQELRRRDLGQVSVGSFEILPGRQFRVVVLSTVHTCQSLLSPGALAPEFFTDARVLNTVLTRAQSQLVVVGDAVALCSFGACGKLWESFIRECVERHSVCPEGLSMEQVEQGVAQRRRWPPRGTQAGAAGNWEAAPEPVGDLAEEQAAVVTAMVKAEPGDEALSPASRDITATTAQTEAAAAPAGDAVKEDVVPGACAAGAAAAAGVESTEAEDAEADFWPWDGELNADDAILRELLDESQKVMVTVGEDGLLDTVARPESLQQARLYENLPPAALRKLLHAEPERYRHCSFVPETFERASAIPLDDASSGPIQVRGRLDCGMAFAGDEVLVQLLSGDKAPEGRLRGRVLGVLKRKRHELAFVCRMDTWDPRIMVPINGSVTKIFVAELKDPSQVPIYSLRKGRLQRVGLERLTAEARHSRLFWVQIVLWRQGFYYPLGIVREVLPEASTWEQGLRILGLEYSLRVPPSDQATITKVLQKYHTELGRVAGRREDCRAFLTFTVDPQGACNLDDALSVRDLGPRCEVAVHITDVASFVPRDGVLDVEARRQGAAFYAPGREPVPMLPASLCQDVLSLLPGRDRLAISLFLTMEKASGQLKSLRFAPSVVQSDRQLSYEEAEEVIRQHPGAGRELPARLDSVDACVVAACYFSRLLRRHRLRSDCFYEQPDEDGTLGFRAAHIMVKEYMIQFNRLVAEFLVGSECTRTVTPLRWQPAPRSQQLKALCEKHGDRVPLSLHLGHHLHGGGGSPPDTRLHLLASLWKQVQFAARTQDYEQMVDLVTTDDMHPFLAPAGRDLRKALERSAFGRCARGHQQQGGHYSLQVDWYTWATSPIRRYLDVVLQRQILLALGHGGSAYSARDIDGLCQAFSLQHALAQSYQRRARSLHLAVQLKAQPLDKLGFVVDVEAGSRCFRLLFPSNRETLPDPCPVPYGSLQLAEHPHALAGRPGLRLLWRRRVYSAQGSSPPLPLPGTVPDPHTLAVETALWKQLLELVELQRWPEAAALIQEKGEASQRRELVQVQRSHCGHFLEVARELGSGDTLQVQLGTSLQHGFLVPSPQLWTVAPGFSLCLEHVERPGDCFSGRVYRAPRDRYRDVDEYACVWEPFCALESATGAVAENDSVTLQHLSVSWEASRTPQGQLQGAFRLEAAFLEENCADINFSCCYLCIRLEGLPAPTASPRPGPSSLGPGLNVDPGTYTWVAHGQTQDWDQERRADRQEAPRRVHLFVHHMGMEKVPEEVLRPGTLFTVELLPKQLPDLRKEEAVRGLEEASPLVTSIALGRPVPQPLCRVIPSRFLERQTYNIPGGRHKLNPSQNVAVREALEKPFTVIQGPPGTGKTIVGLHIVFWFHKSNQEQVQPGGPPRGEKRLGGPCILYCGPSNKSVDVLAGLLLRRMELKPLRVYSEQAEASEFPVPRVGSRKLLRKSPREGRPNQSLRSITLHHRIRQAPNPYSSEIKAFDTRLQRGELFSREDLVWYKKVLWEARKFELDRHEVILCTCSCAASASLKILDVRQILVDEAGMATEPETLIPLVQFPQAEKVVLLGDHKQLRPVVKNERLQNLGLDRSLFERYHEDAHMLDTQYRMHEGICAFPSVAFYKSKLKTWQGLRRPPSVLGHAGKESCPVIFGHVQGHERSLLVSTDEGNENSKANLEEVAEVVRITKQLTLGRTVEPQDIAVLTPYNAQASEISKALRREGIAGVAVSSITKSQGSEWRYVLVSTVRTCAKSDLDQRPTKSWLKKFLGFVVDPNQVNVAVTRAQEGLCLIGDHLLLRCCPLWRSLLDFCEAQQTLVPAGQVRVCRRPTMPS

SEQ ID NO: 45297 - protein, 521 aa, Homo sapiens [sequence omitted]

SEQ ID NO: 45298 - protein, 1195 aa, Homo sapiens
MTKVLECLQQKVNGILESPTGTGKTLCLLCTTLAWREHLRDGISARKIAERAQGELFPDRALSSWGNAAAAAGDPIACYTDIPKIIYASRTHSQLTQVINELRNTSYRPKVCVLGSREQLCIHPEVKKQESNHLQIHLCRKKVASRSCHFYNNVEEKSLEQELASPILDIEDLVKSGSKHRVCPYYLSRNLKQQADIIFMPYNYLLDAKSRRAHNIDLKGTVVIFDEAHNVEKMCEESASFDLTPHDLASGLDVIDQVLEEQTKAAQQGEPHPEFSADSPSPGLNMELEDIAKLKMILLRLEGAIDAVELPGDDSGVTKPGSYIFELFAEAQITFQTKGCILDSLDQIIQHLAGRAGVFTNTAGLQKLADIIQIVFSVDPSEGSPGSPAGLGALQSYKVHIHPDAGHRRTAQRSDAWSTTAARKRGKVLSYWCFSPGHSMHELVRQGVRSLILTSGTLAPVSSFALEMQIPFPVCLENPHIIDKHQIWVGVVPRGPDGAQLSSAFDRRFSEECLSSLGKALGNIARVVPYGLLIFFPSYPVMEKSLEFWRARDLARKMEALKPLFVEPRSKGSFSETISAYYARVAAPGSTGATFLAVCRGKASEGLDFSDTNGRGVIVTGLPYPPRMDPRVVLKMQFLDEMKGQGGAGGQFLSGQEWYRQQASRAVNQAIGRVIRHRQDYGAVFLCDHRFAFADARAQLPSWVRPHVRVYDNFGHVIRDVAQFFRVAERTMPAPAPRATAPSVRGEDAVSEAKSPGPFFSTRKAKSLDLHVPSLKQRSSGSPAAGDPESSLCVEYEQEPVPARQRPRGLLAALEHSEQRAGSPGEEQAHSCSTLSLLSEKRPAEEPRGGRKKIRLVSHPEEPVAGAQTDRAKLFMVAVKQELSQANFATFTQALQDYKGSDDFAALAACLGPLFAEDPKKHNLLQGFYQFVRPHHKQQFEEVCIQLTGRGCGYRPEHSIPRRQRAQPVLDPTGRTAPDPKLTVSTAAAQQLDPQEHLNQGRPHLSPRPPPTGDPGSQPQWGSGVPRAGKQGQHAVSAYLADARRALGSAGCSQLLAALTAYKQDDDLDKVLAVLAALTTAKPEDFPLLHRFSMFVRPHHKQRFSQTCTDLTGRPYPGMEPPGPQEERLAVPPVLTHRAPQPGPSRSEKTGKTQSKISSFLRQRPAGTVGAGGEDAGPSQSSGPPHGPAASEWGL

SEQ ID NO: 45299 - protein, 101 aa, Homo sapiens [sequence omitted]

SEQ ID NO: 45300 - protein, 289 aa, Homo sapiens
MEALDLQPGLSFLNLGSGTGYLSSMVGLILGPFGVNHGVELHSDVIEYAKQKLDFFIRTSDSFDKFDFCEPSFVTGNCLEISPDCSQYDRVYCGAGVQKEHEEYMKNLLKVGGILVMPLEEKLTKITRTGPSAWETKKILAVSFAPLIQPCHSESGKSRLVQLPPVAVRSLQDLARIAIRGTIKKIIHQETVSKNGNGLKNTPRFKRRRVRRRRMETIVFLDKEVFASRISNPSDDNSCEDLEEERREEEEKTPPETKPDPPVNFLRQKVLSLPLPDPLKYYLLYYREK

SEQ ID NO: 45301 - protein, 333 aa, Homo sapiens [sequence omitted]

SEQ ID NO: 45302 - protein, 290 aa, Homo sapiens
MIEMEQAEAQLAELDLLASMFPGENELIVNDQLAVAELKDCIEKKTMEGRSSKVYFTINMNLDVSDEKMAMFSLACILPFKYPAVLPEITVRSVLLSRSQQTQLNTDLTAFLQKHCHGDVCILNATEWVREHASGYVSRDTSSSPTTGSTVQSVDLIFTRLWIYSHHIYNKCKRKNILEWAKELSLSGFSMPGKPGVVCVEGPQSACEEFWSRLRKLNWKRILIRHREDIPFDGTNDETERQRKFSIFEEKVFSVNGARGNHMDFGQLYQFLNTKGCGDVFQMFFGVEGQ

SEQ ID NO: 45303 - protein, 74 aa, Homo sapiens [sequence omitted]

SEQ ID NO: 45304 - protein, 75 aa, Homo sapiens [sequence omitted]

SEQ ID NO: 45305 - protein, 5 aa, Homo sapiens
MSKND

SEQ ID NO: 45306 - protein, 105 aa, Homo sapiens
MRNSPKHHQTCPWSHGLNLHLCIQKCLPCHREPLATSQAQASSVEPGSRTGPDQPLRQESSSTLPLGGFQTHPTLLWELTLNGGPLVRSKPSEPPPGDRTSQLQS

SEQ ID NO: 45307 - protein, 243 aa, Homo sapiens [sequence omitted]

SEQ ID NO: 45308 - protein, 1495 aa, Homo sapiens [sequence omitted]

SEQ ID NO: 45309 - protein, 259 aa, Homo sapiens [sequence omitted]

SEQ ID NO: 45310 - protein, 48 aa, Homo sapiens
MLMFGSLIASMWILFGAYVTQMLAIGGKGASYCFLSSFDVARTSNYFD

SEQ ID NO: 45311 - protein, 954 aa, Homo sapiens
MNNDGRMDQVEFSIAMKLIKLKLQGYQLPSALPPVMKQQPVAISSAPAFGMGGIASMPPLTAVAPVPMGSIPVVGMSPTLVSSVPTAAVPPLANGAPPVIQPLPAFAHPAATLPKSSSFSRSGPGSQLNTKLQKAQSFDVASVPPVAEWAVPQSSRLKYRQLFNSHDKTMSGHLTGPQARTILMQSSLPQAQLASIWNLSDIDQDGKLTAEEFILAMHLIDVAMSGQPLPPVLPPEYIPPSFRRVRSGSGISVISSTSVDQRLPEEPVLEDEQQQLEKKLPVTFEDKKRENFERGNLELEKRRQALLEQQRKEQERLAQLERAEQERKERERQEQERKRQLELEKQLEKQRELERQREEERRKEIERREAAKRELERQRQLEWERNRRQELLNQRNKEQEDIVVLKAKKKTLEFELEALNDKKHQLEGKLQDIRCRLTTQRQEIESTNKSRELRIAEITHLQQQLQESQQMLGRLIPEKQILNDQLKQVQQNSLHRDSLVTLKRALEAKELARQHLRDQLDEVEKETRSKLQEIDIFNNQLKELREIHNKQQLQKQKSMEAERLKQKEQERKIIELEKQKEEAQRRAQERDKQWLEHVQQEDEHQRPRKLHEEEKLKREESVKKKDGEEKGKQEAQDKLGRLFHQHQEPAKPAVQAPWSTAEKGPLTISAQENVKVVYYRALYPFESRSHDEITIQPGDIVMVDESQTGEPGWLGGELKGKTGWFPANYAEKIPENEVPAPVKPVTDSTSAPAPKLALRETPAPLAVTSSEPSTTPNNWADFSSTWPTSTNEKPETDNWDAWAAQPSLTVPSAGQLRQRSAFTPATATGSSPSPVLGQPDFLLHPSMRLGHMQPRIVLLFPDPLQCSTSRLLPMLRPRPGVPFLRSPSCQSPSHPSRPISDAAPSVKFTLMPPGRIHPCFLFIPAVNSRNSFLVYFILPGGTLGCFYLCLPHYL

SEQ ID NO: 45312 - protein, 1078 aa, Homo sapiens
MNNDGRMDQVEFSIAMKLIKLKLQGYQLPSALPPVMKQQPVAISSAPAFGMGGIASMPPLTAVAPVPMGSIPVVGMSPTLVSSVPTAAVPPLANGAPPVIQPLPAFAHPAATLPKSSSFSRSGPGSQLNTKLQKAQSFDVASVPPVAEWAVPQSSRLKYRQLFNSHDKTMSGHLTGPQARTILMQSSLPQAQLASIWNLSDIDQDGKLTAEEFILAMHLIDVAMSGQPLPPVLPPEYIPPSFRRVRSGSGISVISSTSVDQRLPEEPVLEDEQQQLEKKLPVTFEDKKRENFERGNLELEKRRQALLEQQRKEQERLAQLERAEQERKERERQEQERKRQLELEKQLEKQRELERQREEERRKEIERREAAKRELERQRQLEWERNRRQELLNQRNKEQEDIVVLKAKKKTLEFELEALNDKKHQLEGKLQDIRCRLTTQRQEIESTNKSRELRIAEITHLQQQLQESQQMLGRLIPEKQILNDQLKQVQQNSLHRDSLVTLKRALEAKELARQHLRDQLDEVEKETRSKLQEIDIFNNQLKELREIHNKQQLQKQKSMEAERLKQKEQERKIIELEKQKEEAQRRAQERDKQWLEHVQQEDEHQRPRKLHEEEKLKREESVKKKDGEEKGKQEAQDKLGRLFHQHQEPAKPAVQAPWSTAEKGPLTISAQENVKVVYYRALYPFESRSHDEITIQPGDIVMVDESQTGEPGWLGGELKGKTGWFPANYAEKIPENEVPAPVKPVTDSTSAPAPKLALRETPAPLAVTSSEPSTTPNNWADFSSTWPTSTNEKPETDNWDAWAAQPSLTVPSAGQLRQRSAFTPATATGSSPSPVLGQGEKVEGLQAQALYPWRAKKDNHLNFNKNDVITVLEQQDMWWFGEVQGQKGWFPKSYVKLISGPIRKSTSMDSGSSESPASLKRVASPAAKPVVSGEEIAQVIASYTATGPEQLTLAPGQLILIRKKNPGGWWEGELQARGKKRQIGWFPANYVKLLSPGTSKITPTEPPKSTALAAVCQVIGMYDYTAQNDDELAFNKGQIINVLNKEDPDWWKGEVNGQVGLFPSNYVKLTTDMDPSQQ

SEQ ID NO: 45313 - protein, 1112 aa, Homo sapiens
MNNDGRMDQVEFSIAMKLIKLKLQGYQLPSALPPVMKQQPVAISSAPAFAAVPPLANGAPPVIQPLPAFAHPAATLPKSSSFSRSGPGSQLNTKLQKAQSFDVASVPPVAEWAVPQSSRLKYRQLFNSHDKTMSGHLTGPQARTILMQSSLPQAQLASIWNLSDIDQDGKLTAEEFILAMHLIDVAMSGQPLPPVLPPEYIPPSFRRVRSGSGISVISSTSVDQRLPEEPVLEDEQQQLEKKLPVTFEDKKRENFERGNLELEKRRQALLEQQRKEQERLAQLERAEQERKERERQEQERKRQLELEKQLEKQRELERQREEERRKEIERREAAKRELERQRQLEWERNRRQELLNQRNKEQEDIVVLKAKKKTLEFELEALNDKKHQLEGKLQDIRCRLTTQRQEIESTNKSRELRIAEITHLQQQLQESQQMLGRLIPEKQILNDQLKQVQQNSLHRDSLVTLKRALEAKELARQHLRDQLDEVEKETRSKLQEIDIFNNQLKELREIHNKQQLQKQKSMEAERLKQKEQERKIIELEKQKEEAQRRAQERDKQWLEHVQQEDEHQRPRKLHEEEKLKREESVKKKDGEEKGKQEAQDKLGRLFHQHQEPAKPAVQAPWSTAEKGPLTISAQENVKVVYYRALYPFESRSHDEITIQPGDIVMVDESQTGEPGWLGGELKGKTGWFPANYAEKIPENEVPAPVKPVTDSTSAPAPKLALRETPAPLAVTSSEPSTTPNNWADFSSTWPTSTNEKPETDNWDAWAAQPSLTVPSAGQLRQRSAFTPATATGSSPSPVLGQGEKVEGLQAQALYPWRAKKDNHLNFNKNDVITVLEQQDMWWFGEVQGQKGWFPKSYVKLISGPIRKSTSMDSGSSESPASLKRVASPAAKPVVSGEEFIAMYTYESSEQGDLTFQQGDVILVTKKDGDWWTGTVGDKAGVFPSNYVRLKDSEGSGTAGKTGSLGKKPEIAQVIASYTATGPEQLTLAPGQLILIRKKNPGGWWEGELQARGKKRQIGWFPANYVKLLSPGTSKITPTEPPKSTALAAVCQVIGMYDYTAQNDDELAFNKGQIINVLNKEDPDWWKGEVNGQVGLFPSNYVKLTTDMDPSQQ

SEQ ID NO: 45314 - protein, 1650 aa, Homo sapiens
MNNDGRMDQVEFSIAMKLIKLKLQGYQLPSALPPVMKQQPVAISSAPAFGMGGIASMPPLTAVAPVPMGSIPVVGMSPTLVSSVPTAAVPPLANGAPPVIQPLPAFAHPAATLPKSSSFSRSGPGSQLNTKLQKAQSFDVASVPPVAEWAVPQSSRLKYRQLFNSHDKTMSGHLTGPQARTILMQSSLPQAQLASIWNLSDIDQDGKLTAEEFILAMHLIDVAMSGQPLPPVLPPEYIPPSFRRVRSGSGISVISSTSVDQRLPEEPVLEDEQQQLEKKLPVTFEDKKRENFERGNLELEKRRQALLEQQRKEQERLAQLERAEQERKERERQEQERKRQLELEKQLEKQRELERQREEERRKEIERREAAKRELERQRQLEWERNRRQELLNQRNKEQEDIVVLKAKKKTLEFELEALNDKKHQLEGKLQDIRCRLTTQRQEIESTNKSRELRIAEITHLQQQLQESQQMLGRLIPEKQILNDQLKQVQQNSLHRDSLVTLKRALEAKELARQHLRDQLDEVEKETRSKLQEIDIFNNQLKELREIHNKQQLQKQKSMEAERLKQKEQERKIIELEKQKEEAQRRAQERDKQWLEHVQQEDEHQRPRKLHEEEKLKREESVKKKDGEEKGKQEAQDKLGRLFHQHQEPAKPAVQAPWSTAEKGPLTISAQENVKVVYYRALYPFESRSHDEITIQPGDIVMVDESQTGEPGWLGGELKGKTGWFPANYAEKIPENEVPAPVKPVTDSTSAPAPKLALRETPAPLAVTSSEPSTTPNNWADFSSTWPTSTNEKPETDNWDAWAAQPSLTVPSAGQLRQRSAFTPATATGSSPSPVLGQGEKVEGLQAQALYPWRAKKDNHLNFNKNDVITVLEQQDMWWFGEVQGQKGWFPKSYVKLISGPIRKSTSMDSGSSESPASLKRVASPAAKPVVSGEEFIAMYTYESSEQGDLTFQQGDVILVTKKDGDWWTGTVGDKAGVFPSNYVRLKDSEGSGTAGKTGSLGKKPEIAQVIASYTATGPEQLTLAPGQLILIRKKNPGGWWEGELQARGKKRQIGWFPANYVKLLSPGTSKITPTEPPKSTALAAVCQVIGMYDYTAQNDDELAFNKGQIINVLNKEDPDWWKGEVNGQVGLFPSNYVKLTTDMDPSQQWCSDLHLLDMLTPTERKRQGYIHELIVTEENYVNDLQLVTEIFQKPLMESELLTEKEVAMIFVNWKELIMCNIKLLKALRVRKKMSGEKMPVKMIGDILSAQLPHMQPYIRFCSRQLNGAALIQQKTDEAPDFKEFVKRLAMDPRCKGMPLSSFILKPMQRVTRYPLIIKNILENTPENHPDHSHLKHALEKAEELCSQVNEGVREKENSDRLEWIQAHVQCEGLSEQLVFNSVTNCLGPRKFLHSGKLYKAKSNKELYGFLFNDFLLLTQITKPLGSSGTDKVFSPKSNLQYKMYKTPIFLNEVLVKLPTDPSGDEPIFHISHIDRVYTLRAESINERTAWVQKIKAASELYIETEKKKREKAYLVRSQRATGIGRLMVNVVEGIELKPCRSHGKSNPYCEVTMGSQCHITKTIQDTLNPKWNSNCQFFIRDLEQEVLCITVFERDQFSPDDFLGRTEIRVADIKKDQGSKGPVTKCLLLHEVPTGEIVVRLDLQLFDEP

SEQ ID NO: 45315 - protein, 64 aa, Homo sapiens
MRQGCKFRGSSQKIRWSRSPPSSLLHTLRPRLLSAEITLQTNLPLQSPCCRLCFLRGTQAKTLK

SEQ ID NO: 45316 - protein, 368 aa, Homo sapiens [sequence omitted]

SEQ ID NO: 45317 - protein, 235 aa, Homo sapiens [sequence omitted]

SEQ ID NO: 45318 - protein, 2080 aa, Homo sapiens
MLGTNHQLTVKSLRASLLDSNVLVQRNNLEIVLFFFPFYTCLDSNERAIPLLRSDIVRILSAATQTLLRRDMSLNRRLYAWLLGSDIKGNTVVPESEISNSYEDQSSYFFEKYSKDLLVEGLAEILHQKFIDADVEERHHAYLKPFRVLISLLDKPEIGPQVVGNLFLEVIRAFYSYCRDALGSDLKLSYTQSGNSLISAIKENRNASEIVKTVNLLITSLSTDFLWDYMTRCFEECFRPVKQRYSVRNSVSPPPTVSELCALLVFLLDVIPLELYSEVQTQYLPQVLGCLVQPLAEDMEALSLPELTHALKTCFKVLSKVQMPPSYLDTESTSGTSSPVKGENGKIILETKAVIPGDEDASFPPLKSEDSGIGLSASSPELSEHLRVPRVSLERDDVWKKGGSMQRTFLCIQELIANFASKNIFGVQLTASGEESKSEEPAGKRDRDGTQSLAANDSSRKNSWEPKPITVPQFKQMLSDLFTARGSPFKTKSSESPSSSPSSPARKNGGEWDVEKVVIDLGGSREERREAFAAACHLLLDCATFPVYLSEEETEQLCATLFQLPGAGDSSFPSWLKSLMTICCCVTDCYLQNVAISTLLEVINHSQSLALVIEDKMKRYKSSGHNPFFGKLQMVTVPPIAPGILKVIAEKTDFYQRVARVLWNQLNKETREHHVTCVELFYRLHCLAPTANICEDIICHALLDPDKGTRLEALFRFSVIWHLTREIQGSRVTSHNRSFDRSLFVVLDSLACTDGAIGAAAQGWLVRALSLGDVARILEPVLLLLLQPKTQRTSIHCLKQENSADDLHRWFNRKKTSFREACAVPEPQESGSEEHLPLSQFTTVDREAIWAEVEKEPEKYPLRGELSEEELPYYVELPDRTAHGAPDSSEHTESADTSSCHTDSENTSSFSSPSHDLQELSNEENCCAPIPMGGRAYPKRSALLAAFQSESFKAGAKLSLVRVDSDKTQASESFSSDEEADLELQALTTSRLLKQQRERQEAVEALFKHILLYLQPYDSRRVLYAFSVLEAVLKTNPKEFIEAVSRTSMDTSSTAHLNLISNLLARHQEALIGQSFYGKLQTQVPNVCPHSLLLELLTYLCLSFLRSYYPCYLKVSHRDILGNRDVQVKSVEVLIRIMMQLVSVAKSSEGKNVEFIHSLLQRCKVQEFVLLSLSASMYTSQKRYGLATAHHGRALPEDSLFEESLINLGQDQIWSEHPLQIELLKLLQVLIVLEHHLGRAHEEAENQPDLSREWQRALNFQQAISALQYVQPHPLTSQGLLVSAVVRGLQPAYGYGMHPAWVSLVTHSLPYFGKSLGWTVTPFVVQICKNLDDLVKQYESESVKLSVSTTSKRENISPDYPLTLLEGLTTISHFCLLEQANQNKKTMAAGDPANLRNARNAILEELPRTVNTMALLWNVLRKEETQKRPVDLLGATKGSSSVYFKTTKTIRQKILDFLNPLTAHLGVQLTAAVAAVWSRKKAQRHSKMKIIPTASASQLTLVDLVCALSTLQTDTLLHLVKEVVKRPPQVKGGDEKSPLVDIPVLQFCYAFLQRLPVPALQENFSSLLGVLKESVQLNLAPPGYFLLLSMLNDFVTRTPNLENKKDQKDLQEITQKILEAVGNIAGSSLEQTSWLSRNLEVKAQPQASLEESDAEEDLYDAAAASAMVSSSAPSVYSVQALSLLAEVLASLLDMVYRSDEKEKAVPLISRLLYYVFPYLRNHSAYNAPSFRAGAQLLSSLSGYAYTKRAWRKEVLELFLDPAFFQMDTSCVHWKSIIDHLLTHEKTMFKDLMNMQSSSLKLFSSFEQKAMLLKRQAFAVFSGELDQYHLYLPLIQERLTDNLRVGQTSIVAAQMFLFFRVLLLRISPQHLTSLWPIMVSELIQTFTQLEEDLKDEDESLRSTNKVNRTKVSVPDANGPSVGEIPQSELILYLSACKFLDTALSFPPDKMPLFQIYRWAFIPEVDTEGPAFLSDVEENHQECKPHTVRILELLKLKFGEISSSDEITMKSEFPLLRQHSVSSIRQLMPFFMTLNGAFKTQRQLPADSPGTPFLDFPVTDSPRILKQLEECIEYDFLEHPEC

SEQ ID NO: 45319 - protein, 868 aa, Homo sapiens
MTSDKLHKMLSFGFSDKVTMNGHVPVGLYGNGFKSGSMRLGKDAIVFTKNGESMSVGLLSQTYLEVIKAEHVVVPIVAFNKHRQMINLAESKASLAAILEHSLFSTEQKLLAELDAIIGKKGTRIIIWNLRSYKNATEFDFEKDKYDIRIPEDLDEITGKKGYKKQERMDQIAPESDYSLRAYCSILYLKPRMQIILRGQKVKTQLVSKSLAYIERDVYRPKFLSKTVRITFGFNCRNKDHYGIMMYHRNRLIKAYEKVGCQLRANNMGVGVVGIIECNFLKPTHNKQDFDYTNEYRLTITALGEKLNDYWNEMKVKKNTEYPLNLPVEDIQKRPDQTWVQCDACLKWRKLPDGMDQLPEKWYCSNNPDPQFRNCEVPEEPEDEDLVHPTYEKTYKKTNKEKFRIRQPEMIPRINAELLFRPTALSTPSFSSPKESVPRRHLSEGTNSYATRLLNNHQVPPQSEPESNSLKRRLSTRSSILNAKNRRLSSQFENSVYKGDDDDEDVIILEENSTPKPAVDHDIDMKSEQSHVEQGGVQVEFVGDSEPCGQTGSTSTSSSRCDQGNTAATQTEVPSLVVKKEETVEDEIDVRNDAVILPSCVEAEAKIHETQETTDKSADDAGCQLQELRNQLLLVTEEKENYKRQCHMFTDQIKVLQQRILEMNDKYVKKETCHQSTETDAVFLLESINGKSESPDHMVSQYQQALEEIERLKKQCSALQHVKAECSQCSNNESKSEMDEMAVQLDDVFRQLDKCSIERDQYKSEVELLEMEKSQIRSQCEELKTEVEQLKSTNQQTATDVSTSSNIEESVNHMDGESLKLRSLRVNVGQLLAMIVPDLDLQQVNYDVDVVDEILGQVVEQMSEISST

SEQ ID NO: 45320 - protein, 56 aa, Homo sapiens
MSTSPLDSIHTITDNYAKNQQQKKYQEEAIPALRDISISEVNQMFFLAAKELYTKN

SEQ ID NO: 45321 - protein, 624 aa, Homo sapiens
MDSRCTVLRKQDSGEAPFSSTKVKNKSKKKKPKDSKPMLVGSGTTSVTSNNEIITSSEDHSNRNSDSAGPFAVPDHLRQDVEEFEALYDQHSNEYVVRNKKLWDMNPKQKCSTLYDYFSQFLEEHGPLDMSNKMFSAEYEFFPEETRQILEKAGGLKPFLLGCPRFVVIDNCIALKKVASRLKKKRKKKNIKTKVEEISKAGEYVRVKLQLNPAAREFKPDVKSKPVSDSSSAPAFENVKPKPVSANSPKPACEDVKAKPVSDNSSRQVSEDGQPKGVSSNSPKPGSEDANYKRVSCNSPKPVLEDVKPTYWAQSHLVTGYCTYLPFQRFDITQTPPAYINVLPGLPQYTSIYTPLASLSPEYQLPRSVPVVPSFVANDRADKNAAAYFEGHHLNAENVAGHQIASETQILEGSLGISVKSHCSTGDAHTVLSESNRNDEHCGNSNNKCEVIPESTSAVTNIPHVQMVAIQVSWNIIHQEVNTEPYNPFEERQGEISRIEKEHQVLQDQLQEVYENYEQIKLKGLEETRDLEEKLKRHLEENKISKTELDWFLQDLEREIKKWQQEKKEIQERLKSLKKKIKKVSNASEMYTQKNDGKEKEHELHLDQSLEIRQIKLKFIFNIF

SEQ ID NO: 45322 - protein, 336 aa, Homo sapiens
MNGQMLCNLGKERFLELAPDFVGDILWEHLEQMIKENQEKTEDQYEENSHLTSVPHWINSNTLGFGTEQAPYGMQTQNYPKGGLLDSMCPASTPSVLSSEQEFQMFPKSRLSSVSVTYCSVSQDFPGSNLNLLTNNSGTPKDHDSPENGADSFESSDSLLQSWNSQSSLLDVQRVPSFESFEDDCSQSLCLNKPTMSFKDYIQERSDPVEQGKPVIPAAVLAGFTGSGPIQLWQFLLELLSDKSCQSFISWTGDGWEFKLADPDEVARRWGKRKNKPKMNYEKLSRGLRYYYDKNIIHKTSGKRYVYRFVCDLQNLLGFTPEELHAILGVQPDTED

SEQ ID NO: 45323 - protein, 694 aa, Homo sapiens [sequence omitted]

SEQ ID NO: 45324 - protein, 283 aa, Homo sapiens [sequence omitted]

SEQ ID NO: 45325 - protein, 697 aa, Homo sapiens
MWVQDEPLLQEELANTIAQLVHAVNNSAAQHLFIQTFWQTMNREWKGIDRLRLDKYYMLIRLVLRQSFEVLKRNGWEESRIKVFLDVLMKEVLCPESQSPNGVRFHFIDIYLDELSKVGGKELLADQNLKFIDPFCKIAAKTKDHTLVQTIARGVFEAIVDQSPFVPEETMEEQKTKVGDGDLSAEEIPENEVSLRRAVSKKKTALGKNHSRKDGLSDERGRDDCGTFEDTGPLLQFDYKAVADRLLEMTSRKNTPHFNRKRLSKLIKKFQDLSEGSSISQLSFAEDISADEDDQILSQGKHKKKGNKLLEKTNLEKEKGSRVFCVEEEDSESSLQKRRRKKKKKHHLQPENPGPGGAAPSLEQNRGREPEASGLKALKARVAEPGAEATSSTGEESGSEHPPAVPMHNKRKRPRKKSPRAHREMLESAVLPPEDMSQSGPSGSHPQGPRGSPTGGAQLLKRKRKLGVVPVNGSGLSTPAWPPLQQEGPPTGPAEGANSHTTLPQRRRLQKKKAGPGSLELCGLPSQKTASLKKRKKMRVMSNLVEHNGVLESEAGQPQALGSSGTCSSLKKQKLRAESDFVKFDTPFLPKPLFFRRAKSSTATHPPGPAVQLNKTPSSSKKVTFGLNRNMTAEFKKTDKSILVSPTGPSRVAFDPEQKPLHGVLKTPTSSPASSPLVAKKPLTTTPRRRPRAMDFF

SEQ ID NO: 45326 - protein, 239 aa, Homo sapiens
MNKYDYVLTGYTRDKSFLAMVVDIVQELKQQNPRLVYVCDPVLGDKWDGEGSMYVPEDLLPVYKEKVVPLADIITPNQFEAELLSGRKIHSQEEALRVMDMLHSMGPDTVVITSSDLPSPQGSNYLIVLGSQRRRNPAGSVVMERIRMDIRKVDAVFVGTGDLFAAMLLAWTHKHPNNLKVACEKTVSTLHHVLQRTIQCAKAQAGEGVRPSPMQLELRMVQSKRDIEDPEIVVQATVL

SEQ ID NO: 45327 - protein, 314 aa, Homo sapiens
MLLEWWSCTECTLFTDQATVERFGKEHAVIILNHNFEIDFLCGWTMCERFGVLGSSKVLAKKELLYVPLIGWTWYFLEIVFCKRKWEEDRDTVVEGLRRLSDYPEYMWFLLYCEGTRFTETKHRVSMEVAAAKGLPVLKYHLLPRTKGFTTAVKCLRGTVAAVYDVTLNFRGNKNPSLLGILYGKKYEADMCVRRFPLEDIPLDEKEAAQWLHKLYQEKDALQEIYNQKGMFPGEQFKPARRPWTLLNFLSWATILLSPLFSFVLGVFASGSPLLILTFLGFVGAASFGVRRLIGVTEIEKGSSYGNQEFKKKE

SEQ ID NO: 45328 - protein, 61 aa, Homo sapiens
MFPGEQFKPARRPWTLLNFLSWATILLSPLFSFVLGVFASGSPLLILTFLGFVGAGNGHCR

SEQ ID NO: 45329 - protein, 757 aa, Homo sapiens
MSRLGGMNAAVRAVTRMGIYVGAKVFLIYEGYEGLVEGGENIKQANWLSVSNIIQLGGTIIGSARCKAFTTREGRRAAAYNLVQHGITNLCVIGGDGSLTGANIFRSEWGSLLEELVAEGKISETTARTYSHLNIAGLVGSIDNDFCGTDMTIGTDSALHRIMEVIDAITTTAQSHQRTFVLEVMGRHCGYLALVSALASGADWLFIPEAPPEDGWENFMCERLGETRSRGSRLNIIIIAEGAIDRNGKPISSSYVKDLVVQRLGFDTRVTVLGHVQRGGTPSAFDRILSSKMGMEAVMALLEATPDTPACVVTLSGNQSVRLPLMECVQMTKEVQKAMDDKRFDEATQLRGGSFENNWNIYKLLAHQKPPKEKSNFSLAILNVGAPAAGMNAAVRSAVRTGISHGHTVYVVHDGFEGLAKGQVQEVGWHDVAGWLGRGGSMLGTKRTLPKGQLESIVENIRIYGIHALLVVGGFEAYEGVLQLVEARGRYEELCIVMCVIPATISNNVPGTDFSLGSDTAVNAAMESCDRIKQSASGTKRRVFIVETMGGYCGYLATVTGIAVGADAAYVFEDPFNIHDLKVNVEHMTEKMKTDIQRGLVLRNEKCHDYYTTEFLYNLYSSEGKGVFDCRTNVLGHLQQGGAPTPFDRNYGTKLGVKAMLWLSEKLREVYRKGRVFANAPDSACVIGLKKKAVAFSPVTELKKDTDFEHRMPREQWWLSLRLMLKMLAQYRISMAAYVSGELEHVTRRTLSMDKGF

SEQ ID NO: 45330 - protein, 59 aa, Homo sapiens
MLPSYSMASGAILSTETVSIVTLSLTWKNGTGNIPLGADVGEESSFQSPGARTWRSQLL

SEQ ID NO: 45331 - protein, 724 aa, Homo sapiens
MKTPCQPDRNSLRQSRNPQKYFAMDIEDEENMSSSSTDVKENRNLDNVSPKDGSTPGPGEGSQLSNGGGGGPGRKRPLEEGSNGHSKYRLKKRRKTPGPVLPKNALMQLNEIKPGLQYTLLSQTGPVHAPLFVMSVEVNGQVFEGSGPTKKKAKLHAAEKALRSFVQFPNASEAHLAMGRTLSVNTDFTSDQADFPDTLFNGFETPDKAEPPFYVGSNGDDSFSSSGDLSLSASPVPASLAQPPLPVLPPFPPPSGKNPVMILNELRPGLKYDFLSESGESHAKSFVMSVVVDGQFFEGSGRNKKLAKARAAQSALAAIFNLHLDQTPSRQPIPSEGLQLHLPQVLADAVSRLVLGKFGDLTDNFSSPHARRKVLAGVVMTTGTDVKDAKVISVSTGTKCINGEYMSDRGLALNDCHAEIISRRSLLRFLYTQLELYLNNKDDQKRSIFQKSERGGFRLKENVQFHLYISTSPCGDARIFSPHEPILEEPADRHPNRKARGQLRTKIESGEGTIPVRSNASIQTWDGVLQGERLLTMSCSDKIARWNVVGIQGSLLSIFVEPIYFSSIILGSLYHGDHLSRAMYQRISNIEDLPPLYTLNKPLLSGISNAEARQPGKAPNFSVNWTVGDSAIEVINATTGKDELGRASRLCKHALYCRWMRVHGKVPSHLLRSKITKPNVYHESKLAAKEYQAAKARLFTAFIKAGLGAWVEKPTEQDQFSLTP

SEQ ID NO: 45332 - protein, 503 aa, Homo sapiens
MPGPPGPPGPPGPPGTPVYDSNVFAESSRPGPPGLPGNQGPPGPKGAKGEVGPPGPPGQFPFDFLQLEAEMKGEKGDRGDAGQKGERGEPGGGGFFGSSLPGPPGPPGPPGPRGYPGIPGPKGESIRGQPGPPGPQGPPGIGYEGRQGPPGPPGPPGPPSFPGPHRQTISVPGPPGPPGPPGPPGTMGASSGQVRLWATRQAMLGQVHEVPEGWLIFVAEQEELYVRVQNGFRKVQLEARTPLPRGTDNEVAALQPPVVQLHDSNPYPRREHPHPTARPWRADDILASPPRLPEPQPYPGAPHHSSYVHLRPARPTSPPAHSHRDFQPVLHLVALNSPLSGGMRGIRGADFQCFQQARAVGLAGTFRAFLSSRLQDLYSIVRRADRAAVPIVNLKDELLFPSWEALFSGSEGPLKPGARIFSFDGKDVLRHPTWPQKSVWHGSDPNGRRLTESYCETWRTEAPSATGQASSLLGGRLLGQSAASCHHAYIVLCIENSFMTASK

SEQ ID NO: 45333 - protein, 462 aa, Homo sapiens
MAARIAYSSYIFSLVRPARYQRVAGYSRAAVLLGVFTSSVLGQLLVTVGRVSFSTLNYISLAFLTFSVVLALFLKRPKRSLFFNRDDRGRCETSASELERMNPGPGGKLGHALRVACGDSVLARMLRELGDSLRRPQLRLWSLWWVFNSAGYYLVVYYVHILWNEVDPTTNSARVYNGAADAASTLLGAITSFAAGFVKIRWARWSKLLIAGVTATQAGLVFLLAHTRHPSSIWLCYAAFVLFRGSYQFLVPIATFQIASSLSKELCALVFGVNTFFATIVKTIITFIVSDVRGLGLPVRKQFQLYSVYFLILSIIYFLGAMLDGLRHCQRGHHPRQPPAQGLRSAAEEKAAQALSVQDKGLGGLQPAQSPPLSPEDSLGAVGPASLEQRQSDPYLAQAPAPQAAEFLSPVTTPSPCTLCSAQASGPEAADETCPQLAVHPPGVSKLGLQCLPSDGVQNVNQ

SEQ ID NO: 45334 - protein, 3192 aa, Homo sapiens
MFTVSDHPPEQHGMFTVSDHPPEQRGMFTISDHQPEQRGMFTVSDHTPEQRGIFTISDHPAEQRGMFTKECEQECELAITDLESGREDEAGLHQSQAVHGLELEALRLSLSNMHTAQLELTQANLQKEKETALTELREMLNSRRAQELALLQSRQQHELELLREQHAREKEEVVLRCGQEAAELKEKLQSEMEKNAQIVKTLKEDWESEKDLCLENLRKELSAKHQSEMEDLQNQFQKELAEQRAELEKIFQDKNQAERALRNLESHHQAAIEKLREDLQSEHGRCLEDLEFKFKESEKEKQLELENLQASYEDLKAQSQEEIRRLWSQLDSARTSRQELSELHEQLLARTSRVEDLEQLKQREKTQHESELEQLRIYFEKKLRDAEKTYQEDLTLLQQRLQGAREDALLDSVEVGLSCVGLEEKPEKGRKDHVDELEPERHKESLPRFQAELEESHRHQLEALESPLCIQHEGHVSDRCCVETSALGHEWRLEPSEGHSQELPWVHLQGVQDGDLEADTERAARVLGLETEHKVQLSLLQTELKEEIELLKIENRNLYGKLQHETRLKDDLEKVKHNLIEDHQKELNNAKQKTELMKQEFQRKETDWKVMKEELQREAEEKLTLMLLELREKAESEKQTIINKFELREAEMRQLQDQQAAQILDLERSLTEQQGRLQQLEQDLTSDDALHCSQCGREPPTAQDGELAALHVKEDCALQLMLARSRFLEERKEITEKFSAEQDAFLQEAQEQHARELQLLQERHQQQLLSVTAELEARHQAALGELTASLESKQGALLAARVAELQTKHAADLGALETRHLSSLDSLESCYLSEFQTIREEHRQALELLRADFEEQLWKKDSLHQTILTQELEKLKRKHEGELQSVRDHLRTEVSTELAGTVAHELQGVHQGEFGSEKKTALHEKEETLRLQSAQAQPFHQEEKESLSLQLQKKNHQVQQLKDQVLSLSHEIEECRSELEVLQQRRERENREGANLLSMLKADVNLSHSERGALQDALRRLLGLFGETLRAAVTLRSRIGERVGLCLDDAGAGLALSTAPALEETWSDVALPELDRTLSECAEMSSVAEISSHMRESFLMSPESVRECEQPIRRVFQSLSLAVDGLMEMALDSSRQLEEARQIHSRFEKEFSFKNEETAQVVRKHQELLECLKEESAAKAELALELHKTQGTLEGFKVETADLKEVLAGKEDSEHRLVLELESLRRQLQQAAQEQAALREECTRLWSRGEATATDAEAREAALRKEVEDLTKEQSETRKQAEKDRSALLSQMKILESELEEQLSQHRGCAKQAEAVTALEQQVASLDKHLRNQRQFMDEQAAEREHEREEFQQEIQRLEGQLRQAAKPQPWGPRDSQQAPLDGEVELLQQKLREKLDEFNELAIQKESADRQVLMQEEEIKRLEEMNINIRKKVAQLQEEVEKQKNIVKGLEQDKEVLKKQQMSSLLLASTLQSTLDAGRCPEPPSGSPPEGPEIQLEVTQRALLRRESEVLDLKEQLEKMKGDLESKNEEILHLNLKLDMQNSQTAVSLRELEEENTSLKVIYTRSSEIEELKATIENLQENQKRLQKEKAEEIEQLHEVIEKLQHELSLMGPVVHEVSDSQAGSLQSELLCSQAGGPRGQALQGELEAALEAKEALSRLLADQERRHSQALEALQQRLQGAEEAAELQLAELERNVALREAEVEDMASRIQEFEAALKAKEATIAERNLEIDALNQRKAAHSAELEAVLLALARIRRALEQQPLAAGAAPPELQWLRAQCARLSRQLQVLHQRFLRCQVELDRRQARRATAHTRVPGAHPQPRMDGGAKAQVTGDVEASHDAALEPVVPDPQGDLQPVLVTLKDAPLCKQEGVMSVLTVCQRQLQSELLLVKNEMRLSLEDGGKGKEKVLEDCQLPKVDLVAQVKQLQEKLNRLLYSMTFQNVDAADTKSLWPMASAHLLESSWSDDSCDGEEPDISPHIDTCDANTATGGVTDVIKNQAIDACDANTTPGGVTDVIKNWDSLIPDEMPDSPIQEKSECQDMSLSSPTSVLGGSRHQSHTAEAGPRKSPVGMLDLSSWSSPEVLRKDWTLEPWPSLPVTPHSGALSLCSADTSLGDRADTSLPQTQGPGLLCSPGVSAAALALQWAESPPADDHHVQRTAVEKDVEDFITTSFDSQETLSSPPPGLEGKADRSEKSDGSGFGARLSPGSGGPEAQTAGPVTPASISGRFQPLPEAMKEKEVRPKHVKALLQMVRDESHQILALSEGLAPPSGEPHPPRKEDEIQDISLHGGKTQEVPTACPDWRGDLLQVVQEAFEKEQEMQGVELQPRLSGSDLGGHSSLLERLEKIIREQGDLQEKSLEHLRLPDRSSLLSEIQALRAQLRMTHLQNQEKLQHLRTALTSAEARGSQQEHQLRRQVELLAYKVEQEKCIAGDLQKTLSEEQEKANSVQKLLAAEQTVVRDLKSDLCESRQKSEQLSRSLCEVQQEVLQLRSMLSSKENELKAALQELESEQGKGRALQSQLEEEQLRHLQRESQSAKALEELRASLETQRAQSSRLCVALKHEQTAKDNLQKELRIEHSRCEALLAQERSQLSELQKDLAAEKSRTLELSEALRHERLLTEQLSQRTQEACVHQDTQAHHALLQKLKEEKSRVVDLQAMLEKVQQQALHSQQQLEAEAQKHCEALRREKEVSATLKSTVEALHTQKRELRCSLEREREKPAWLQAELEQSHPRLKEQEGRKAARRSAEARQSPAAAEQWRKWQRDKEKLRELELQRQRDLHKIKQLQQTVRDLESKDEVPGSRLHLGSARRAAGSDADHLREQQRELEAMRQRLLSAARLLTSFTSQAVDRTVNDWTSSNEKAVMSLLHTLEELKSDLSRPTSSQKKMAAELQFQFVDVLLKDNVSLTKALSTVTQEKLELSRAVSKLEKLLKHHLQKGCSPSRSERSAWKPDETAPQSSLRRPDPGRLPPAASEEAHTSNVKMEKLYLHYLRAESFRKALIYQKKYLLLLIGGFQDSEQETLSMIAHLGVFPSKAERKITSRPFTRFRTAVRVVIAILRLRFLVKKWQEVDRKGALAQGKAPRPGPRARQPQSPPRTRESPPTRDVPSGHTRDPARGRRLAAAASPHSGGRATPSPNSRLERSLTASQDPEHSLTEYIHHLEVIQQRLGGVLPDSTSKKSCHPMIKQ

SEQ ID NO: 45335 - protein, 1457 aa, Homo sapiens [sequence omitted]

SEQ ID NO: 45336 - protein, 221 aa, Homo sapiens
MGTCLLFEFMIESILYARDAWLKEDGVIWPTMAALHLVPCSADKDYRSKVLFWDNAYEFNLSALKSLAVKEFFSKPKYNHILKPEDCLSEPCTILQLDMRTVQISDLETLRGELRFDIRKAGTLHGFTAWFSVHFQSLQEGQPPQVLSTGPFHPTTHWKQTLFMMDDPVPVHTGDVVTGSVVLQRNPVWRRHMSVALSWAVTSRQDPTSQKVGEKVFPIWR

SEQ ID NO: 45337 - protein, 426 aa, Homo sapiens
MHQAALLGGLIQDAPNYGWEVAQPVPHDWRKMAEAVQNHVKSLNWGHRVQLQDRKVKYFNIKASFVDEHTVCGVAKGGKEILLSADHIIIATGGRPRYPTHIEGALEYGITSDDIFWLKESPGKTLVVGASYVALECAGFLTGIGLDTTIMMRSIPLRGFDQQMSSMVIEHMASHGTRFLRGCAPSRVRRLPDGQLQVTWEDSTTGKEDTGTFDTVLWAIGRVPDTRSLNLEKAGVDTSPDTQKILVDSREATSVPHIYAIGDVVEGRPELTPIAIMAGRLLVQRLFGGSSDLMDYDNVPTTVFTPLEYGCVGLSEEEAVARHGQEHVEVYHAHYKPLEFTVAGRDASQCYVKMVCLREPPQLVLGLHFLGPNAGEVTQGFALGIKCGASYAQVMRTVGIHPTCSEEVVKLRISKRSGLDPTVTGC

SEQ ID NO: 45338 - protein, 242 aa, Homo sapiens
MHQAALLGGLIQDAPNYGWEVAQPVPHDWRKMAEAVQNHVKSLNWGHRVQLQDRKVKYFNIKASFVDEHTVCGVAKGGKEILLSADHIIIATGGRPRYPTHIEGALEYGITSDDIFWLKESPGKTLVVGASYVALECAGFLTGIGLDTTIMMRSIPLRGFDQQMSSMVIEHMASHGTRFLRGCAPSRVRRLPDGQLQVTWEDSTTGKEDTGTFDTVLWAIAPCISACLPTTVGHAGKNQRRD

SEQ ID NO: 45339 - protein, 281 aa, Homo sapiens [sequence omitted]

SEQ ID NO: 45340 - protein, 475 aa, Homo sapiens
MARRRRQEGESEPPVTRVADVVTPLWTVPYAEQLERKQLECEQVLQKLAKEIGSTNRALLPWLLEQRHKHNKACCPLEGVRPSPQQTEYRNKCEFLVGVGVDGEDNTVGCRLGKYKGGTCAVAAPFDTVHIPEATKQVVKAFQEFIRSTPYSAYDPETYTGHWKQLTVRTSRRHQAMAIAYFHPQKLSPEELAELKTSLAQHFTAGPGRASGVTCLYFVEEGQRKTPSQEGLPLEHVAGDRCIHEDLLGLTFRISPHAFFQVNTPAAEVLYTVIQDWAQLDAGSMVLDVCCGTGTIGLALARKVKRVIGVELCPEAVEDARVNAQDNELSNVEFHCGRAEDLVPTLVSRLASQHLVAILDPPRAGLHSKVILAIRRAKNLRRLLYVSCNPRAAMGNFVDLCRAPSNRVKGIPFRPVKAVAVDLFPQTPHCEMLILFERVEHPNGTGVLGPHSPPAQPTPGPPDNTLQETGTFPSS

SEQ ID NO: 45341 - protein, 27 aa, Homo sapiens
MRRDKTLKICANHYNVPLNSEQARSEA

SEQ ID NO: 45342 - protein, 663 aa, Homo sapiens
MKWCATCHFYRPPRCSHCSVCDNCVEDFDHHCPWVNNCIGRRNYRYFFLFLLSLSAHMVGVVAFGLVYVLNHAEGLGAAHTTITMAVMCVAGLFFIPVIGLTGFHVVLVTRGRTTNEQVTGKFRGGVNPFTRGCCGNVEHVLCSPLAPRYVVEPPRLPLAVSLKPPFLRPELLDRAAPLKVKLSDNGLKAGLGRSKSKGSLDRLDEKPLDLGPPLPPKIEAGTFSSDLQTPRPGSAESALSVQRTSPPTPAMYKFRPAFPTGPKVPFCGPGEQVPGPDSLTLGDDSIRSLDFVSEPSLDLPDYGPGGLHAAYPPSPPLSASDAFSGALRSLSLKASSRRGGDHVALQPLRSEGGPPTPHRSIFAPHALPNRNGSLSYDSLLNPGSPGGHACPAHPAVGVAGYHSPYLHPGATGDPPRPLPRSFSPVLGPRPREPSPVRYDNLSRTIMASIQERKDREERERLLRSQADSLFGDSGVYDAPSSYSLQQASVLSEGPRGPALRYGSRDDLVAGPGFGGARNPALQTSLSSLSSSVSRAPRTSSSSLQADQASSNAPGPRPSSGSHRSPARQGLPSPPGTPHSPSYAGPKAVAFIHTDLPEPPPSLTVQRDHPQLKTPPSKLNGQSPGLARLGPATGPPGPSASPTRHTLVKKVSGVGGTTYEISV

SEQ ID NO: 45343 - protein, 392 aa, Homo sapiens [sequence omitted]

SEQ ID NO: 45344 - protein, 325 aa, Homo sapiens
MLGRAAASPTQTPPTTSTIRVARRSRVALVAMVIAAAGSGGPGRAEPQLSQPSLDCGRMRSSLTPLGPPVSRDRVIASFPKWYTPEACLQLREHFHGQVSAACQRRNTGTVGLKLSKVVVVGDLYVGKTSLIHRFCKNVFDRDYKATIGVDFEIERFEIAGIPYSLQIWDTAGQEKFKCIASAYYRGAQVIITAFDLTDVQTLEHTRQWLEDALRENEAGSCFIFLVGTKKDLLSGAACEQAEADAVHLAREMQAEYWSVSAKTGENVKAFFSRVAALAFEQSVLQDLERQSSARLQVGNGDLIQMEGSPPETQESKRPSSLGCC

SEQ ID NO: 45345 - protein, 470 aa, Homo sapiens
MLLLLLQPPPLLARALPPDAHHLHAERRGPQPWHAALPSSPAPAPATQEAPRPASSLRPPRCGVPDPSDGLSARNRQKRFVLSGGRWEKTDLTYRILRFPWQLVQEQVRQTMAEALKVWSDVTPLTFTEVHEGRADIMIDFARYWHGDDLPFDGPGGILAHAFFPKTHREGDVHFDYDETWTIGDDQGTDLLQVAAHEFGHVLGLQHTTAAKALMSAFYTFRYPLSLSPDDCRGVQHLYGQPWPTVTSRTPALGPQAGIDTNEIAPLEPDAPPDACEASFDAVSTIRGELFFFKAGFVWRLRGGQLQPGYPALASRHWQGLPSPVDAAFEDAQGHIWFFQGAQYWVYDGEKPVLGPAPLTELGLVRFPVHAALVWGPEKNKIYFFRGRDYWRFHPSTRRVDSPVPRRATDWRGVPSEIDAAFQDADGYAYFLRGRLYWKFDPVKVKALEGFPRLVGPDFFGCAEPANTFL

SEQ ID NO: 45346 - protein, 147 aa, Homo sapiens
MVPSILINKAQGSKLVIGGAGGELIISAVAQAIMSKLWLGFDLRAAIAAPILHVNSKGCVEYEPNFSQKQDLAALPRLVSNSWPQVILLPQPPKLLALQEVQRGLQDRGQNQTQRPFFLNVVQAVSQEGACVYAVSDLRKSGEAAGY

SEQ ID NO: 45347 - protein, 1027 aa, Homo sapiens
MTTVENKSKISTGTASSTKRSTSTGNKESSSTRERLRERTRLNQSKKLPSAGQGANDMALAKRSRSRTATECDVRMSKSKSDNQISDRAALEAKVKDLLTLAKTKDVEILHLRNELRDMRAQLGINEDHSEGDEKSEKETIMAHQPTDVESTLLQLQEQNTAIREELNQLKNENRMLKDRLNALGFSLEQRLDNSEKLFGYQSLSPEITPGNQSDGGGTLTSSVEGSAPGSVEDLLSQDENTLMDHQHSNSMDNLDSECSEVYQPLTSSDDALDAPSSSESEGIPSIERSRKGSSGNASEVSVACLTERIHQMEENQHSTSEELQATLQELADLQQITQELNSENERLGEEKVILMESLCQQSDKLEHFSRQIEYFRSLLDEHHISYVIDEDVKSGRYMELEQRYMDLAENARFEREQLLGVQQHLSNTLKMAEQDNKEAQEMIGALKERSHHMERIIESEQKGKAALAATLEEYKATVASDQIEMNRLKAQLENEKQKVAELYSIHNSGDKSDIQDLLESVRLDKEKAETLASSLQEDLAHTRNDANRLQDAIAKVEDEYRAFQEEAKKQIEDLNMTLEKLRSDLDEKETERSDMKETIFELEDEVEQHRAVKLHDNLIISDLENTVKKLQDQKHDMEREIKTLHRRLREESAEWRQFQADLQTAVVIANDIKSEAQEEIGDLKRRLHEAQEKNEKLTKELEEIKSRKQEEERGRVYNYMNAVERDLAALRQGMGLSRRSSTSSEPTPTVKTLIKSFDSASQVPNPAAAAIPRTPLSPSPMKTPPAAAVSPMQRHSISGPISTSKPLTALSDKRPNYGEIPVQEHLLRTSSASRPASLPRVPAMESAKTLSVSRRSSEEVKRDISAQEGASPASLMAMGTTSPQLSLSSSPTASVTPTTRSRIREERKDPLSALAREYGGSKRNALLKWCQKKTEGYQNIDITNFSSSWNDGLAFCALLHTYLPAHIPYQELNSQDKRRNFMLAFQAAESVGIKSTLDINEMVRTERPDWQNVMLYVTAIYKYFET

SEQ ID NO: 45348 - protein, 1000 aa, Homo sapiens
MTTVENKSKISTGTASSTKRSTSTGQGANDMALAKRSRSRTATECDVRMSKSKSDNQISDRAALEAKVKDLLTLAKTKDVEILHLRNELRDMRAQLGINEDHSEGDEKSEKETIMAHQPTDVESTLLQLQEQNTAIREELNQLKNENRMLKDRLNALGFSLEQRLDNSEKLFGYQSLSPEITPGNQSDGGGTLTSSVEGSAPGSVEDLLSQDENTLMDHQHSNSMDNLDSECSEVYQPLTSSDDALDAPSSSESEGIPSIERSRKGSSGNASEVSVACLTERIHQMEENQHSTSEELQATLQELADLQQITQELNSENERLGEEKVILMESLCQQSDKLEHFSRQIEYFRSLLDEHHISYVIDEDVKSGRYMELEQRYMDLAENARFEREQLLGVQQHLSNTLKMAEQDNKEAQEMIGALKERSHHMERIIESEQKGKAALAATLEEYKATVASDQIEMNRLKAQLENEKQKVAELYSIHNSGDKSDIQDLLESVRLDKEKAETLASSLQEDLAHTRNDANRLQDAIAKVEDEYRAFQEEAKKQIEDLNMTLEKLRSDLDEKETERSDMKETIFELEDEVEQHRAVKLHDNLIISDLENTVKKLQDQKHDMEREIKTLHRRLREESAEWRQFQADLQTAVVIANDIKSEAQEEIGDLKRRLHEAQEKNEKLTKELEEIKSRKQEEERGRVYNYMNAVERDLAALRQGMGLSRRSSTSSEPTPTVKTLIKSFDSASQVPNPAAAAIPRTPLSPSPMKTPPAAAVSPMQRHSISGPISTSKPLTALSDKRPNYGEIPVQEHLLRTSSASRPASLPRVPAMESAKTLSVSRRSSEEVKRDISAQEGASPASLMAMGTTSPQLSLSSSPTASVTPTTRSRIREERKDPLSALAREYGGSKRNALLKWCQKKTEGYQNIDITNFSSSWNDGLAFCALLHTYLPAHIPYQELNSQDKRRNFMLAFQAAESVGIKSTLDINEMVRTERPDWQNVMLYVTAIYKYFET

SEQ ID NO: 45349 - protein, 103 aa, Homo sapiens
MTGPGGRRNDPWGRQRAREGAHTSKHPTPRTGWTARRRRGAWALRPGTAGGWAKGQDFPSQFHLLIPAPPAAASRSLLRSGGGGGEGTRHAPTALPPQPKRKL

SEQ ID NO: 45350 - protein, 70 aa, Homo sapiens [sequence omitted]

SEQ ID NO: 45351 - protein, 223 aa, Homo sapiens [sequence omitted]

SEQ ID NO: 45352 - protein, 341 aa, Homo sapiens
MPGNLGCYKDHGNPPPLTGTSKTSNKLTIQTCISFCRSQRFKFAGMESGYACFCGNNPDYWKYGEAASTECNSVCFGDHTQPCGGDGRIILFDTLVGACGGNYSAMSSVVYSPDFPDTYATGRVCYWTIRVPGASHIHFSFPLFDIRDSADMVELLDGYTHRVLARFHGRSRPPLSFNVSLDFVILYFFSDRINQAQGFAVLYQAVKEELPQERPAVNQTVAEVITEQANLSVSAARSSKVLYVITTSPSHPPQTVPGWTVYGLATLLILTVTAIVAKILLHVTFKSHRVPASGDLRDCHQPGTSGEIWSIFYKPSTSISIFKKKLKGQSQQDDRNPLVSD

SEQ ID NO: 45353 - protein, 653 aa, Homo sapiens [sequence omitted]

SEQ ID NO: 45354 - protein, 468 aa, Homo sapiens [sequence omitted]

SEQ ID NO: 45355 - protein, 216 aa, Homo sapiens
MLSTYQTDFILVREQDLSVVIHTLAQEFDIYREVGGEPVPVTRDDSSNGFPRTQHGPSPTVHPIQSPQNRFCVLTLDPETLPAIATTLIDVLFYSHSTPKEAASSSPEPSSITFFAFSLIEGYISIVMDAETQKKFPSDLLLTSSSGELWRMVRIGGQPLGFDECGIVAQIAGPLAAADISAYYISTFNFDHALVPEDGIGSVIEVLQRRQEGLAS

SEQ ID NO: 45356 - protein, 440 aa, Homo sapiens
MFVSRGGHGQQDLFRVLKAYTLYRPEEGYCQAQAPIAAVLLMHMPAEQAFWCLVQICEKYLPGYYSEKLEAIQLDGEILFSLLQKVSPVAHKHLSRQKIDPLLYMTEWFMCAFSRTLPWSSVLRVWDMFFCEGVKIIFRVGLVLLKHALGSPEKVKACQGQYETIERLRSLSPKIMQEAFLVQEVVELPVTERQIEREHLIQLRRWQETRELPPSEFLQVAEATWLVLNVSSHSGAAVQAAGVTKIARSVIAPLAEHHVSVLMLSTYQTDFILVREQDLSVVIHTLAQEFDIYREVGGEPVPVTRDDSSNGFPRTQHGPSPTVHPIQSPQNRFCVLTLDPETLPAIATTLIDVLFYSHRFPSDLLLTSSSGELWRMVRIGGQPLGFDECGIVAQIAGPLAAADISAYYISTFNFDHALVPEDGIGSVIEVLQRRQEGLAS

SEQ ID NO: 45357 - protein, 216 aa, Homo sapiens
MFVSRGGHGQQDLFRVLKAYTLYRPEEGYCQAQAPIAAVLLMHMPAEQAFWCLVQICEKYLPGYYSEKLEAIQLDGEILFSLLQKVSPVAHKHLSRQKIDPLLYMTEWFMCAFSRTLPWSSVLRVWDMFFCEGVKIIFRVGLVLLKHALGSPEKVKACQGQYETIERLRSLSPKIMQEAFLVQEVVELPVTERQIEREHLIQLRRWQETRGASSSA

SEQ ID NO: 45358 - protein, 234 aa, Homo sapiens [sequence omitted]

SEQ ID NO: 45359 - protein, 662 aa, Homo sapiens
MLHNLNQQRKNGGRFCDVLLRVGDESFPAHRAVLAACSEYFESVFSAQLGDGGAADGGPADVGGATAAPGGGAGGSRELEMHTISSKVFGDILDFAYTSRIVVRLESFPELMTAAKFLLMRSVIEICQEVIKQSNVQILVPPARADIMLFRPPGTSDLGFPLDMTNGAALAANSNGIAGSMQPEEEAARAAGAAIAGQASLPVLPGVDRLPMVAGPLSPQLLTSPFPSVASSAPPLTGKRGRGRPRKANLLDSMFGSPGGLREAGILPCGLCGKVFTDANRLRQHEAQHGVTSLQLGYIDLPPPRLGENGLPISEDPDGPRKRSRTRKQVACEICGKIFRDVYHLNRHKLSHSGEKPYSCPVCGLRFKRKDRMSYHVRSHDGSVGKPYICQSCGKGFSRPDHLNGHIKQVHTSERPHKCQTCNASFATRDRLRSHLACHEDKVPCQVCGKYLRAAYMADHLKKHSEGPSNFCSICNRGFSSASYLKVHVKTHHGVPLPQVSRHQEPILNGGAAFHCARTYGNKEGQKCSHQDPIESSDSYGDLSDASDLKTPEKQSANGSFSCDMAVPKNKMESDGEKKYPCPECGSFFRSKSYLNKHIQKVHVRALGGPLGDLGPALGSPFSPQQNMSLLESFGFQIVQSAFASSLVDPEVDQQPMGPEGK

SEQ ID NO: 45360 - protein, 512 aa, Homo sapiens
MLHNLNQQRKNGGRFCDVLLRVGDESFPAHRAVLAACSEYFESVFSAQLGDGGAADGGPADVGGATAAPGGGAGGSRELEMHTISSKVFGDILDFAYTSRIVVRLESFPELMTAAKFLLMRSVIEICQEVIKQSNVQILVPPARADIMLFRPPGTSDLGFPLDMTNGAALAANSNGIAGSMQPEEEAARAAGAAIAGQASLPVLPGVDRLPMVAGPLSPQLLTSPFPSVASSAPPLTGKRGRGRPRKANLLDSMFGSPGGLREAGILPCGLCGKVFTDANRLRQHEAQHGVTSLQLGYIDLPPPRLGENGLPISEDPDGPRKRSRTRKQVACEICGKIFRDVYHLNRHKLSHSGEKPYSCPVCGLRFKRKDRMSYHVRSHDGSVGKPYICQSCGKGFSRPDHLNGHIKQVHTSERPHKCQVWVGSSSGLPPLEPLPSDLPSWDFAQPALWRSSHSVPDTAFSLSLKKSFPALENLGPAHSSNTLFCPAPPGYLRQGWTTPEGSRAFTQWPVG

SEQ ID NO: 45361 - protein, 806 aa, Homo sapiens
MGETESGDAFLDLKKPPASKCPHRYTKEELLDIKELPHSKQRPSCLSEKYDSDGVWDPEKWHASLYPASGRSSPVESLKKELDTDRPSLVRRIVGIVECNGGVAEEDEVEVILAQEPAADQEVPRDAVLPEQSPGDFDFNEFFNLDKVPCLASMIEDVLGEGSVSASRFSRWFSNPSRSGSRSSSLGSTPHEELERLAGLEQAILSPGQNSGNYFAPIPLEDHAENKVDILEMLQKAKVDLKPLLSSLSANKEKLKESSHSGVVLSVEEVEAGLKGLKVDQQVKNSTPFMAEHLEETLSAVTNNRQLKKDGDMTAFNKLVSTMKRNLESHLMSPAEIPGQPVPKNILQELLGQPVQRPASSNLLSGLMGSLEPTTSLLGQRAPSPPLSQVFQTRAASADYLRPRIPSPIGFTPGPQQLLGDPFQGMRKPMSPITAQQMSQLELQQAALEGLALPHDLAVQAANFYQPGFGKPQVDRTRDGFRNRQQRVTKSPAPVHRGNSSSPAPAASITSMLSPSFTPTSVIRKMYESKEKSKEEPASGKAALGDSKEDTQKASEENLLSSSSVPSADRDSSPTTNSKLSALQRSSCSTPLSQANRYTKEQDYRPKATGRKTPTLASPVPTTPFLRPVHQVPLVPHVPMVRPAHQLHPGLVQRMLAQGVHPQHLPSLLQTGVLPPGMDLSHLQGISGPILGQPFYPLPAASHPLLNPRPGTPLHLAMVQQQLQRSVLHPPGSGSHAAAVSVQTTPQNVPSRSGLPHMHSQLEHRPSQRSSSPVGLAKWFGSDVLQQPLPSMPAKVISVDELEYRQ

SEQ ID NO: 45362 - protein, 980 aa, Homo sapiens [sequence omitted]

SEQ ID NO: 45363 - protein, 261 aa, Homo sapiens
MCQSEARQGPELRAAKWLHFPQLALRRRLGQLSCMSRPALKLRSWPLTVLYYLLPFGALRPLSRVGWRPVSRVALYKSVPTRLLSRAWGRLNQVELPHWLRRPVYSLYIWTFGVNMKEAAVEDLHHYRNLSEFFRRKLKPQARPVCGLHSVISPSDGRILNFGQVKNCEVEQVKGVTYSLESFLGPRMCTEDLPFPPAASCDSFKNQLVTREGNELYHCVIYLAPGDYHCFHSPTDWTVSHRRHFPGPAHKQPKAQQGLLQ

SEQ ID NO: 45364 - protein, 2035 aa, Homo sapiens
MEPKVFRDPGGQAGIIREPSEGAKEDPHQHSTAAEEKTSPSQEDLLMQSSKELSHVDLPEDFLRSKEGNVQITAETLLKSAEVQGMKVNGTKTDNNEGHKNGNVSKDLSAGCGEFQEVDKIMTSDEVSETSTLVTPEPLTFVDPVLTEATPKEKECEELKSCPWLSLPGNSAISNVDNGKEELCKPNLVCEADDNHQQLHGHHNEQPSSTHDSPTATSPLKENSEVSCFTSDLSGPESRTISLENCGFEGGGLLKRSAEKTDSSYFYRGDDQGKNLASREENEERLLIPRSERGGPFLFNAREPEKEISGRCSGEKEPVVSPKENIHNNCIQDSLHTGNSSSLMPNSFTEATEVMLNKNDLKITVHVQGNLTNPEDHKETFTNMSHPGGHSEESSFSSLMQIEEAGQTTPVEPNILSKSFYTKDCNSLVSIQRNLEGNTQLNEASCNDFLFERKSIVSLMPEDQISPVSEVLKPKQGTALLLPSPEFDYRPESEKVIQTSHDDIPLLDEQSIACEMNELSCTNELVVNKVESECVLNQQVSLNSQEHANLPTDSLLHLNKEMPLATGRDAHQSHHPPLEGRADVIADIQTIPIQTKIKDISPPGNQTCGASSNCPTLNIKPVSLERKKEMADSGTKALHSRLRSNKREAAGFPQVVSVIECHSVQSQDISSCHRVRKNVSQENMCSASAAFKSSKISLQVDNSLITKYENAFQHRDHCCQGTGHSVEKSSCKVSYTSQERELDGKETNGSLPGDKIRNKMVAGLLNSGISNKTIHTSSSIKLSEEGLEGKEQDVSKETVFCKYNISDHAIQELNQTVNIPGPEKVLDQSPTVMFSSFKNVKSVETLDQKADEVLDCQSNQNRPDECKSEGQSAKEMLSSDQRETVTEPHGEVNHNQKDLLVSSGSNNSLPCGSPKKCNLKGAFVKMSGCDESTEGMVDIVYTDCSNKLAEGVLDVKASNLLDCGARQEKLAFQEDSRSTLSRRELDAAHTGTTGQDSDFPVTAASTVDFLKIKKSCEENVCRSLKDCEMEKCPDSCAHEMESVADHEPNKRILGRVNLSLNDSHYGQQDKGTSLRETQEMTEGSRLEPNSEFGKESTFGISSKESMSCHDESSVSLRSLKSIEIMPSQENSETNVNSEETDLKNLCKPKDGEMLCENVKDCTVLPEMKEIVSRDWSNSSDRDSVCTCVEKNACKACHPHENSSDRHLPLTVKTDIKVKGEETEEHQRGRLGYLTVGEQSEELVTRETGDGDPVSNISQTHFKCRGILNHAEKQQSPEVLDYMLQKEEKYIRQQKAHTISQQCISSSLLLDDAQNQNQPKADKDESTMINEITLAKLAKDSIVAQTQKLEDQKEERLHHPLRKDTESCTSPCLLGAPRKAQDPSSAGCDQIHGAFAKKGVLPLKKQPHRTCKKVSYQEQIIVGRKIGKIRSSAFLKSSSNPIPTKAHRLLSLCTLSAPTRLEPETAPTKSLVSHIPKQMSTPCHPLRSLNFRKTTKESALLNKLSILASKLAPAMKTQKLRYRRCSSELLPMAKSYKRLRYKRLLDGFSSSTEQLNPYLAASGWDKRPNSKPMALYSLESIKMTFIDLSNKMPSLLFGSEIFPVSFHVKSSSSDCTTESSRTFPEHCAPARLALGEALQCPSQPPKWTFSFFLSHGCPGMATFREDTGVHSQTHTQAPPQPPAPLQDYGGTAIVQTRADCSVLGLHTLLALCSPGCYRIWTKKRSFSSHMPTMQRLFMTQFTQGLKGLRSPASIADKVFCSLPYSVGRVLSIWSQHGPSVCSFEISSLHSPHCKRQPSLGTTSSHTMLPYVPLPGMEATYNTSGSQTRLEPPFPALVPKSCLVAESAVSKLLLSASEFQVRGLDELDGVKAACPCPQSSPPEQKEAEPEKRPKKVSQIRIRKTIPRPDPNLTPMGLPRPKRLKKKEFSLEEIYTNKNYKSPPANRCLETIFEEPKERNGTLISISQQKRKRVLEFQDFTVPRKRRARGKVKVAGSFTRAQKAAVQSRELDALLIQKLMELETFFAKEEEQEQSSGC

SEQ ID NO: 45365 - protein, 430 aa, Homo sapiens
MKPLYVNTETLTLREPDGLKMKLILSPKEKGSSSVDEESFQYPSQQATVKKSSKKSARDEQGALLLGHELQSFLKTARKKHKSSSDAHSSPGPEGCGSDASQFAESHSANLDLSGLEPILVESDSSSGGELEAGELVIDDSYREIKKKKKSKKSKKKKDKEKHKEKRHSKSKRSLGLSAVPVGEVTVTSGPPPSIPYAGAAAPPLPLPGLHTDGHSEKKKKKEEKDKERERGEKPKKKNMSAYQVFCKEYRVTIVADHPGIDFGELSKKLAEVWKQLPEKDKLIWKQKAQYLQHKQNKAEATTVKRKASSSEGSMKVKASSVGVLSPQKKSPPTTMLLPASPAKAPETEPIDVAAHLQLLGESLSLIGHRLQETEGMVAVSGSLSVLLDSIICALGPLACLTTQLPELNGCPKQVLSNTLDNIAYIMPGL

SEQ ID NO: 45366 - protein, 608 aa, Homo sapiens
MLKSDASPSSIRSLKSDMMSHLVKIPGIIIAASAVRAKATRISIQCRSCRNTLTNIAMRPGLEGYALPRKCNTDQAGRPKCPLDPYFIMPDKCKCVDFQTLKLQELPDAVPHGEMPRHMQLYCDRYLCDKVVPGNRVTIMGIYSIKKFGLTTSRGRDRVGVGIRSSYIRVLGIQVDTDGSGRSFAGAVSPQEEEEFRRLAALPNVYEVISKSIAPSIFGGTDMKKAIACLLFGGSRKRLPDGLTRRGDINLLMLGDPGTAKSQLLKFVEKCSPIGVYTSGKGSSAAGLTASVMRDPSSRNFIMEGGAMVLADGGVVCIDEFDKMREDDRVAIHEAMEQQTISIAKAGITTTLNSRCSVLAAANSVFGRWDETKGEDNIDFMPTILSRFDMIFIVKDEHNEERDVMLAKHVITLHVSALTQTQAVEGEIDLAKLKKFIAYCRVKCGPRLSAEAAEKLKNRYIIMRSGARQHERDSDRRSSIPITVRQLEAIVRIAEALSKMKLQPFATEADVEEALRLFQVSTLDAALSGTLSGVEGFTSQEDQEMLSRIEKQLKRRFAIGSQVSEHSIIKDFTKQKYPEHAIHKVLQLMLRRGEIQHRMQRKVLYRLK

SEQ ID NO: 45367 - protein, 29 aa, Homo sapiens
MQMHGWRWDPHSSEQLDLAHTLSREASLG

SEQ ID NO: 45368 - protein, 273 aa, Homo sapiens
MKDKNRHDKDQQHRQWFLKEFPRLKRELEDHIRKLRALAEEVEQVHRGTTIANVVSNSVGTTSGILTLLGLGLAPFTEGISFVLLDTGMGLGAAAAVAGITCSVVELVNKLRARAQARNLDQSGTNVAKVMKEFVGGNTPNVLTLVDNWYQVTQGIGRNIRAIRRARANPQLGAYAPPPHVIGRISAEGGEQVERVVEGPAQAMSRGTMIVGAATGGILLLLDVVSLAYESKHLLEGAKSESAEELKKRAQELEGKLNFLTKIHEMLQPGQDQ

SEQ ID NO: 45369 - protein, 288 aa, Homo sapiens
MEAGEAAPPAGAGGRAAGGWGKWVRLNVGGTVFLTTRQTLCREQKSFLSRLCQGEELQSDRDETGAYLIDRDPTYFGPILNFLRHGKLVLDKDMAEEGVLEEAEFYNIGPLIRIIKDRMEEKDYTVTQVPPKHVYRVLQCQEEELTQMVSTMSDGWRFEQLVNIGSSYNYGSEDQAEFLCVVSKELHSTPNGLSSESSRKTKSTEEQLEEQQQQEEEVEEVEVEQVQVEADAQEKGSRPHPLRPEAELAVRASPRPLARPQSCHPCCYKPEAPGCEAPDHLQGLGVPI

SEQ ID NO: 45370 - protein, 589 aa, Homo sapiens
MAESFKELDPDSSMGKALEMSCAIQNQLARILAEFEMTLERDVLQPLSRLSEEELPAILKHKKSLQKLVSDWNTLKSRLSQATKNSGSSQGLGGSPGSHSHTTMANKVETLKEEEEELKRKVEQCRDEYLADLYHFVTKEDSYANYFIRLLEIQADYHRRSLSSLDTALAELRENHGQADHSPSMTATHFPRVYGVSLATHLQELGREIALPIEACVMMLLSEGMKEEGLFRLAAGASVLKRLKQTMASDPHSLEEFCSDPHAVAGALKSYLRELPEPLMTFDLYDDWMRAASLKEPGARLQALQEVCSRLPPENLSNLRYLMKFLARLAEEQEVNKMTPSNIAIVLGPNLLWPPEKEGDQAQLDAASVSSIQVVGVVEALIQSADTLFPGDINFNVSGLFSAVTLQDTVSDRLASEELPSTAVPTPATTPAPAPAPAPAPAPALASAATKERTESEVPPRPASPKVTRSPPETAAPVEDMARRSTGSLAAAVETASGRQALVVGKPSPYMFECITENFSIDPARTLMVGDRLETDILFGHRCGMTTVLTLTGVSRLEEAQAYLAAGQHDLVPHYYVESIADLTEGLED

SEQ ID NO: 45371 - protein, 496 aa, Homo sapiens
MTSGIRRNWIEALRKTVRPTSAPDVTKLSDSNKENALHSYSTQKGPLKAGEQRAGSEVISRGGPRKADGQRQALDYVELSPLTQASPQRARTPARTPDRLAKQEELERDLAQRSEERRKWFEATDSRTPEVPAGEGPRRGLGAPLTEDQQNRLSEEIEKKWQELEKLPLRENKRVPLTALLNQSRGERRGPPSDGHEALEKEVQALRAQLEAWRLQGEAPQSALRSQEDGHIPPGYISQEACERSLAEMESSHQQVMEELQRHHERELQRLQQEKEWLLAEETAATASAIEAMKKAYQEELSRELSKTRSLQQGPDGLRKQHQSDVEALKRELQVLSEQYSQKCLEIGALMRQAEEREHTLRRCQQEGQELLRHNQELHGRLSEEIDQLRGFIASQGMGNGCGRSNERSSCELEVLLRVKENELQYLKKEVQCLRDELQMMQKDKRFTSGKYQDVYVELSHIKTRSEREIEQLKEHLRLAMAALQEKESMRNSLAE

SEQ ID NO: 45372 - protein, 443 aa, Homo sapiens
MRTDAVFLILYKELYYRHIYAKVSGGPSLEQRFESYYNYCNLFNYILNADGPAPLELPNQWLWDIIDEFIYQFQSFSQYRCKTAKKSEEEIDFLRSNPKIWNVHSVLNVLHSLVDKSNINRQLEVYTSGGDPESVAGEYGRHSLYKMLGYFSLVGLLRLHSLLGDYYQAIKVLENIELNKKSMYSRVPECQVTTYYYVGFAYLMMRRYQDAIRVFANILLYIQRTKSMFQRTTYKYEMINKQNEQMHALLAIALTMYPMRIDESIHLQLREKYGDKMLRMQKGDPQVYEELFSYSCPKFLSPVVPNYDNVHPNYHKEPFLQQLKVFSDEVQQQAQLSTIRSFLKLYTTMPVAKLAGFLDLTEQEFRIQLLVFKHKMKNLVWTSGISALDGEFQSASEVDFYIDKDMIHIADTKVARRYGDFFIRQIHKFEELNRTLKKMGQRP

SEQ ID NO: 45373 - protein, 779 aa, Homo sapiens
MVSMSVPDCLSIMTYVSQYYNHFCSPGQAGVSPPRKGLAPCSPPSVAPTPVEPEDVAQGEELSSGSLSEQGTGQTPSSTCAACQQHVHLVQRYLADGRLYHRHCFRCRRCSSTLLPGAYENGPEEGTFVCAEHCARLGPGTRSGTRPGPFSQPKQQHQQQLAEDAKDVPGGGPSSSAPAGAEADGPKASPEARPQIPTKPRVPGKLQELASPPAGRPTPAPRKASESTTPAPPTPRPRSSLQQENLVEQAGSSSLVNGRLHELPVPKPRGTPKPSEGTPAPRKDPPWITLVQAEPKKKPAPLPPSSSPGPPSQDSRQVENGGTEEVAQPSPTASLESKPYNPFEEEEEDKEEEAPAAPSLATSPALGHPESTPKSLHPWYGITPTSSPKTKKRPAPRAPSASPLALHASRLSHSEPPSATPSPALSVESLSSESASQTAGAELLEPPAVPKSSSEPAVHAPGTPGNPVSLSTNSSLASSGELVEPRVEQMPQASPGLAPRTRGSSGPQPAKPCSGATPTPLLLVGDRSPVPSPGSSSPQLQVKSSCKENPFNRKPSPAASPATKKATKGSKPVRPPAPGHGFPLIKRKVQADQYIPEEDIHGEMDTIERRLDALEHRGVLLEEKLRGGLNEGREDDMLVDWFKLIHEKHLLVRRESELIYVFKQQNLEQRQADVEYELRCLLNKPEKDWTEEDRAREKVLMQELVTLIEQRNAIINCLDEDRQREEEEDKMLEAMIKKKEFQREAEPEGKKKGKFKTMKMLKLLGNKRDAKSKSPRDKS

SEQ ID NO: 45374 - protein, 71 aa, Homo sapiens
MTKYERARVLGTRALQIAMCAPVMVELEGETDPLLIAMKELKARKIPIIIRRYLPDGSYEDWGVDELIITD

SEQ ID NO: 45375 - protein, 137 aa, Homo sapiens
MSTPIEVLCKGYPSEFSTYLNFCRSLRFDDKPDYSYLRQLFRNLFHRQGFSYDYVFDWNMLKFGASSSQAQPRDSPMTAKGPFCPRPCPCAGPTYSPTYWCPAPLGTQSPPDRPVEEVEELSPQNYWPVVWTPGPHF

SEQ ID NO: 45376 - protein, 521 aa, Homo sapiens
MVGIAQTGSGKTLAYLLPAIVHINHQPYLERGDGPICLVLAPTRELAQQVQQVADDYGKCSRLKSTCIYGGAPKGPQIRDLERGVEICIATPGRLIDFLESGKTNLRRCTYLVLDEADRMLDMGFEPQIRKIVDQIRPDRQTLMWSATWPKEVRQLAEDFLRDYTQINVGNLELSANHNILQIVDVCMESEKDHKLIQLMEEIMAEKENKTIIFVETKRRCDDLTRRMRRDGWPAMCIHGDKSQPERDWVLNEFRSGKAPILIATDVASRGLDVEDVKFVINYDYPNSSEDYVHRIGRTARSTNKGTAYTFFTPGNLKQARELIKVLEEANQAINPKLMQLVDHRGGGGGGGKGGRSRYRTTSSANNPNLMYQDECDRRLRGVKDGGRRDSASYRDRSETDRAGYANGSGYGSPNSAFGAQAGQYTYGQGTYGAAAYGTSSYTAQEYGAGTYGASSTTSTGRSSQSSSQQFSGIGRSGQQPQPLMSQQFAQPPGATNMIGYMGQTAYQYPPPPPPPPPSRK

SEQ ID NO: 45377 - protein, 519 aa, Homo sapiens
MVGIAQTGSGKTLAYLLPAIVHINHQPYLERGDGPICLVLAPTRELAQQVQQVADDYGKCSRLKSTCIYGGAPKGPQIRDLERGVEICIATPGRLIDFLESGKTNLRRCTYLVLDEADRMLDMGFEPQIRKIVDQIRPDRQTLMWSATWPKEVRQLAEDFLRDYTQINVGNLELSANHNILQIVDVCMESEKDHKLIQLMEEIMAEKENKTIIFVETKRRCDDLTRRMRRDGWPAMCIHGDKSQPERDWVLNEFRSGKAPILIATDVASRGLDVEDVKFVINYDYPNSSEDYVHRIGRTARSTNKGTAYTFFTPGNLKQARELIKVLEEANQAINPKLMQLVDHRGGGGGGGGRSRYRTTSSANNPNLMYQDECDRRLRGVKDGGRRDSASYRDRSETDRAGYANGSGYGSPNSAFGAQAGQYTYGQGTYGAAAYGTSSYTAQEYGAGTYGASSTTSTGRSSQSSSQQFSGIGRSGQQPQPLMSQQFAQPPGATNMIGYMGQTAYQYPPPPPPPPPSRK

SEQ ID NO: 45378 - protein, 276 aa, Homo sapiens
MVGIAQTGSGKTLAYLLPAIVHINHQPYLERGDGPICLVLAPTRELAQQVQQVADDYGKCSRLKSTCIYGGAPKGPQIRDLERGVEICIATPGRLIDFLESGKTNLRRCTYLVLDEADRMLDMGFEPQIRKIVDQIRPDRQTLMWSATWPKEVRQLAEDFLRDYTQINVGNLELSANHNILQIVDVCMESEKDHKLIQLMEEIMAEKENKTIIFVETKRRCDDLTRRMRRDGWPAMCIHGDKSQPERDWVLNEFRSGKAPILIATDVASRGLGLYR

SEQ ID NO: 45379 - protein, 660 aa, Homo sapiens
MDSPVPASMFAPEPSSPGAARAAAAAARLHGGFDSDCSEDGEALNGEPELDLTSKLVLVSPTSEQYDSLLRQMWERMDEGCGETIYVIGQGSDGTEYGLSEADMEASYATVKSMAEQIEADVILLRERQEAGGRVRDYLVRKRVGDNDFLEVRVAVVGNVDAGKSTLLGVLTHGELDNGRGFARQKLFRHKHEIESGRTSSVGNDILGFDSEGNVVNKPDSHGGSLEWTKICEKSTKVITFIDLAGHEKYLKTTVFGMTGHLPDFCMLMVGSNAGIVGMTKEHLGLALALNVPVFVVVTKIDMCPANILQETLKLLQRLLKSPGCRKIPVLVQSKDDVIVTASNFSSERMCPIFQISNVTGENLDLLKMFLNLLSPRTSYREEEPAEFQIDDTYSVPGVGTVVSGTTLRGLIKLNDTLLLGPDPLGNFLSIAVKSIHRKRMPVKEVRGGQTASFALKKIKRSSIRKGMVMVSPRLNPQASWEFEAEILVLHHPTTISPRYQAMVHCGSIRQTATILSMDKDCLRTGDKATVHFRFIKTPEYLHIDQRLVFREGRTKAVGTITKLLQTTNNSPMNSKPQQIKMQSTKKGPLTKRDEGGPSGGPAVGAPPPGDEASSVGAGQPAASSNLQPQPKPSSGGRRRGGQRHKVKSQGACVTPASGC

SEQ ID NO: 45380 - protein, 70 aa, Homo sapiens
MELCVTACEKFSNNNESAAKMIKETMDKKFGSSWHVVIGEGFGFEITHEVKNLLYLYFGGTLAVCVWKCS

SEQ ID NO: 45381 - protein, 335 aa, Homo sapiens [sequence omitted]

SEQ ID NO: 45382 - protein, 455 aa, Homo sapiens
MCFVFSDRYKFRTWRQLWLWLAEAEQTLGLPITDEQIQEMKSNLENIDFKMAAEEEKRLRHDVMAHVHTFGHCCPKAAGIIHLGATSCYVGDNTDLIILRNALDLLLPKLARVISRLADFAKERASLPTLGFTHFQPAQLTTVGKRCCLWIQDLCMDLQNLKRVRDDLRFRGVKGTTGTQASFLQLFEGDDHKVEQLDKMVTEKAGFKRAFIITGQTYTRKVDIEVLSVLASLGASVHKICTDIRLLANLKEMEEPFEKQQIGSSAMPYKRNPMRSERCCSLARHLMTLVMDPLQTASVQWFERTLDDSANRRICLAEAFLTADTILNTLQNISEGLVVYPKVIERRIRQELPFMATENIIMAMVKAGGSRQDCHEKIRVLSQQAASVVKQEGGDNDLIERIQVDAYFSPIHSQLDHLLDPSSFTGRASQQVQRFLEEEVYPLLKPYESVMKTCP

SEQ ID NO: 45383 - protein, 299 aa, Homo sapiens [sequence omitted]

SEQ ID NO: 45384 - protein, 2345 aa, Homo sapiens
MVQDAASKHKQLSELLRSGSSPNLNMGVGGPGQVMASQAQQSSPGLGLINSMVKSPMTQAGLTSPNMGMGTSGPNQGPTQSTGMMNSPVNQPAMGMNTGMNAGMNPGMLAAGNGQGIMPNQVMNGSIGAGRGRQNMQYPNPGMGSAGNLLTEPLQQGSPQMGGQTGLRGPQPLKMGMMNNPNPYGSPYTQNPGQQIGASGLGLQIQTKTVLSNNLSPFAMDKKAVPGGGMPNMGQQPAPQVQQPGLVTPVAQGMGSGAHTADPEKRKLIQQQLVLLLHAHKCQRREQANGEVRQCNLPHCRTMKNVLNHMTHCQSGKSCQVAHCASSRQIISHWKNCTRHDCPVCLPLKNAGDKRNQQPILTGAPVGLGNPSSLGVGQQSAPNLSTVSQIDPSSIERAYAALGLPYQVNQMPTQPQVQAKNQQNQQPGQSPQGMRPMSNMSASPMGVNGGVGVQTPSLLSDSMLHSAINSQNPMMSENASVPSLGPMPTAAQPSTTGIRKQWHEDITQDLRNHLVHKLVQAIFPTPDPAALKDRRMENLVAYARKVEGDMYESANNRAEYYHLLAEKIYKIQKELEEKRRTRLQKQNMLPNAAGMVPVSMNPGPNMGQPQPGMTSNGPLPDPSMIRGSVPNQMMPRITPQSGLNQFGQMSMAQPPIVPRQTPPLQHHGQLAQPGALNPPMGYGPRMQQPSNQGQFLPQTQFPSQGMNVTNIPLAPSSGQAPVSQAQMSSSSCPVNSPIMPPGSQGSHIHCPQLPQPALHQNSPSPVPSRTPTPHHTPPSIGAQQPPATTIPAPVPTPPAMPPGPQSQALHPPPRQTPTPPTTQLPQQVQPSLPAAPSADQPQQQPRSQQSTAASVPTPTAPLLPPQPATPLSQPAVSIEGQVSNPPSTSSTEVNSQAIAEKQPSQEVKMEAKMEVDQPEPADTQPEDISESKVEDCKMESTETEERSTELKTEIKEEEDQPSTSATQSSPAPGQSKKKIFKPEELRQALMPTLEALYRQDPESLPFRQPVDPQLLGIPDYFDIVKSPMDLSTIKRKLDTGQYQEPWQYVDDIWLMFNNAWLYNRKTSRVYKYCSKLSEVFEQEIDPVMQSLGYCCGRKLEFSPQTLCCYGKQLCTIPRDATYYSYQNRYHFCEKCFNEIQGESVSLGDDPSQPQTTINKEQFSKRKNDTLDPELFVECTECGRKMHQICVLHHEIIWPAGFVCDGCLKKSARTRKENKFSAKRLPSTRLGTFLENRVNDFLRRQNHPESGEVTVRVVHASDKTVEVKPGMKARFVDSGEMAESFPYRTKALFAFEEIDGVDLCFFGMHVQEYGSDCPPPNQRRVYISYLDSVHFFRPKCLRTAVYHEILIGYLEYVKKLGYTTGHIWACPPSEGDDYIFHCHPPDQKIPKPKRLQEWYKKMLDKAVSERIVHDYKDIFKQATEDRLTSAKELPYFEGDFWPNVLEESIKELEQEEEERKREENTSNESTDVTKGDSKNAKKKNNKKTSKNKSSLSRGNKKKPGMPNVSNDLSQKLYATMEKHKEVFFVIRLIAGPAANSLPPIVDPDPLIPCDLMDGRDAFLTLARDKHLEFSSLRRAQWSTMCMLVELHTQSQDRFVYTCNECKHHVETRWHCTVCEDYDLCITCYNTKNHDHKMEKLGLGLDDESNNQQAAATQSPGDSRRLSIQRCIQSLVHACQCRNANCSLPSCQKMKRVVQHTKGCKRKTNGGCPICKQLIALCCYHAKHCQENKCPVPFCLNIKQKLRQQQLQHRLQQAQMLRRRMASMQRTGVVGQQQGLPSPTPATPTTPTGQQPTTPQTPQPTSQPQPTPPNSMPPYLPRTQAAGPVSQGKAAGQVTPPTPPQTAQPPLPGPPPAAVEMAMQIQRAAETQRQMAHVQIFQRPIQHQMPPMTPMAPMGMNPPPMTRGPSGHLEPGMGPTGMQQQPPWSQGGLPQPQQLQSGMPRPAMMSVAQHGQPLNMAPQPGLGQVGISPLKPGTVSQQALQNLLRTLRSPSSPLQQQQVLSILHANPQLLAAFIKQRAAKYANSNPQPIPGQPGMPQGQPGLQPPTMPGQQGVHSNPAMQNMNPMQAGVQRAGLPQQQPQQQLQPPMGGMSPQAQQMNMNHNTMPSQFRDILRRQQMMQQQQQQGAGPGIGPGMANHNQFQQPQGVGYPPQQQQRMQHHMQQMQQGNMGQIGQLPQALGAEAGASLQAYQQRLLQQQMGSPVQPNPMSPQQHMLPNQAQSPHLQGQQIPNSLSNQVRSPQPVPSPRPQSQPPHSSPSPRMQPQPSPHHVSPQTSSPHPGLVAAQANPMEQGHFASPDQNSMLSQLASNPGMANLHGASATDLGLSTDNSDLNSNLSQSTLDIH

SEQ ID NO: 45385 - protein, 2319 aa, Homo sapiens
MVQDAASKHKQLSELLRSGSSPNLNMGVGGPGQVMASQAQQSSPGLGLINSMVKSPMTQAGLTSPNMGMGTSGPNQGPTQSTGMMNSPVNQPAMGMNTGMNAGMNPGMLAAGNGQGIMPNQVMNGSIGAGRGRQNMQYPNPGMGSAGNLLTEPLQQGSPQMGGQTGLRGPQPLKMGMMNNPNPYGSPYTQNPGQQIGASGLGLQIQTKTVLSNNLSPFAMDKKAVPGGGMPNMGQQPAPQVQQPGLVTPVAQGMGSGAHTADPEKRKLIQQQLVLLLHAHKCQRREQANGEVRQCNLPHCRTMKNVLNHMTHCQSGKSCQVAHCASSRQIISHWKNCTRHDCPVCLPLKNAGDKRNQQPILTGAPVGLGNPSSLGVGQQSAPNLSTVSQIDPSSIERAYAALGLPYQVNQMPTQPQVQAKNQQNQQPGQSPQGMRPMSNMSASPMGVNGGVGVQTPSLLSDSMLHSAINSQNPMMSENASVPSLGPMPTAAQPSTTGIRKQWHEDITQDLRNHLVHKLVQAIFPTPDPAALKDRRMENLVAYARKVEGDMYESANNRAEYYHLLAEKIYKIQKELEEKRRTRLQKQNMLPNAAGMVPVSMNPGPNMGQPQPGMTSSLNQFGQMSMAQPPIVPRQTPPLQHHGQLAQPGALNPPMGYGPRMQQPSNQGQFLPQTQFPSQGMNVTNIPLAPSSGQAPVSQAQMSSSSCPVNSPIMPPGSQGSHIHCPQLPQPALHQNSPSPVPSRTPTPHHTPPSIGAQQPPATTIPAPVPTPPAMPPGPQSQALHPPPRQTPTPPTTQLPQQVQPSLPAAPSADQPQQQPRSQQSTAASVPTPTAPLLPPQPATPLSQPAVSIEGQVSNPPSTSSTEVNSQAIAEKQPSQEVKMEAKMEVDQPEPADTQPEDISESKVEDCKMESTETEERSTELKTEIKEEEDQPSTSATQSSPAPGQSKKKIFKPEELRQALMPTLEALYRQDPESLPFRQPVDPQLLGIPDYFDIVKSPMDLSTIKRKLDTGQYQEPWQYVDDIWLMFNNAWLYNRKTSRVYKYCSKLSEVFEQEIDPVMQSLGYCCGRKLEFSPQTLCCYGKQLCTIPRDATYYSYQNRYHFCEKCFNEIQGESVSLGDDPSQPQTTINKEQFSKRKNDTLDPELFVECTECGRKMHQICVLHHEIIWPAGFVCDGCLKKSARTRKENKFSAKRLPSTRLGTFLENRVNDFLRRQNHPESGEVTVRVVHASDKTVEVKPGMKARFVDSGEMAESFPYRTKALFAFEEIDGVDLCFFGMHVQEYGSDCPPPNQRRVYISYLDSVHFFRPKCLRTAVYHEILIGYLEYVKKLGYTTGHIWACPPSEGDDYIFHCHPPDQKIPKPKRLQEWYKKMLDKAVSERIVHDYKDIFKQATEDRLTSAKELPYFEGDFWPNVLEESIKELEQEEEERKREENTSNESTDVTKGDSKNAKKKNNKKTSKNKSSLSRGNKKKPGMPNVSNDLSQKLYATMEKHKEVFFVIRLIAGPAANSLPPIVDPDPLIPCDLMDGRDAFLTLARDKHLEFSSLRRAQWSTMCMLVELHTQSQDRFVYTCNECKHHVETRWHCTVCEDYDLCITCYNTKNHDHKMEKLGLGLDDESNNQQAAATQSPGDSRRLSIQRCIQSLVHACQCRNANCSLPSCQKMKRVVQHTKGCKRKTNGGCPICKQLIALCCYHAKHCQENKCPVPFCLNIKQKLRQQQLQHRLQQAQMLRRRMASMQRTGVVGQQQGLPSPTPATPTTPTGQQPTTPQTPQPTSQPQPTPPNSMPPYLPRTQAAGPVSQGKAAGQVTPPTPPQTAQPPLPGPPPAAVEMAMQIQRAAETQRQMAHVQIFQRPIQHQMPPMTPMAPMGMNPPPMTRGPSGHLEPGMGPTGMQQQPPWSQGGLPQPQQLQSGMPRPAMMSVAQHGQPLNMAPQPGLGQVGISPLKPGTVSQQALQNLLRTLRSPSSPLQQQQVLSILHANPQLLAAFIKQRAAKYANSNPQPIPGQPGMPQGQPGLQPPTMPGQQGVHSNPAMQNMNPMQAGVQRAGLPQQQPQQQLQPPMGGMSPQAQQMNMNHNTMPSQFRDILRRQQMMQQQQQQGAGPGIGPGMANHNQFQQPQGVGYPPQQQQRMQHHMQQMQQGNMGQIGQLPQALGAEAGASLQAYQQRLLQQQMGSPVQPNPMSPQQHMLPNQAQSPHLQGQQIPNSLSNQVRSPQPVPSPRPQSQPPHSSPSPRMQPQPSPHHVSPQTSSPHPGLVAAQANPMEQGHFASPDQNSMLSQLASNPGMANLHGASATDLGLSTDNSDLNSNLSQSTLDIH

SEQ ID NO: 45386 - protein, 271 aa, Homo sapiens
MPEVLKSLLEHSLPWPEKRTDKEKGKEKLEEDEAAAASTMAVSASLMPPIWDKTIPYDGESFHLEYMDLDEFLLENGIPASPTHLAHNLLLPVAELEGKESASSSTASPPSSSTAIFQPSETVSSTESSLEKERETPSPIDPNCVEVDVNFNPDPADLVLSSVPGGELFNPRKHKFAEEDLKPQPMIKKAKKVFVPDEQKDEKYWTRRKKNNVAAKRSRDARRLKENQITIRAAFLEKENTALRTEVAELRKEVGKCKTIVSKYETKYGPL

SEQ ID NO: 45387 - protein, 325 aa, Homo sapiens [sequence omitted]

SEQ ID NO: 45388 - protein, 296 aa, Homo sapiens [sequence omitted]

SEQ ID NO: 45389 - protein, 325 aa, Homo sapiens [sequence omitted]

SEQ ID NO: 45390 - protein, 385 aa, Homo sapiens
MSVQTIRNVFSVEAGYRLSDDQIVNHFPNHYELTRKDLMVKNIKRYRKELEKEGSPLAEKDENGKYLYLDFVPVTYMLPADYNLFVEEFRKSPSSTWIMKPCGKAQGKGIFLINKLSQIKKWSRDSKTSSFVSQSNKEAYVISLYINNPLLIGGRKFDLRLYVLVSTYRPLRCYMYKLGFCRFCTVKYTPSTSELDNMFVHLTNVAIQKHGEDYNHIHGGKWTVSNLRLYLESTRGKEVTSKLFDEIHWIIVQSLKAVAPVMNNDKHCFECYGYDIIIDDKLKPWLIEVNASPSLTSSTANDRILKYNLINDTLNIAVPNGEIPDCKWNKSPPKEVLGNYEILYDEELAQGDGADRELRSRQGQSLGPRAGRSRDSGRAVLTTWK

SEQ ID NO: 45391 - protein, 290 aa, Homo sapiens [sequence omitted]

SEQ ID NO: 45392 - protein, 249 aa, Homo sapiens [sequence omitted]

SEQ ID NO: 45393 - protein, 404 aa, Homo sapiens
MGHAMATGLVLIGTGSSVKLDKELDLAVKTMVEISRTQPLTRREQLHVSAVETFANGNFPKACELWEQILQDHPTDMLALKFSHDAYFYLGYQEQMRDSVARIYPFWTPDIPLSSYVKGIYSFGLMETNFYDQAEKLAKEALSINPTDAWSVHTVAHIHEMKAEIKDGLEFMQHSETFWKDSDMLACHNYWHWALYLIEKGEYEAALTIYDTHILPSLQANDAMLDVVDSCSMLYRLQMEGVSVGQRWQDVLPVARKHSRDHILLFNDAHFLMASLGAHDPQTTQELLTTLRDASESPGENCQHLLARDVGLPLCQALVEAEDGNPDRVLELLLPIRYRIVQLGGSNAQRDVFNQLLIHAALNCTSSVHKNVARSLLMERDALKPNSPLTERLIRKAATVHLMQ

SEQ ID NO: 45394 - protein, 517 aa, Homo sapiens
MATGVQDFNRTEFDRLNEIKGHLEIALLEKHFLQEELRKLREETNAEMLRQELDRERQRRMELEQKVQEVLKARTEEQMAQQPPKGQAQASNGAERRSQGLSSRLQKWFYERFGEYVEDFRFQPEENTVETEEPLSARRLTENMRRLKRGAKPVTNFVKNLSALSDWYSVYTSAIAFTVYMNAVWHGWAIPLFLFLAILRLSLNYLIARGWRIQWSIVPEVSEPVEPPKEDLTVSEKFQLVLDVAQKAQNLFGKMADILEKIKNLFMWVQPEITQKLYVALWAAFLASCFFPYRLVGLAVGLYAGIKFFLIDFIFKRCPRLRAKYDTPYIIWRSLPTDPQLKERSSAAVSRRLQTTSSRSYVPSAPAGLGKEEDAGRFHSTKKGNFHEIFNLTENERPLAVCENGWRCCLINRDRKMPTDYIRNGVLYVTENYLCFESSKSGSSKRNKVIKLVDITDIQKYKVLSVLPGSGMGIAVSTPSTQKPLVFGAMVHRDEAFETILSQYIKITSAAASGGDS

SEQ ID NO: 45395 - protein, 1020 aa, Homo sapiens [sequence omitted]

SEQ ID NO: 45396 - protein, 1151 aa, Homo sapiens [sequence omitted]

SEQ ID NO: 45397 - protein, 463 aa, Homo sapiens
MFHLGVPTTRAGACVTSESTVVRDVFYDGNPKYEQCTVVLRVASTFIRFGSFEIFKSADEHTGRAGPSVGRNDIRVQLLDYVISSFYPEIQAAHASDSVQRNAAFFREVTRRTARMVAEWQCVGFCHGVLNTDNMSILGLTIDYGPFGFLDRYDPDHVCNASDNTGRYAYSKQPEVCRWNLRKLAEALQPELPLELGEAILAEEFDAEFQRHYLQKMRRKLGLVQVELEEDGALVSKLLETMHLTGADFTNTFYLLSSFPVELESPGLAEFLARLMEQCASLEELRLAFRPQMDPRQLSMMLMLAQSNPQLFALMGTRAGIARELERVEQQSRLEQLSAAELQSRNQGHWADWLQAYRARLDKDLEGAGDAAAWQAEHVRVMHANNPKYVLRNYIAQNAIEAAERGDFSEVRRVLKLLETPYHCEAGAATDAEATEADGADGRQRSYSSKPPLWAAELCVTSS

SEQ ID NO: 45398 - protein, 1759 aa, Homo sapiens
MSKLPARNKILMLSFDLRVGGLGPKADRLEELVEELEAAPCCPLLEVGSVLDLLVQLAGSGPPQVLPRKRDYFLNNKHVGRNVPYSGYDCDDLSVFEMDVQSLISREECLCHSMIQETLQVMEAAPGTGLPTVGLFSFGDPCGDRFERDTRVSLFGALVHSRTYDMDVRLGLPPVPDNADLSGLAIKVPPSVDQWEDEGFQSASNLTPDSQSEPSVTPDVDLWEAALTYEASKRRCWERVGCPPGHREEPYLTEAGRDAFDKFCRLHQGELQLLAGGVLQAPQPVLVKECELVKDVLNVLIGVVSATFSLCQPAQAFVVKRGVHVSGASPESISSLLSEVAEYGTCYTRLSHFSLQPVLDSLYSKGLVFQAFTSGLRRYLQYYRACVLSTPPTLSLLTIGFLFKKLGRQLRYLAELCGVGAVLPGTCGGGPRAAFPTGVKLLSYLYQEALHNCSNEHYPVLLSLLKTSCEPYTRFIHDWVYSGVFRDAYGEFMIQVNHEYLSFRDKLYWTHGYVLISKEVEDCVPVFLKHIAHDIYVCGKTINLLKLCCPRHYLCWSDVPVPRISVIFSLEELKEIEKDCAVYVGRMERVARHSSVSKEEKELRMEIAKQELIAHAREAASRVLSALSDRQMSERMALDARKREQFQRLKEQFVKDQERRQAARQEELDDDFSYARELRDRERRLKSLEEELERKARQALVDHYSKLSAEAARREQKALWRIQRHRLESARLRFLLEDEKHIQEMLKAVSEAHQPQEPPDVLLSVHPQVTSPGPEHPEGGQGCDSGSAEQHSPAWDGWNRPGLLTPQPLKPLAVGAGGRGLQQAEGARPFSDSLSIGDFLPVGPGAEPSVQTGMVPLLEVALQTINLDLPPSAPGEAPAAASTQPSRPQEYDFSTVLRPAVATSPAPGPLQAAECSLGSSGLQLWEDSCGKMDACGSASRETLLPSHPPRRAALEEGSSQPTERLFGQVSGGGLPTGDYASEIAPTRPRWNTHGHVSDASIRVGENVSDVAPTQPRWNTHGHVSNASISLGESVSDVAPTRPRWNIHGHVSNASIRVGENVSDVAPTRPRWNTHGHVSNASIRVGENVSDVAPTRPRWNTHGHVSDASISLGESVSDMAPARPRWNTHGHVSDASISLGESVSDMAPTRPRWNTHGHVSDTSIRVGENVSDVAPIRSRCNTHGHVSDASISLGEPVSDVVSTRPRWNTHVPIPPPHMVLGALSPEAEPNTPRPQQSPPGHTSQSALSLGAQSTVLDCGPRLPVEVGPSLSSPSSGCGEGSISVGENVSDVAPTQPWWPNTPGDSVSEELGPGRSGDTEDLSPNWPLNSQEDTAAQSSPGRGEEAEASAAEAQGGEQAYLAGLAGQYHLERYPDSYESMSEPPIAHLLRPVLPRAFAFPVDPQVQSAADETAVQLSELLTLPVLMKRSITAPLAAHISLVNKAAVDYFFVELHLEAHYEALRHFLLMEDGEFAQSLSDLLFEKLGAGQTPGELLNPLVLNSVLSKALQCSLHGDTPHASNLSLALKYLPEVFAPNAPDVLSCLELRYKVDWPLNIVITEGCVSKYSGVFSFLLQLKLMMWALKDVCFHLKRTALLSHMAGSVQFRQLQLFKHEMQHFVKVIQGYIANQILHVTWCEFRARLATVGDLEEIQRAHAEYLHKAVFRGLLTEKAAPVMNVIHSIFSLVLKFRSQLISQAWGPPGGPRGAEHPNFALMQQSYNTFKYYSHFLFKVVTKLVNRGYQPHLEDFLLRINFNNYYQDA

SEQ ID NO: 45399 - protein, 256 aa, Homo sapiens [sequence omitted]

SEQ ID NO: 45400 - protein, 197 aa, Homo sapiens
MTGYVVTRWYRAPEVILNWMRYTQTVDIWSVGCIMAEMITGKTLFKGSDHLDQLKEIMKVTGTPPAEFVQRLQSDEAKNYMKGLPELEKKDFASILTNASPLAVNLLEKMLVLDAEQRVTAGEALAHPYFESLHDTEDEPQVQKYDDSFDDVDRTLDEWKREWGAPGTACVDPSGGLWAGPVWTCELGAPGRACVDP

SEQ ID NO: 45401 - protein, 1532 aa, Homo sapiens
MQDKELRAVFLRLFAQLLQGYRWCLHVVRIHPEPVIRFHKAAFLGQRGLVEDDFLMKVLEGMAFAGFVSERGVPYRPTDLFDELVAHEVARMRADENHPQRVLRHVQELAEQLYKNENPYPAVAMHKVQRPGESSHLRRVPRPFPRLDEGTVQWIVDQAAAKMQGAPPAVKAERRTTVPSGPPMTAILERCSGLHVNSARRLEVVRNCISYVFEGKMLEAKKLLPAVLRALKGRAARRCLAQELHLHVQQNRAVLDHQQFDFVVRMMNCCLQDCTSLDEHGIAAALLPLVTAFCRKLSPGVTQFAYSCVQEHVVWSTPQFWEAMFYGDVQTHIRALYLEPTEDLAPAQEVGEAPSQEDERSALDVASEQRRLWPTLSREKQQELVQKEESTVFSQAIHYANRMSYLLLPLDSSKSRLLRERAGLGDLESASNSLVTNSMAGSVAESYDTESGFEDAETCDVAGAVVRFINRFVDKVCTESGVTSDHLKGLHVMVPDIVQMHIETLEAVQRESRRLPPIQKPKLLRPRLLPGEECVLDGLRVYLLPDGREEGAGGSAGGPALLPAEGAVFLTTYRVIFTGMPTDPLVGEQVVVRSFPVAALTKEKRISVQTPVDQLLQDGLQLRSCTFQLLKMAFDEEVGSDSAELFRKQLHKLRYPPDIRATFAFTLGSAHTPGRPPRVTKDKGPSLRTLSRNLVKNAKKTIGRQHVTRKKYNPPSWEHRGQPPPEDQEDEISVSEELEPSTLTPSSALKPSDRMTMSSLVERACCRDYQRLGLGTLSSSLSRAKSEPFRISPVNRMYAICRSYPGLLIVPQSVQDNALQRVSRCYRQNRFPVVCWRSGRSKAVLLRSGGLHGKGVVGLFKAQNAPSPGQSQADSSSLEQEKYLQAVVSSMPRYADASGRNTLSGFSSAHMGSHVPSPRARVTTLSNPMAASASRRTAPRGKWGSVRTSGRSSGLGTDVGSRLAGRDALAPPQANGGPPDPGFLRPQRAALYILGDKAQLKGVRSDPLQQWELVPIEVFEARQVKASFKKLLKACVPGCPAAEPSPASFLRSLEDSEWLIQIHKLLQVSVLVVELLDSGSSVLVGLEDGWDITTQVVSLVQLLSDPFYRTLEGFRLLVEKEWLSFGHRFSHRGAHTLAGQSSGFTPVFLQFLDCVHQVHLQFPMEFEFSQFYLKFLGYHHVSRRFRTFLLDSDYERIELGLLYEEKGERRGQVPCRSVWEYVDRLSKRTPVFHNYMYAPEDAEVLRPYSNVSNLKVWDFYTEETLAEGPPYDWELAQGPPEPPEEERSDGGAPQSRRRVVWPCYDSCPRAQPDAISRLLEELQRLETELGQPAERWKDTWDRVKAAQRLEGRPDGRGTPSSLLVSTAPHHRRSLGVYLQEGPVGSTLSLSLDSDQSSGSTTSGSRQAARRSTSTLYSQFQTAESENRSYEGTLYKKGAFMKPWKARWFVLDKTKHQLRYYDHRVDTECKGVIDLAEVEAVAPGTPTMGAPKTVDEKAFFDVKTTRRVYNFCAQDVPSAQQWVDRIQSCLSDA

SEQ ID NO: 45402 - protein, 90 aa, Homo sapiens
MARYVQDFHPRLLGLTGSTKQVAQASHSYRVYYNAGPKDEDQDYIVDHSIAIYLLNPDGLFTDYYGRSRSAEQISDSVRRHMAAFRSVLS

SEQ ID NO: 45403 - protein, 478 aa, Homo sapiens
MTPGTGAPPAPGDFSGEGSQGLPDPSPEPKQLPELIRMKRDGGRLSEADIRGFVAAVVNGSAQGAQIGAMLMAIRLRGMDLEETSVLTQALAQSGQQLEWPEAWRQQLVDKHSTGGVGDKVSLVLAPALAACGCKVPMISGRGLGHTGGTLDKLESIPGFNVIQSPEQMQVLLDQAGCCIVGQSEQLVPADGILYAARDVTATVDSLPLITASILSKKLVEGLSALVVDVKFGGAAVFPNQEQARELAKTLVGVGASLGLRVAAALTAMDKPLGRCVGHALEVEEALLCMDGAGPPDLRDLVTTLGGALLWLSGHAGTQAQGAARVAAALDDGSALGRFERMLAAQGVDPGLARALCSGSPAERRQLLPRAREQEELLAPADGTVELVRALPLALVLHELGAGRSRAGEPLRLGVGAELLVDVGQRLRRGTPWLRVHRDGPALSGPQSRALQEALVLSDRAPFAAPSPFAELVLPPQQ

SEQ ID NO: 45404 - protein, 135 aa, Homo sapiens [sequence omitted]

SEQ ID NO: 45405 - protein, 144 aa, Homo sapiens [sequence omitted]

SEQ ID NO: 45406 - protein, 1157 aa, Homo sapiens [sequence omitted]

SEQ ID NO: 45407 - protein, 202 aa, Homo sapiens [sequence omitted]

SEQ ID NO: 45408 - protein, 28 aa, Homo sapiens
MEYCGSSSGWGPAWASTSAFRSASASSV

SEQ ID NO: 45409 - protein, 312 aa, Homo sapiens
MKHLSIADLVVAVFQVLPQLLWDITFRFYGPDLLCRLVKYLQVVGMFASTYLLLLMSLDRCLAICQPLRSLRRRTDRLAVLATWLGCLVASAPQVHIFSLREVADGVFDCWAVFIQPWGPKAYITWITLAVYIVPVIVLAACYGLISFKIWQNLRLKTAAAAAAEAPEGAAAGDGGRVALARVSSVKLISKAKIRTVKMTFIIVLAFIVCWTPFFFVQMWSVWDANAPKEASAFIIVMLLASLNSCCNPWIYMLFTGHLFHELVQRFLCCSASYLKGRRLGETSASKKSNSSSFVLSHRSSSQRSCSQPSTA

SEQ ID NO: 45410 - protein, 308 aa, Homo sapiens
MENEIAVLHKIKHPNIVALDDIYESGGHLYLIMQLVSGGELFDRIVEKGFYTERDASRLIFQVLDAVKYLHDLGIVHRDLKPENLLYYSLDEDSKIMISDFGLSKMEDPGSVLSTACGTPGYVAPEVLAQKPYSKAVDCWSIGVIAYILLCGYPPFYDENDAKLFEQILKAEYEFDSPYWDDISDSAKDFIRHLMEKDPEKRFTCEQALQHPWIAGDTALDKNIHQSVSEQIKKNFAKSKWKQAFNATAVVRHMRKLQLGTSQEGQGQTASHGELLTPVAGGPAAGCCCRDCCVEPGTELSPTLPHQL

SEQ ID NO: 45411 - protein, 500 aa, Homo sapiens
MVQNEIPYFIWTTRRDVLDCRFLSKDQMINHYARAGSFTTKVGLCLNLRNLPWFDEVDANSFFPRCYCLGAEDDKKAFIEDFWLTAARNVLKLVVKSEWKSYPIQAVEEEASGDKQPKKQEKNPVLVSPEFVDEALCACEEYLSNLAHMDIDKDLEAPLYLTPEGWSLFLQRYYQVVHEGAELRHLDTQVQRCEDILQQLQAVVPQIDMEGDRNIWIVKPGAKSRGRGIMCMDHLEEMLKLVNGNPVVMKDGKWVVQKYIERPLLIFGTKFDLRQWFLVTDWNPLTVWFYRDSYIRFSTQPFSLKNLDNSVHLCNNSIQKHLENSCHRHPLLPPDNMWSSQRFQAHLQEMGAPNAWSTIIVPGMKDAVIHALQTSQDTVQCRKASFELYGADFVFGEDFQPWLIEINASPTMAPSTAVTARLCAGVQADTLRVVIDRMLDRNCDTGAFELIYKQPVTTSPASTPRPSCLLPMYSDTRARSSDDSTASWWALRPCRPQARP

SEQ ID NO: 45412 - protein, 551 aa, Homo sapiens
MPAPAQRKLLPRRHLSEKSHHISIPSPDISHKGLRSKRTQPSDPETWESLPRLDSQRHGGPEFSFDLLPEARAIRVTISSGPEVSVRLCHQWALECEELSSPYDVQKIVSGGHTVELPYEFLLPCLCIEASYLQEDTVRRKKCPFQSWPEAYGSDFWKSVHFTDYSQHTQMVMALTLRCPLKLEAALCQRHDWHTLCKDLPNATARESDGWYVLEKVDLHPQLCFKFSFGNSSHVECPHQTGSLTSWNVSMDTQAQQLILHFSSRMHATFSAAWSLPGLGQDTLVPPVYTVSQARGSSPVSLDLIIPFLRPGCCVLVWRSDVQFAWKHLLCPDVSYRHLGLLILALLALLTLLGVVLALTCRRPQSGPGPARPVLLLHAADSEAQRRLVGALAELLRAALGGGRDVIVDLWEGRHVARVGPLPWLWAARTRVAREQGTVLLLWSGADLRPVSGPDPRAAPLLALLHAAPRPLLLLAYFSRLCAKGDIPPPLRALPRYRLLRDLPRLLRALDARPFAEATSWGRLGARQRRQSRLELCSRLEREAARLADLG

SEQ ID NO: 45413 - protein, 546 aa, Homo sapiens
MAYPTARCVLLEVQVPAALVQFGQSVGSVVYDCFEAALGSEVRIWSYTQPRYEKELNHTQQLPALPWLNVSADGDNVHLVLNVSEEQHFGLSLYWNQVQGPPKPRWHKNLTGPQIITLNHTDLVPCLCIQVWPLEPDSVRTNICPFREDPRAHQNLWQAARLQLLTLQSWLLDAPCSLPAEAALCWRAPGGDPCQPLVPPLSWENVTVDVNSSEKLQLQECLWADSLGPLKDDVLLLETRGPQDNRSLCALEPSGCTSLPSKASTRAARLGEYLLQDLQSGQCLQLWDDDLGALWACPMDKYIHKRWALVWLACLLFAAALSLILLLKKDHAKAAARGRAALLLYSADDSGFERLVGALASALCQLPLRVAVDLWSRRELSAQGPVAWFHAQRRQTLQEGGVVVLLFSPGAVALCSEWLQDGVSGPGAHGPHDAFRASLSCVLPDFLQGRAPGSYVGACFDRLLHPDAVPALFRTVPVFTLPSQLPDFLGALQQPRAPRSGRLQERAEQVSRALQPALDSYFHPPGTPAPGRGVGPGAGPGAGDGT

SEQ ID NO: 45414 - protein, 10 aa, Homo sapiens
MVTLLGCQLA

SEQ ID NO: 45415 - protein, 497 aa, Homo sapiens
MVLVSLLKHYSDFFQGQRTKITIGVYDPCNLAQYPGWPLRNFLVLAAHRWSSSFQSVEVVCFRDRTMQGARDVAHSIIFEVKLPEMAFSPDCPKAVGWEKNQKGGMGPRMVNLSECMDPKRLAESSVDLNLKLMCWRLVPTLDLDKVVSVKCLLLGAGTLGCNVARTLMGWGVRHITFVDNAKISYSNPVRQPLYEFEDCLGGGKPKALAAADRLQKIFPGVNARGFNMSIPMPGHPVNFSSVTLEQARRDVEQLEQLIESHDVVFLLMDTRESRWLPAVIAASKRKLVINAALGFDTFVVMRHGLKKPKQQGAGDLCPNHPVASADLLGSSLFANIPGYKLGCYFCNDVVAPGDSTRDRTLDQQCTVSRPGLAVIAGALAVELMVSVLQHPEGGYAIASSSDDRMNEPPTSLGLVPHQIRGFLSRFDNVLPVSLAFDKCTACSSKVLDQYEREGFNFLAKVFNSSHSFLEDLTGLTLLHQETQAAEIWDMSDDETI

SEQ ID NO: 45416 - protein, 79 aa, Homo sapiens
MFCFFQVKIISVNEDVTLRSALDRNLKSAVTAAFLMLPESFSEEDLFIEIAGLSYSDEKTEAQNGSLSKVTHLVHGGLV

SEQ ID NO: 45417 - protein, 259 aa, Homo sapiens
MPFWPTNFGISSVDLSVMEDHSHSFDIKPFTTVDFSSISTPHYEDIPFTRTDPVVADYKYDLKLQEYQSAIKVEPASPPYYSEKTQLYNKPHEEPSNSLMAIECRVCGDKASGFHYGVHACEGCKGFFRRTIRLKLIYDRCDLNCRIHKKSRNKCQYCRFQKCLAVGMSHNAIRFGRMPQAEKEKLLAEISSDIDQLNPESADLRALAKHLYDSYIKSFPLTKAKARAILTGKTTDKSVSSLLLSSLGEAGSCFGFLFL

SEQ ID NO: 45418 - protein, 470 aa, Homo sapiens
MPFWPTNFGISSVDLSVMEDHSHSFDIKPFTTVDFSSISTPHYEDIPFTRTDPVVADYKYDLKLQEYQSAIKVEPASPPYYSEKTQLYNKPHEEPSNSLMAIECRVCGDKASGFHYGVHACEGCKGFFRRTIRLKLIYDRCDLNCRIHKKSRNKCQYCRFQKCLAVGMSHNAIRFGRMPQAEKEKLLAEISSDIDQLNPESADLRALAKHLYDSYIKSFPLTKAKARAILTGKTTDKSPFVIYDMNSLMMGEDKIKFKHITPLQEQSKEVAIRIFQGCQFRSVEAVQEITEYAKSIPGFVNLDLNDQVTLLKYGVHEIIYTMLASLMNKDGVLISEGQGFMTREFLKSLRKPFGDFMEPKFEFAVKFNALELDDSDLAIFIAVIILSGDRPGLLNVKPIEDIQDNLLQALELQLKLNHPESSQLFAKLLQKMTDLRQIVTEHVQLLQVIKKTETDMSLHPLLQEIYKDLY

SEQ ID NO: 45419 - protein, 201 aa, Homo sapiens
MPAVRASSAAPSAAPCGTSRKPGSIISSPHMRRRATSTRECPSRPHQTMPNSSSLLGSLFGSKRGKPPPQAHLPSAPALPPPHPPVVLPHLQHSVAGHHLGPPEGLPQAAMHGHHTQYCHMQNPPPYHHHHHHHPPQHIQHAHQYHHGPHGGHPAYGAHAHGHPPLPSAHVGHTVHHHGQPPAPPPPTSSKAKPSGISTIV

SEQ ID NO: 45420 - protein, 551 aa, Homo sapiens
MSSVSSVLDEKDDDRIRCCTHCKDTLLKREQQIDEKEHTPDIVKLYEKLRLCMEKVDQKAPEYIRMAASLNAGETTYSLEHASDLRVEVQKVYELIDALSKKILTLGLNQDPPPHPSNLRLQRMIRYSATLFVQEKLLGLMSLPTKEQFEELKKKRKEEMERKRAVERQAALESQRRLEERQSGLASRAANGEVASLRRGPAPLRKAEGWLPLSGGQGQSEDSDPLLQQIHNITSFIRQAKAAGRMDEVRTLQENLRQLQDEYDQQQTEKAIELSRRQAEEEDLQREQLQMLRERELEREREQFRVASLHTRTRSLDFREIGPFQLEPSREPRTHLAYALDLGSSPVPSSTAPKTPSLSSTQPTRVWSGPPAVGQERLPQSSMPQQHEGPSLNPFDEEDLSSPMEEATTGPPAAGVSLDPSARILKEYNPFEEEDEEEEAVAGNPFIQPDSPAPNPFSEEDEHPQQRLSSPLVPGNPFEEPTCINPFEMDSDSGPEAEEPIEEELLLQQIDNIKAYIFDAKQCGRLDEVEVLTENLRELKHTLAKQKGGTD

SEQ ID NO: 45421 - protein, 179 aa, Homo sapiens
MAHAHIQGGRRAKSRFVVCIMSGARSKLALFLCGCYVVALGAHTGEESVADHHEAEYYVAAVYEHPSILSLNPLALISRQEALELMNQNLDIYEQQVMTAAQKDVQIIVFPEDGIHGFNFTRTSIYPFLDFMPSPQVVRWNPCLEPHRFNDTEVIPAFFLSRLRVHRGDLSQGPEAVTC

SEQ ID NO: 45422 - protein, 687 aa, Homo sapiens
MSRVCIVVLEEVEDESPAFISKLPQENKSLHSPPSGNVLVRYPSLVQAIFNGDPDEVRALIFKKEDVNFQDNEKRTPLHAAAYLGDAEIIELLILSGARVNAKDSKWLTPLHRAVASCSEEAVQVLLKHSADVNARDKNWQTPLHIAAANKAVKCAEALVPLLSNVNVSDRAGRTALHHAAFSGHGEMVKLLLSRGANINAFDKKDRRAIHWAAYMGHIEVVKLLVSHGAEVTCKDKKSYTPLHAAASSGMISVVKYLLDLGVDMNEPNAYGNTPLHVACYNGQDVVVNELIDCGAIVNQKNEKGFTPLHFAAASTHGALCLELLVGNGADVNMKSKDGKTPLHMTALHGRFSRSQTIIQSGAVIDCEDKNGNTPLHIAARYGHELLINTLITSGADTAKRGIHGMFPLHLAALSGFSDCCRKLLSSGFDIDTPDDFGRTCLHAAAAGGNLECLNLLLNTGADFNKKDKFGRSPLHYAAANCNYQCLFALVGSGASVNDLDERGCTPLHYAATSDTDGKCLEYLLRNDANPGIRDKQGYNAVHYSAAYGHRLCLQLIASETPLDVLMETSGTDMLSDSDNRATISPLHLAAYHGHHQALEVLVQSLLDLDVRNSSGRTPLDLAAFKGHVECVDVLINQGASILVKDYILKRTPIHAAATNGHSECLRLLIGNAEPQNAVDIQDGNGQ

SEQ ID NO: 45423 - protein, 32 aa, Homo sapiens
MESLFFSQGENRGKGREAIQFEVPVNGLSEGN

SEQ ID NO: 45424 - protein, 618 aa, Homo sapiens
MLGCVLMMVAMLHPPHHTLHQTVTAQASKHSPEARYRLDFGESQDWVLEAEDEGEEYSPLEGLPPFISLREDQLLVAVALPQARRNQSQGRRGGSYRLIKQPRRQDKEAPKRDWGADEDGEVSEEEELTPFSLDPRGLQEALSARIPLQRALPEVRHPLCLQQHPQDSLPTASVILCFHDEAWSTLLRTVHSILDTVPRAFLKEIILVDDLSQQGQLKSALSEYVARLEGVKLLRSNKRLGAIRARMLGATRATGDVLVFMDAHCECHPGWLEPLLSRIAGDRSRVVSPVIDVIDWKTFQYYPSKDLQRGVLDWKLDFHWEPLPEHVRKALQSPISPIRSPVVPGEVVAMDRHYFQNTGAYDSLMSLRGGENLELSFKAWLCGGSVEILPCSRVGHIYQNQDSHSPLDQEATLRNRVRIAETWLGSFKETFYKHSPEAFSLSKAEKPDCMERLQLQRRLGCRTFHWFLANVYPELYPSEPRPSFSGKLHNTGLGLCADCQAEGDILGCPMVLAPCSDSRQQQYLQHTSRKEIHFGSPQHLCFAVRQEQVILQNCTEEGLAIHQQHWDFQENGMIVHILSGKCMEAVVQENNKDLYLRPCDGKARQQWRFDQINAVDER

SEQ ID NO: 45425 - protein, 634 aa, Homo sapiens [sequence omitted]

SEQ ID NO: 45426 - protein, 656 aa, Homo sapiens
MIEQDVKRTFPEMQFFQQENVRKILTDVLFCYARENEQLLYKQGMHELLAPIVFVLHCDHQAFLHASESAQPSEEMKTVLNPEYLEHDAYAVFSQLMETAEPWFSTFEHDGQKGKETLMTPIPFARPQDLGPTIAIVTKVNQIQDHLLKKHDIELYMHLNRLEIAPQIYGLRWVRLLFGREFPLQDLLVVWDALFADGLSLGLVDYIFVAMLLYIRDALISSNYQTCLGLLMHYPFIGDVHSLILKALFLRDPKRNPRPVTYQFHPNLDYYKARGADLMNKSRTNAKGAPLNINKVSNSLINFGRKLISPAMAPGSAGGPVPGGNSSSSSSVVIPTRTSAEAPSHHLQQQQQQQRLMKSESMPVQLNKGDVVTGSDAQVSVPVQTLTDLQGLSSKNISSSPSVESLPGGREFTGSPPSSATKKDSFFSNISRSRSHSKTMGRKESEEELEAQISFLQGQLNDLDAMCKYCAKVMDTHLVNIQDVILQENLEKEDQILVSLAGLKQIKDILKGSLRFNQSQLEAEENEQITIADNHYCSSGQGQGRGQGQSVQMSGAIKQASSETPGCTDRGNSDDFILISKDDDGSSARGSFSGQAQPLRTLRSTSGKSQAPVCSPLVFSDPLMGPASASSSNPSSSPDDDSSKDSGFTIVSPLDI

SEQ ID NO: 45427 - protein, 64 aa, Homo sapiens
MASRGATRPNGPNTGNKICQFKLVLLGESAVGKSSLVLRFVKGQFHEFQESTIGGEIFFFPCFI

SEQ ID NO: 45428 - protein, 156 aa, Homo sapiens
MSKNSKLLSTSAKRIQKELADITLDPPPNCSAGPKGDNIYEWRSTILGPPGSVYEGGVFFLDITFTPEYPFKPPKVTFRTRIYHCNINSQGVICLDILKDNWSPALTISKVLLSICSLLTDCNPADPLVGSIATQYMTNRAEHDRMARQWTKRYAT

SEQ ID NO: 45429 - protein, 26 aa, Homo sapiens
MSKNSKLLSTSAKRFGLIVQLLRRPD

SEQ ID NO: 45430 - protein, 160 aa, Homo sapiens
MEDCETMEDVYMASVETDRGVKEQLHLYDTRGLQEGVELPKHYFSFADGFVLVYSVNNLESFQRVELLKKEIDKFKDKKEVAIVVLGNKIDLSEQRQVDAEVAQQWAKSEKVRLWEVTVTDRKTLIEPFTLLASKLSQPQSKSSFPLPGRKNKGNSNSEN

SEQ ID NO: 45431 - protein, 504 aa, Homo sapiens
MKTSKSSAPGMTKSHSGVTKFSGMVLLCKVCGDVASGFHYGVHACEGCKGFFRRSIQQNIQYKKCLKNENCSIMRMNRNRCQQCRFKKCLSVGMSRDAVRFGRIPKREKQRMLIEMQSAMKTMMNSQFSGHLQNDTLVEHHEQTALPAQEQLRPKPQLEQENIKSSSPPSSDFAKEEVIGMVTRAHKDTFMYNQEQQENSAESMQPQRGERIPKNMEQYNLNHDHCGNGLSSHFPCSESQQHLNGQFKGRNIMHYPNGHAICIANGHCMNFSNAYTQRVCDRVPIDGFSQNENKNSYLCNTGGRMHLVCPMSKSPYVDPHKSGHEIWEEFSMSFTPAVKEVVEFAKRIPGFRDLSQHDQVNLLKAGTFEVLMVRFASLFDAKERTVTFLSGKKYSVDDLHSMGAGDLLNSMFEFSEKLNALQLSDEEMSLFTAVVLVSADRSGIENVNSVEALQETLIRALRTLIMKNHPNEASIFTKLLLKLPDLRSLNNMHSEELLAFKVHP

SEQ ID NO: 45432 - protein, 170 aa, Homo sapiens
MFCELPCEDQIILLKGCCMEIMSLRAAVRYDPESETLTLNGEMAVTRGQLKNGGLGVVSDAIFDLGMSLSSFNLDDTEVALLQAVLLMSSDRPGLACVERIEKYQDSFLLAFEHYINYRKHHVTHFWPKLLMKVTDLRMIGACHASRFLHMKVECPTELFPPLFLEVFED

SEQ ID NO: 45433 - protein, 422 aa, Homo sapiens [sequence omitted]

SEQ ID NO: 45434 - protein, 1086 aa, Homo sapiens
MRPLLTRGPDEEAVVDLGKTSSTVNTKFEKEELESHRAVYIGVHVPFSKESRRRHRHRGHKHHHRRRKDKESDKEDGRESPSYDTPSQRVQFILGTEDDDEEHIPHDLFTEMDELCYRDGEEYEWKETARWLKFEEDVEDGGDRWSKPYVATLSLHSLFELRSCILNGTVMLDMRASTLDEIADMVLDNMIASGQLDESIRENVREALLKRHHHQNEKRFTSRIPLVRSFADIGKKHSDPHLLERNGILASPQSAPGNLDNSKSGEIKGNGSGGSRENSTVDFSKVDMNFMRKIPTGAEASNVLVGEVDFLERPIIAFVRLAPAVLLTGLTEVPVPTRFLFLLLGPAGKAPQYHEIGRSIATLMTDEIFHDVAYKAKDRNDLLSGIDEFLDQVTVLPPGEWDPSIRIEPPKSVPSQEKRKIPVFHNGSTPTLGETPKEAAHHAGPELQRTGRLFGGLILDIKRKAPFFLSDFKDALSLQCLASILFLYCACMSPVITFGGLLGEATEGRISAIESLFGASLTGIAYSLFAGQPLTILGSTGPVLVFEKILYKFCRDYQLSYLSLRTSIGLWTSFLCIVLVATDASSLVCYITRFTEEAFAALICIIFIYEALEKLFDLGETYAFNMHNNLDKLTSYSCVCTEPPNPSNETLAQWKKDNITAHNISWRNLTVSECKKLRGVFLGSACGHHGPYIPDVLFWCVILFFTTFFLSSFLKQFKTKRYFPTKVRSTISDFAVFLTIVIMVTIDYLVGVPSPKLHVPEKFEPTHPERGWIISPLGDNPWWTLLIAAIPALLCTILIFMDQQITAVIINRKEHKLKKGAGYHLDLLMVGVMLGVCSVMGLPWFVAATVLSISHVNSLKVESECSAPGEQPKFLGIREQRVTGLMIFILMGLSVFMTSVLKFIPMPVLYGVFLYMGVSSLKGIQLFDRIKLFGMPAKHQPDLIYLRYVPLWKVHIFTVIQLTCLVLLWVIKVSAAAVVFPMMVLALVFVRKLMDLCFTKRELSWLDDLMPESKKKKEDDKKKKEKEEAERMLQDDDDTVHLPFEGGSLLQIPVKALKYSPDKPVSVKISFEDEPRKKYVDAETSL

SEQ ID NO: 45435 - protein, 280 aa, Homo sapiens
MNKDNSESLKVLNEQLQSKEVELLQLRTEVETQQVMRNLNPPSSNWEVEKLSCDLKIHGLEQELELMRKECSDLKIELQKAKQTDPYQEDNLKSRDLQKLSISSDNMQHAYWELKREMSNLHLVTQVQAELLRKLKTSTAIKKACAPVGCSEDLGRDSTKLHLMNFTATYTRHPPLLPNGKALCHTTSSPLPGDVKVLSEKAILQSWTDNERSIPNDGTCFQEHSSYGRNSLEDNSWVFPSPPKSSETAFGETKTKTLPLPNLPPLHYLDQHNQNCLYKN

SEQ ID NO: 45436 - protein, 131 aa, Homo sapiens
MNKDNSESLKVLNEQLQSKEVELLQLRTEVETQQVMRNLNPPSSNWEVEKLSCDLKIHGLEQELELMRKECSDLKIELQKAKQTDPYQEDNLKSRDLQKLSISRQSICSTAWSAVAQSWDSMNFEDCSLFA

SEQ ID NO: 45437 - protein, 500 aa, Homo sapiens
MSNCSITSICEKPQEVCVAVWRKNDENITLETVCHDPKLPYHDFILEDAASPKCIMKEKKKPGETFFMCSCSSDECNDNIIFSEEYNTSNPDLLLVIFQVTGISLLPPLGVAISVIIIFYCYRVNRQQKLSSTWETGKTRKLMEFSEHCAIILEDDRSDISSTCANNINHNTELLPIELDTLVGKGRFAEVYKAKLKQNTSEQFETVAVKIFPYEEYASWKTEKDIFSDINLKHENILQFLTAEERKTELGKQYWLITAFHAKGNLQEYLTRHVISWEDLRKLGSSLARGIAHLHSDHTPCGRPKMPIVHRDLKSSNILVKNDLTCCLCDFGLSLRLDPTLSVDDLANSGQVGTARYMAPEVLESRMNLENVESFKQTDVYSMALVLWEMTSRCNAVGEVKDYEPPFGSKVREHPCVESMKDNVLRDRGRPEIPSFWLNHQGIQMVCETLTECWDHDPEARLTAQCVAERFSELEHLDRLSGRSCSEEKIPEDGSLNTTK

SEQ ID NO: 45438 - protein, 113 aa, Homo sapiens
MFKLRAADAKEKQFWVTQLRACAKYHMEMNSKSAPSSRSRSLTLLPHGTPNSASPCSQRHLSVGAPGVVTITHHKSPAAARRAKSQYSGQLHEVREVHTLLTEESCLLHWFTG

SEQ ID NO: 45439 - protein, 164 aa, Homo sapiens
MDLEECILITDSTLIQLSIHCPKLQALVSLSFSDIIHLLKMKEPSHHNKKLFGFSFCKSLSHCELITDDGILHLSNSTCGHERLRVLELDNCLLITDVALEHLENCRGLERLELYDCQQVTRAGIKRMRAQLPHVKVHAYFAPVTPPTAVAGSGQRLCRCCVIL

SEQ ID NO: 45440 - protein, 534 aa, Homo sapiens
MDEVIESGLVHDFDASLSGIGQELGAGAYSMSDVLALPIFKQEDSSLPLDGETEHPPFQYVMCAATSPAVKLHDETLTYLNQGQSYEIRMLDNRKMGDMPEINGKLVKSIIRVVFHDRRLQYTEHQQLEGWKWNRPGDRLLDLDIPMSVGIIDTRTNPSQLNAVEFLWDPAKRTSAFIQVHCISTEFTPRKHGGEKGVPFRIQVDTFKQNENGEYTDHLHSASCQIKVFKPKGADRKQKTDREKMEKRTAHEKEKYQPSYDTTILTEMRLEPIIEDAVEHEQKKSSKRTLPADYGDSLAKRGSCSPWPDAPTAYVNNSPSPAPTFTSPQQSTCSVPDSNSSSPNHQGDGASQTSGEQIQPSATIQETQQWLLKNRFSSYTRLFSNFSGADLLKLTKEDLVQICGAADGIRLYNSLKSRSVRPRLTIYVCREQPSSTVLQGQQQAASSASENGSGAPYVYHAIYLEEMIASEVARKLALVFNIPLHQINQVYRQGPTGIHILVSDQMVQNFQDESCFLFSTVKAESSDGIHIILK

SEQ ID NO: 45441 - protein, 498 aa, Homo sapiens
MDEVIESGLVHDFDASLSGIGQELGAGAYSMSDVLALPIFKQEDSSLPLDGETEHPPFQYVMCAATSPAVKLHDETLTYLNQGQSYEIRMLDNRKMGDMPEINGKLVKSIIRVVFHDRRLQYTEHQQLEGWKWNRPGDRLLDLDIPMSVGIIDTRTNPSQLNAVEFLWDPAKRTSAFIQVHCISTEFTPRKHGGEKGVPFRIQVDTFKQNENGEYTDHLHSASCQIKVFKPKGADRKQKTDREKMEKRTAHEKEKYQPSYDTTILTECSPWPDAPTAYVNNSPSPAPTFTSPQQSTCSVPDSNSSSPNHQGDGASQTSGEQIQPSATIQETQQWLLKNRFSSYTRLFSNFSGADLLKLTKEDLVQICGAADGIRLYNSLKSRSVRPRLTIYVCREQPSSTVLQGQQQAASSASENGSGAPYVYHAIYLEEMIASEVARKLALVFNIPLHQINQVYRQGPTGIHILVSDQMVQNFQDESCFLFSTVKAESSDGIHIILK

SEQ ID NO: 45442 - protein, 1445 aa, Homo sapiens
MGLEILSAFVDRLSTRFKSYVAMVIVALIDRMGDAKDKVRDEAQTLILKLMDQVAPPMYIWEQLASGFKHKNFRSREGVCLCLIETLNIFGAQPLVISKLIPHLCILFGDSNSQVRDAAILAIVEIYRHVGEKVRMDLYKRGIPPARLEMIFAKFDEVQSSGGMILSVCKDKSFDDEESVDGNRPSSAASAFKVPAPKTSGNPANSARKPGSAGGPKVGGASKEGGAGAVDEDDFIKAFTDVPSIQIYSSRELEETLNKIREILSDDKHDWDQRANALKKIRSLLVAGAAQYDCFFQHLRLLDGALKLSAKDLRSQVVREACITVAHLSTVLGNKFDHGAEAIVPTLFNLVPNSAKVMATSGCAAIRFIIRHTHVPRLIPLITSNCTSKSVPVRRRSFEFLDLLLQEWQTHSLERHAAVLVETIKKGIHDADAEARVEARKTYMGLRNHFPGEAETLYNSLEPSYQKSLQTYLKSSGSVASLPQSDRSSSSSQESLNRPFSSKWSTANPSTVAGRVSAGSSKASSLPGSLQRSRSDIDVNAAAGAKAHHAAGQSVRSGRLGAGALNAGSYASLEDTSDKLDGTASEDGRVRAKLSAPLAGMGNAKADSRGRSRTKMVSQSQPGSRSGSPGRVLTTTALSTVSSGVQRVLVNSASAQKRSKIPRSQGCSREASPSRLSVARSSRIPRPSVSQGCSREASRESSRDTSPVRSFQPLGPGYGISQSSRLSSSVSAMRVLNTGSDVEEAVADALLLGDIRTKKKPARRRYESYGMHSDDDANSDASSACSERSYSSRNGSIPTYMRQTEDVAEVLNRCASSNWSERKEGLLGLQNLLKNQRTLSRVELKRLCEIFTRMFADPHGKVFSMFLETLVDFIQVHKDDLQDWLFVLLTQLLKKMGADLLGSVQAKVQKALDVTRESFPNDLQFNILMRFTVDQTQTPSLKVKVAILKYIETLAKQMDPGDFINSSETRLAVSRVITWTTEPKSSDVRKAAQSVLISLFELNTPEFTMLLGALPKTFQDGATKLLHNHLRNTGNGTQSSMGSPLTRPTPRSPANWSSPLTSPTNTSQNTLSPSAFDYDTENMNSEDIYSSLRGVTEAIQNFSFRSQEDMNEPLKRDSKKDDGDSMCGGPGMSDPRAGGDATDSSQTALDNKASLLHSMPTHSSPRSRDYNPYNYSDSISPFNKSALKEAMFDDDADQFPDDLSLDHSDLVAELLKELSNHNERVEERKIALYELMKLTQEESFSVWDEHFKTILLLLLETLGDKEPTIRALALKVLREILRHQPARFKNYAELTVMKTLEAHKDPHKEVVRSAEEAASVLATSISPEQCIKVLCPIIQTADYPINLAAIKMQTKVIERVSKETLNLLLPEIMPGLIQGYDNSESSVRKACVFCLVAVHAVIGDELKPHLSQLTGSKMKLLNLYIKRAQTGSGGADPTTDVSGQS

SEQ ID NO: 45443 - protein, 1081 aa, Homo sapiens
MATSGCAAIRFIIRHTHVPRLIPLITSNCTSKSVPVRRRSFEFLDLLLQEWQTHSLERHAAVLVETIKKGIHDADAEARVEARKTYMGLRNHFPGEAETLYNSLEPSYQKSLQTYLKSSGSVASLPQSDRSSSSSQESLNRPFSSKWSTANPSTVAGRVSAGSSKASSLPGSLQRSRSDIDVNAAAGAKAHHAAGQSVRSGRLGAGALNAGSYASLEDTSDKLDGTASEDGRVRAKLSAPLAGMGNAKADSRGRSRTKMVSQSQPGSRSGSPGRVLTTTALSTVSSGVQRVLVNSASAQKRSKIPRSQGCSREASPSRLSVARSSRIPRPSVSQGCSREASRESSRDTSPVRSFQPLGPGYGISQSSRLSSSVSAMRVLNTGSDVEEAVADALKKPARRRYESYGMHSDDDANSDASSACSERSYSSRNGSIPTYMRQTEDVAEVLNRCASSNWSERKEGLLGLQNLLKNQRTLSRVELKRLCEIFTRMFADPHGKRVFSMFLETLVDFIQVHKDDLQDWLFVLLTQLLKKMGADLLGSVQAKVQKALDVTRESFPNDLQFNILMRFTVDQTQTPSLKVKVAILKYIETLAKQMDPGDFINSSETRLAVSRVITWTTEPKSSDVRKAAQSVLISLFELNTPEFTMLLGALPKTFQDGATKLLHNHLRNTGNGTQSSMGSPLTRPTPRSPANWSSPLTSPTNTSQNTLSPSAFDYDTENMNSEDIYSSLRGVTEAIQNFSFRSQEDMNEPLKRDSKKDDGDSMCGGPGMSDPRAGGDATDSSQTALDNKASLLHSMPTHSSPRSRDYNPYNYSDSISPFNKSALKEAMFDDDADQFPDDLSLDHSDLVAELLKELSNHNERVEERKIALYELMKLTQEESFSVWDEHFKTILLLLLETLGDKEPTIRALALKVLREILRHQPARFKNYAELTVMKTLEAHKDPHKEVVRSAEEAASVLATSISPEQCIKVLCPIIQTADYPINLAAIKMQTKVIERVSKETLNLLLPEIMPGLIQGYDNSESSVRKACVFCLVAVHAVIGDELKPHLSQLTGSKMKLLNLYIKRAQTGSGGADPTTDVSGQS

SEQ ID NO: 45444 - protein, 2961 aa, Homo sapiens
MDLTAYAELLKESGNQVLKNGNFSLAIRKYDEAIQILLQLYQWGVPPRDLAVLLCNKSNAFFSLGKWNEAFVAAKECLQWDPTYVKGYYRAGYSLLRLHQPYEAARMFFEGLRLVQRSQDQAPVADFLVGVFTTMSSDSIVLQSFLPCFDHIFTTGFPTEVWQSVIEKLAKKGLWHSFLLLSAKKDRLPRNIHVPELSLKSLFEKYVFIGLYEKMEQVPKLVQWLISIGASVETIGPYPLHALMRLCIQARENHLFRWLMDHKPEWKGRINQKDGDGCTVLHVVAAHSPGYLVKRQTEDVQMLLRFGADPTLLDRQSRSVVDVLKRNKNFKAIEKINSHLEKLATCSKDLSGFSNGDGPTSENDIFRKVLEQLVKYMNSGNRLLHKNFLKQEVVQRFLRLLSTLQEIPPDLVCDINQDCATTVFKFLLEKQRWPEVLLLLTRKVSGEPPLGDCLIKDCNFSDLDICTIIPHLSTWDQRKKQLLGCLIDSGALPDGLQESQERPVVTCLKHEDFELAFLLLTKGADPRAISLTEGDTPLHAALHIFLEIKADIGFSFLSHLLDLFWSNPTEFDYLNPNVQDSNGNTLMHILFQKGMLKRVKKLLDLLVKFDINFNLKNKEGKDARHRIKKNDSLLLAWNKALMENRRRSRQDSAAHLGKLSKSTAPGHTSQLKSQGSFKSVPCGATARTLPEGSAVPDSWETLPGTQVTRKEPGALRPCSLRDCLMQDITVLIQQVEVDPSFPEDCLQSSEPLEAGAGKEGKKDDKPTLGAGAPDCSEVGEGHAQVGLGALQLVPDDNRGKEGNDDQDDWSTQEIEACLQDFDNMTWEIECTSEMLKKLSSKVMTKVIKKKIILAIQQLGNGEWTQGLQKRLKHLKGSIQLFEAKLDKGARMLWELAIDFSPRCSENPEKIIATEQNTCAMEKSGRIYTEIIRIWDIVLDHCKLADSIKAICNAYNRGLSCVLRKKLKGINKGQVSANMKIQKRIPRCYVEDTEAEKGREHVNPEYFPPASAVETEYNIMKFHSFSTNMAFNILNDTTATVEYPFRVGELEYAVIDLNPRPLEPIILIGRSGTGKTTCCLYRLWKKFHVYWEKAEQAGSPLLAKQVWLKRRLEVEPGKESPGGEEEEEEEDEEEEDSIEVETVESIDEQEYEACAGGAGVEPAGDGQAAEVCAPEHPHQLEHLHQIFVTKNHVLCQEVQRNFIELSKSTKATSHYKPLDPNIHKLQDLRDENFPLFVTSKQLLLLLDASLPKPFFLRNEDGSLKRTIIGWSAQEESTIPSWQEDEEEAEVDGDYSEEDKAVEMRTGDSDPRVYVTFEVFKNEIWPKMTKGRTAYNPALIWKEIKSFLKGSFEALSCPHGRLTEEVYKKLGRKRCPNFKEDRSEIYSLFSLYQQIRSQKGYFDEEDVLYNISRRLSKLRVLPWSIHELYGDEIQDFTQAELALLMKCINDPNSMFLTGDTAQSIMKGVAFRFSDLRSLFHYASRNTIDKQCAVRKPKKIHQLYQNYRSHSGILNLASGVVDLLQFYFPESFDRLPRDSGLFDGPKPTVLESCSVSDLAILLRGNKRKTQPIEFGAHQVILVANETAKEKIPEELGLALVLTIYEAKGLEFDDVLLYNFFTDSEAYKEWKIISSFTPTSTDSREENRPLVEVPLDKPGSSQGRSLMVNPEMYKLLNGELKQLYTAITRARVNLWIFDENREKRAPAFKYFIRRDFVQVVKTDENKDFDDSMFVKTSTPAEWIAQGDYYAKHQCWKVAAKCYQKGGAFEKEKLALAHDTALSMKSKKVSPKEKQLEYLELAKTYLECKEPTLSLKCLSYAKEFQLSAQLCERLGKIRDAAYFYKRSQCYKDAFRCFEQIQEFDLALKMYCQEELFEEAAIAVEKYEEMLKTKTLPISKLSYSASQFYLEAAAKYLSANKMKEMMAVLSKLDIEDQLVFLKSRKRLAEAADLLNREGRREEAALLMKQHGCLLEAARLTADKDFQASCLLGAARLNVARDSDIEHTKDILREALDICYQTGQLSGIAEAHFLQGVILRDFQKLRDAFFKFDTLNHSAGVVEALYEAASQCEAEPEKILGLAPGGLEILLSLVRALKRVTNNAEKEMVKSCFEFFGISQVDAKYCQIAQNDPGPILRIIFDLDLNLREKKTKDHFLIMTDQVKLALNKHLLGRLCQITRSLLGKTYRGVCMRFIVGLKCEDENCEHFHRPLRRCEAKCLVQSKMNLVAINGLLLEAKKVFPKILAEELKEIDYILSTDMYGLCKSILDVLFPKHFHQRVLSENPMACKEILKPNYKSFRFYRFALKEYIHFLFENESARNRRESTDLWLSAMQAFLLSSNYPEEFEKLLHQEEDNYNRELKALESEKDERGRGRGSRIKGIEGKFGMLAPNRDDENMDKTHLCFIRLLENCIDQFYVYRNPEDYKRLFFRFMNVLIKRCKEPLIPSIGNTVALLEFQFIHCGVVLARLWKNVILCLPKSYIALLHYWEFLFSKKDKELGDVFSIIQEYKPKDVTRAIQDFRFHLSYLAKVLCGYENVNFNVLLDAFSEIDYVVSGEAERTLVLCLVMLVNAEEILQPYCKPLLYRHFREIESRLQLMSMDCPGQVPERLLKVVKRVLVAVNVKSVAEALQDLLFERDEEYLMDCDWRWDPVHTKGSIVRGLYYEEVRLNRLLCLDPVDYFAEPECEFGQDEMDELALEDRDHVLATILSQKQRKASIQRKLRRACLVVSLCISWRRRVGTQMERVREEAREPRAGNFKKADVDRTQCDLCGVKFTRGPENYFSPSKAFEGAASEVAVLSRAELEREECQERNSESYEQHIHLEHHQRQQVAYQKYSEFFHEKVDPAIDEGKLVVQDIEQSVWIHSHVGSKEHSHMLQKVQEHIKRVSDMVEDLYRRKAWAGAEEAMTRLVNILILSVRDARDWLMKTETRLKKEGIVQEDDYENEVEDFGELRPRRRSRKCGKQRKY

SEQ ID NO: 45445 - protein, 605 aa, Homo sapiens [sequence omitted]

SEQ ID NO: 45446 - protein, 609 aa, Homo sapiens
MFKDRSSRLSSLNHSYSHSHGMKKRSSDSHKDLLSGLYFDQRNYSSLRHSKPTSAYYTRQSSSLYSDPLATYKSDRASPTANSGLLRSASLASLYNGGLYNPYGPRTPSECSYYSSRISSARSSPGFTNDDTASIVSSDRASRGRRESVVSAADYFSRSNRRGSVVSEVDDISIPDLSSLDEKSDKQYAENYTRPSSRNSASATTPLSGNSSRRGSGDTSSLIDPDTSLSELRDIYDLKDQIQDVEGRYMQGLKELKESLSEVEEKYKKAMVSNAQLDNEKNNLIYQVDTLKDVIEEQEEQMAEFYRENEEKSKELERQKHMCSVLQHKMEELKEGLRQRDELIEEKQRMQQKIDTMTKEVFDLQETLLWKDKKIGALEKQKEYIACLRNERDMLREELADLQETVKTGEKHGLVIIPDGTPNGDVSHEPVAGAITVVSQEAAQVLESAGEGPLDVRLRKLAGEKEELLSQIRKLKLQLEEERQKCSRNDGTVGDLAGLQNGSDLQFIEMQRDANRQISEYKFKLSKAEQDITTLEQSISRLEGQVLRYKTAAENAEKVEDELKAEKRKLQRELRTALDKIEEMEMTNSHLAKRLEKMKANRTALLAQQ

SEQ ID NO: 45447 - protein, 454 aa, Homo sapiens
MRELERQQKEEDSERARYSHRSSHHRPYLGVEDALSIRSVGSHRNHSYSHSHGMKKRSSDSHKDLLASLYNGGLYNPYGPRTLDEKSDKQYAENYTRPSSRNSASATTPLSGNSSRRGSGDTSSLIDPDTSLSELRESLSEVEEKYKKAMVSNAQLDNEKNNLIYQVDTLKDVIEEQEEQMAEFYRENEEKSKELERQKHMCSVLQHKMEELKEGLRQRDELIEEKQRMQQKIDTMTKEVFDLQETLLWKDKKIGKHGLVIIPDGTPNGDVSHEPVAGAITVVSQEAAQVLESAGEGPLDVRLRKLAGEKEELLSQIRKLKLQLEEERQKCSRNDGTVGDLAGLQNGSDLQFIEMQRDANRQISEYKFKLSKAEQDITTLEQSISRLEGQVLRYKTAAENAEKVEDELKAEKRKLQRELRTALDKIEEMEMTNSHLAKRLEKMKANRTALLAQQ

SEQ ID NO: 45448 - protein, 295 aa, Homo sapiens [sequence omitted]

SEQ ID NO: 45449 - protein, 2209 aa, Homo sapiens
MRSRTSSFTEQLDEGTPNRENASTHASKSPDSVNGSEPSIPQSGDTQSFAQKLQLRVPSVESLFRSPIKESLFRSSSKESLVRTSSRESLNRLDLDSSTASFDPPSDMDSEAEDLVGNSDSLNKEQLIQRLRRMERSLSSYRGKYSELVTAYQMLQREKKKLQGILSQSQDKSLRRIAELREELQMDQQAKKHLQEEFDASLEEKDQYISVLQTQVSLLKQRLRNGPMNVDVLKPLPQLEPQAEVFTKEENPESDGEPVVEDGTSVKTLETLQQRVKRQENLLKRCKETIQSHKEQCTLLTSEKEALQEQLDERLQELEKIKDLHMAEKTKLITQLRDAKNLIEQLEQDKGMVIAETKRQMHETLEMKEEEIAQLRSRIKQMTTQGEELREQKEKSERAAFEELEKALSTAQKTEEARRKLKAEMDEQIKTIEKTSEEERISLQQELSRVKQEVVDVMKKSSEEQIAKLQKLHEKELARKEQELTKKLQTREREFQEQMKVALEKSQSEYLKISQEKEQQESLALEELELQKKAILTESENKLRDLQQEAETYRTRILELESSLEKSLQENKNQSKDLAVHLEAEKNKHNKEITVMVEKHKTELESLKHQQDALWTEKLQVLKQQYQTEMEKLREKCEQEKETLLKDKEIIFQAHIEEMNEKTLEKLDVKQTELESLSSELSEVLKARHKLEEELSVLKDQTDKMKQELEAKMDEQKNHHQQQVDSIIKEHEVSIQRTEKALKDQINQLELLLKERDKHLKEHQAHVENLEADIKRSEGELQQASAKLDVFQSYQSATHEQTKAYEEQLAQLQQKLLDLETERILLTKQVAEVEAQKKDVCTELDAHKIQVQDLMQQLEKQNSEMEQKVKSLTQVYESKLEDGNKEQEQTKQILVEKENMILQMREGQKKEIEILTQKLSAKEDSIHILNEEYETKFKNQEKKMEKVKQKAKEMQETLKKKLLDQEAKLKKELENTALELSQKEKQFNAKMLEMAQANSAGISDAVSRLETNQKEQIESLTEVHRRELNDVISIWEKKLNQQAEELQEIHEIQLQEKEQEVAELKQKILLFGCEKEEMNKEITWLKEEGVKQDTTLNELQEQLKQKSAHVNSLAQDETKLKAHLEKLEVDLNKSLKENTFLQEQLVELKMLAEEDKRKVSELTSKLKTTDEEFQSLKSSHEKSNKSLEDKSLEFKKLSEELAIQLDICCKKTEALLEAKTNELINISSSKTNAILSRISHCQHRTTKVKEALLIKTCTVSELEAQLRQLTEEQNTLNISFQQATHQLEEKENQIKSMKADIESLVTEKEALQKEGGNQQQAASEKESCITQLKKELSENINAVTLMKEELKEKKVEISSLSKQLTDLNVQLQNSISLSEKEAAISSLRKQYDEEKCELLDQVQDLSFKVDTLSKEKISALEQVDDWSNKFSEWKKKAQSRFTQHQNTVKELQIQLELKSKEAYEKDEQINLLKEELDQQNKRFDCLKGEMEDDKSKMEKKESNLETELKSQTARIMELEDHITQKTIEIESLNEVLKNYNQQKDIEHKELVQKLQHFQELGEEKDNRVKEAEEKILTLENQVYSMKAELETKKKELEHVNLSVKSKEEELKALEDRLESESAAKLAELKRKAEQKIAAIKKQLLSQMEEKEEQYKKGTESHLSELNTKLQEREREVHILEEKLKSVESSQSETLIVPRSAKNVAAYTEQEEADSQGCVQKTYEEKISVLQRNLTEKEKLLQRVGQEKEETVSSHFEMRCQYQERLIKLEHAEAKQHEDQSMIGHLQEELEEKNKKYSLIVAQHVEKEGGKNNIQAKQNLENVFDDVQKTLQEKELTCQILEQKIKELDSCLVRQKEVHRVEMEELTSKYEKLQALQQMDGRNKPTELLEENTEEKSKSHLVQPKLLSNMEAQHNDLEFKLAGAEREKQKLGKEIVRLQKDLRMLRKEHQQELEILKKEYDQEREEKIKQEQEDLELKHNSTLKQLMREFNTQLAQKEQELEMTIKETINKAQEVEAELLESHQEETNQLLKKIAEKDDDLKRTAKRYEEILDAREEEMTAKVRDLQTQLEELQKKYQQKLEQEENPGNDNTQLAQKTTLISDSKLKEQEFREQIHNLEDRLKKYEKNVYATTVGTPYKGGNLYHTDVSLFGEPTEFEYLRKVLFEYMMGRETKTMAKVITTVLKFPDDQTQKILEREDARLMSWLRSSS

SEQ ID NO: 45450 - protein, 2196 aa, Homo sapiens
MRSRTSSFTEQLDEGTPNRESGDTQSFAQKLQLRVPSVESLFRSPIKESLFRSSSKESLVRTSSRESLNRLDLDSSTASFDPPSDMDSEAEDLVGNSDSLNKEQLIQRLRRMERSLSSYRGKYSELVTAYQMLQREKKKLQGILSQSQDKSLRRIAELREELQMDQQAKKHLQEEFDASLEEKDQYISVLQTQVSLLKQRLRNGPMNVDVLKPLPQLEPQAEVFTKEENPESDGEPVVEDGTSVKTLETLQQRVKRQENLLKRCKETIQSHKEQCTLLTSEKEALQEQLDERLQELEKIKDLHMAEKTKLITQLRDAKNLIEQLEQDKGMVIAETKRQMHETLEMKEEEIAQLRSRIKQMTTQGEELREQKEKSERAAFEELEKALSTAQKTEEARRKLKAEMDEQIKTIEKTSEEERISLQQELSRVKQEVVDVMKKSSEEQIAKLQKLHEKELARKEQELTKKLQTREREFQEQMKVALEKSQSEYLKISQEKEQQESLALEELELQKKAILTESENKLRDLQQEAETYRTRILELESSLEKSLQENKNQSKDLAVHLEAEKNKHNKEITVMVEKHKTELESLKHQQDALWTEKLQVLKQQYQTEMEKLREKCEQEKETLLKDKEIIFQAHIEEMNEKTLEKLDVKQTELESLSSELSEVLKARHKLEEELSVLKDQTDKMKQELEAKMDEQKNHHQQQVDSIIKEHEVSIQRTEKALKDQINQLELLLKERDKHLKEHQAHVENLEADIKRSEGELQQASAKLDVFQSYQSATHEQTKAYEEQLAQLQQKLLDLETERILLTKQVAEVEAQKKDVCTELDAHKIQVQDLMQQLEKQNSEMEQKVKSLTQVYESKLEDGNKEQEQTKQILVEKENMILQMREGQKKEIEILTQKLSAKEDSIHILNEEYETKFKNQEKKMEKVKQKAKEMQETLKKKLLDQEAKLKKELENTALELSQKEKQFNAKMLEMAQANSAGISDAVSRLETNQKEQIESLTEVHRRELNDVISIWEKKLNQQAEELQEIHEIQLQEKEQEVAELKQKILLFGCEKEEMNKEITWLKEEGVKQDTTLNELQEQLKQKSAHVNSLAQDETKLKAHLEKLEVDLNKSLKENTFLQEQLVELKMLAEEDKRKVSELTSKLKTTDEEFQSLKSSHEKSNKSLEDKSLEFKKLSEELAIQLDICCKKTEALLEAKTNELINISSSKTNAILSRISHCQHRTTKVKEALLIKTCTVSELEAQLRQLTEEQNTLNISFQQATHQLEEKENQIKSMKADIESLVTEKEALQKEGGNQQQAASEKESCITQLKKELSENINAVTLMKEELKEKKVEISSLSKQLTDLNVQLQNSISLSEKEAAISSLRKQYDEEKCELLDQVQDLSFKVDTLSKEKISALEQVDDWSNKFSEWKKKAQSRFTQHQNTVKELQIQLELKSKEAYEKDEQINLLKEELDQQNKRFDCLKGEMEDDKSKMEKKESNLETELKSQTARIMELEDHITQKTIEIESLNEVLKNYNQQKDIEHKELVQKLQHFQELGEEKDNRVKEAEEKILTLENQVYSMKAELETKKKELEHVNLSVKSKEEELKALEDRLESESAAKLAELKRKAEQKIAAIKKQLLSQMEEKEEQYKKGTESHLSELNTKLQEREREVHILEEKLKSVESSQSETLIVPRSAKNVAAYTEQEEADSQGCVQKTYEEKISVLQRNLTEKEKLLQRVGQEKEETVSSHFEMRCQYQERLIKLEHAEAKQHEDQSMIGHLQEELEEKNKKYSLIVAQHVEKEGGKNNIQAKQNLENVFDDVQKTLQEKELTCQILEQKIKELDSCLVRQKEVHRVEMEELTSKYEKLQALQQMDGRNKPTELLEENTEEKSKSHLVQPKLLSNMEAQHNDLEFKLAGAEREKQKLGKEIVRLQKDLRMLRKEHQQELEILKKEYDQEREEKIKQEQEDLELKHNSTLKQLMREFNTQLAQKEQELEMTIKETINKAQEVEAELLESHQEETNQLLKKIAEKDDDLKRTAKRYEEILDAREEEMTAKVRDLQTQLEELQKKYQQKLEQEENPGNDNVTIMELQTQLAQKTTLISDSKLKEQEFREQIHNLEDRLKKYEKNVYATTVGTPYKGGNLYHTDVSLFGEPTEFEYLRKVLFEYMMGRETKTMAKVITTVLKFPDDQTQKILEREDARLMFTSPRSGIF

SEQ ID NO: 45451 - protein, 680 aa, Homo sapiens
MGHRTEGLEKFARDVPEDRCFSIVFKDQRNTLDLIAPSPADAQHWVLGLHKIIHHSGSMDQRQKLQHWIHSCLRKADKNKDNKMSFKELQNFLKELNIQVDDSYARKIFRECDHSQTDSLEDEEIEAFYKMLTQRVEIDRTFAEAAGSGETLSVDQLVTFLQHQQREEAAGPALALSLIERYEPSETAKAQRQMTKDGFLMYLLSADGSAFSLAHRRVYQDMGQPLSHYLVSSSHNTYLLEDQLAGPSSTEAYIRALCKGCRCLELDCWDGPNQEPIIYHGYTFTSKILFCDVLRAIRDYAFKASPYPVILSLENHCTLEQQRVMARHLHAILGPMLLNRPLDGVTNSLPSPEQLKGKILLKGKKLGGLLPPGGEGGPEATVVSDEDEAAEMEDEAVRSRVQHKPKEDKLRLAQELSDMVIYCKSVHFGGFSSPGTPGQAFYEMASFSENRALRLLQESGNGFVRHNVGHLSRIYPAGWRTDSSNYSPVEMWNGGCQIVALNFQTPGPEMDVYQGRFQDNGACGYVLKPAFLRDPNGTFNPRALAQGPWWARKRLNIRVISGQQLPKVNKNKNSIVDPKVTVEIHGVSRDVASRQTAVITNNGFNPWWDTEFAFEVVVPDLALIRFLVEDYDASSKNDFIGQSTIPLNSLKQGYRHVHLMSKNGDQHPSATLFVKISLQD

SEQ ID NO: 45452 - protein, 349 aa, Homo sapiens
MGHRTEGLEKFARDVPEDRCFSIVFKDQRNTLDLIAPSPADAQHWVLGLHKIIHHSGSMDQRQKLQHWIHSCLRKADKNKDNKMSFKELQNFLKELNIQVDDSYARKIFRECDHSQTDSLEDEEIEAFYKMLTQRVEIDRTFAEAAGSGETLSVDQLVTFLQHQQREEAAGPALALSLIERYEPSETAKAQRQMTKDGFLMYLLSADGSAFSLAHRRVYQDMGQPLSHYLVSSSHNTYLLEDQLAGPSSTEAYIRALCKGCRCLELDCWDGPNQEPIIYHGYTFTSKILFCDVLRAIRDYAFKVGVPLAGEEWDARGGPPLLMCPWASRRPPTLSSYPWRTTAHWSSSA

SEQ ID NO: 45453 - protein, 270 aa, Homo sapiens [sequence omitted]

SEQ ID NO: 45454 - protein, 265 aa, Homo sapiens
MGDADRKHCKFKPDPNIPPTFSAFNEDYVGSGWSRGHMAPAGNNKFSSKAMAETFYLSNIVPQDFDNNSGYWNRIEMYCRELTERFEDVWVVSGPLTLPQTRGDGKKIVSYQVIGEDNVAVPSHLYKVILARRSSVSTEPLALGAFVVPNEAIGFQPQLTEFQVSLQDLEKLSGLVFFPHLDRTSDIRNICSVDTCKLLDFQEFTLYLSTRKIEGARSVLRLEKIMENLKNAEIEPDDYFMSRYEKKLEELKAKEQSGTQIRKPS

SEQ ID NO: 45455 - protein, 502 aa, Homo sapiens
MNQLGTIIVSGSTEKVLRVWDPRTCAKLMKLKGHTDNVKALLLNRDGTQCLSGSSDGTIRLWSLGQQRCIATYRVHDEGVWALQVNDAFTHVYSGGRDRKIYCTDLRNPDIRVLICEEKAPVLKMELDRSADPPPAIWVATTKSTVNKWTLKGIHNFRASGDYDNDCTNPITPLCTQPDQVIKGGASIIQCHILNDKRHILTKDTNNNVAYWDVLKACKVEDLGKVDFEDEIKKRFKMVYVPNWFSVDLKTGMLTITLDESDCFAAWVSAKDAGFSSPDGSDPKLNLGGLLLQALLEYWPRTHVNPMDEEENEVNHVNGEQENRVQKGNGYFQVPPHTPVIFGEAGGRTLFRLLCRDSGGETESMLLNETVPQWVIDITVDKNMPKFNKIPFYLQPHASSGAKTLKKDRLSASDMLQVRKVMEHVYEKIINLDNESQTTSSSNNEKPGEQEKEEDIAVLAEEKIELLCQDQVLDPNMDLRTVKHFIWKSGGDLTLHYRQKST

SEQ ID NO: 45456 - protein, 1067 aa, Homo sapiens
MALIYAHKRCEIIDREAIQELEYSLKEIRKTVSGTALYYAGLFLWLIGRHDKAKEYIDRMLKISRGFREAYVLRGWVDLTSDKPHTAKKAIEYLEQGIQDTKDVLGLMGKAMYFMMQQNYSEALEVVNQITVTSGSFLPALVLKMQLFLARQDWEQTVEMGHRILEKDESNIDACQILTVHELAREGNMTTATNHVRNLIKALETREPENPSLHLKKIIVVSRLCGSHQVILGLVCSFIERTFMATPSYVHVATELGYLFILKNQVKEALLWYSEAMKLDKDGMAGLTGIILCHILEGHLEEAEYRLEFLKEVQKSLGKSEVLIFLQALLMSRKHKGEEETTALLKEAVELHFSSMQGIPLGSEYFEKLDPYFLVCIAKEYLLFCPKQPRLPGQIVSPLLKQVAVILNPVVKAAPALIDPLYLMAQVRYYSGELENAQSILQRCLELDPASVDAHLLMCQIYLAQGNFGMCFHCLELGVSHNFQVRDHPLYHLIKARALNKAGDYPEAIKTLKMVIKLPALKKEEGRKFLRPSVQPSQRASILLELVEALRLNGELHEATKVMQDTINEFGGTPEENRITIANVDLVLSKGNVDVALNMLRNILPKQSCYMEAREKMANIYLQTLRDRRLYIRCYRELCEHLPGPHTSLLLGDALMSILEPEKALEVYDEAYRQNPHDASLASRIGHAYVKAHQYTEAIEYYEAAQKINGQDFLCCDLGKLLLKLKKVNKAEKVLKQALEHDIVQDIPSMMNDVKCLLLLAKVYKSHKKEAVIETLNKALDLQSRILKRVPLEQPEMIPSQKQLAASICIQFAEHYLAEKEYDKAVQSYKDVFSYLPTDNKVMLELAQLYLLQGHLDLCEQHCAILLQTEQNHETASVLMADLMFRKQKHEAAINLYHQVLEKAPDNFLVLHKLIDLLRRSGKLEDIPAFFELAKKVSSRVPLEPGFNYCRGIYCWHIGQPNEALKFLNKARKDSTWGQSAIYHMVQICLNPDNEVVGGEAFENQGAESNYMEKKELEQQGVSTAEKLLQGQRPCPAGLGTSLRVPEADPQGAYAVEAPGQDPLGAE

SEQ ID NO: 45457 - protein, 38 aa, Homo sapiens
MSTDTGVSLPSYEEDQGSKLIRKAKEAPFVPVGQDGSR

SEQ ID NO: 45458 - protein, 351 aa, Homo sapiens
MLCRKDAVVSFGKVFLPVFYSLIFVLGLSGNLLLLMVLLRYVPRRRMVEIYLLNLAISNLLFLVTLPFWGISVAWHWVFGSFLCKMVSTLYTINFYSGIFFISCMSLDKYLEIVHAQPYHRLRTRAKSLLLATIVWAVSLAVSIPDMVFVQTHENPKGVWNCHADFGGHGTIWKLFLRFQQNLLGFLLPLLAMIFFYSRIGCVLVRLRPAGQGRALKIAAALVVAFFVLWFPYNLTLFLHTLLDLQVFGNCEVSQHLDYALQVTESIAFLHCCFSPILYAFSSHRFRQYLKAFLAAVLGWHLAPGTAQASLSSCSESSILTAQEEMTGMNDLGERQSENYPNKEDVGNKSA

SEQ ID NO: 45459 - protein, 318 aa, Homo sapiens
MVLSSGPQWCGSQELWFGKTCEEKSRLGRWPGYLNGGRMESSTNDIIEVIVKDEMISVEESSGNTDVNNLLGIHHKILNEQIFYICEECGKCFDQNEDFDQHQKTHNGEKVYGCKECGKAFSFRSHCIAHQRIHSGVKPYECQECAKAFVWKSNLIRHQRIHTGEKPFECKECGKGFSQNTSLTQHQRIHTGEKPYTCKECGKSFTRNPALLRHQRMHTGEKPYECKDCGKGFMWNSDLSQHQRVHTGDKPHECTDCGKSFFCKAHLIRHQRIHTGERPYKCNDCGKAFSQNSVLIKHQRRHARDKPYNCQISHLLEH

SEQ ID NO: 45460 - protein, 127 aa, Homo sapiens [sequence omitted]

SEQ ID NO: 45461 - protein, 517 aa, Homo sapiens
MLQRDPKRRASLEEIENHPWLQGVDPSPATKYNIPLVSYKNLSEEEHNSIIQRMVLGDIADRDAIVEALETNRYNHITATYFLLAERILREKQEKEIQTRSASPSNIKAQFRQSWPTKIDVPQDLEDDLTATPLSHATVPQSPARAADSVLNGHRSKGLCDSAKKDDLPELAGPALSTVPPASLKPTASGRKCLFRVEEDEEEDEEDKKPMSLSTQVVLRRKPSVTNRLTSRKSAPVLNQIFEEGESDDEFDMDENLPPKLSRLKMNIASPGTVHKRYHRRKSQGRGSSCSSSETSDDDSESRRRLDKDSGFTYSWHRRDSSEGPPGSEGDGGGQSKPSNASGGVDKASPSENNAGGGSPSSGSGGNPTNTSGTTRRCAGPSNSMQLASRSAGELVESLKLMSLCLGSQLHGSTKYIIDPQNGLSFSSVKVQEKSTWKMCISSTGNAGQVPAVGGIKFFSDHMADTTTELERIKSKNLKNNVLQLPLCEKTISVNIQRNPKEGLLCASSPASCCHVI

SEQ ID NO: 45462 - protein, 826 aa, Homo sapiens
MPALFPREGCPGDQVTPTRSLTAQLQETMTFKDVEVTFSQDEWGWLDSAQRNLYRDVMLENYRNMASLVGPFTKPALISWLEAREPWGLNMQAAQPKGNPVAAPTGDDLQSKTNKFILNQEPLEEAETLAVSSGCPATSVSEGIGLRESFQQKSRQKDQCENPIQVRVKKEETNFSHRTGKDSEVSGSNSLDLKHVTYLRVSGRKESLKHGCGKHFRMSSHHYDYKKYGKGLRHMIGGFSLHQRIHSGLKGNKKDVCGKDFSLSSHHQRGQSLHTVGVSFKCSDCGRTFSHSSHLAYHQRLHTQEKAFKCRVCGKAFRWSSNCARHEKIHTGVKPYKCDLCEKAFRRLSAYRLHRETHAKKKFLELNQYRAALTYSSGFDHHLGDQSGEKLFDCSQCRKSFHCKSYVLEHQRIHTQEKPYKCTKCRKTFRWRSNFTRHMRLHEEEKFYKQDECREGFRQSPDCSQPQGAPAVEKTFLCQQCGKTFTRKKTLVDHQRIHTGEKPYQCSDCGKDFAYRSAFIVHKKKHAMKRKPEGGPSFSQDTVFQVPQSSHSKEEPYKCSQCGKAFRNHSFLLIHQRVHTGEKPYKCRECGKAFRWSSNLYRHQRIHSLQKQYDCHESEKTPNVEPKILTGEKRFWCQECGKTFTRKRTLLDHKGIHSGEKRYKCNLCGKSYDRNYRLVNHQRIHSTERPFKCQWCGKEFIGRHTLSSHQRKHTRAAQAERSPPARSSSQDTKLRLQKLKPSEEMPLEDCKEACSQSSRLTGLQDISIGKKCHKCSICGKTFNKSSQLISHKRFHTRERPFKCSKCGKTFRWSSNLARHMKNHIRD

SEQ ID NO: 45463 - protein, 24 aa, Homo sapiens
MWQSFLLEFAPHWSSENPHWRETL

SEQ ID NO: 45464 - protein, 262 aa, Homo sapiens
MKHGRVNMQKKPSKCSECGKFFTQRSSLTQHQRIHRGEKPYVCSECGSCFRKQSNLTQHLRIHTGEKPYKCNECEKAFQTKAILVQHLRIHTGEKPYKCNECGKAFCQSPSLIKHQRIHTGEKPYKCTECGKAFSQSICLTRHQRSHSGDKPFKCNECGKAFNQSACLMQHQRIHSGEKPYTCTECGKAFTQNSSLVEHERTHTGEKLYKCSECEKTFRKQAHLSEHYRIHTGEKPYECVGCGKSFRHSSALLRHQRLHAGE

SEQ ID NO: 45465 - protein, 219 aa, Homo sapiens
MLSSLLVRWGRPRGFQCDLLLFSTNAHGRAFFAAAFHRVGPPLLIEHLGLAAGGAQQDLRLCVGCGWVRGRRTGRLRPAAAPSAAAATAGAPTALPAYPAAEPPGPLWLQGEPLHFCCLDFSLEELQGEPGWRLNRKPIESTLVACFMTLVIVVWSVAALIWPVPIIAGFLPNGMEQRRTTASTTAATPAAVPAGTTAAAAAAAAAAAAAAVTSGVATK

SEQ ID NO: 45466 - protein, 657 aa, Homo sapiens [sequence omitted]

SEQ ID NO: 45467 - protein, 168 aa, Homo sapiens
MELPFELSNLKQVTFVDISANKFSSVPICVLRMSNLQWLDISSNNLTDLPQDIDRLEELQSFLLYKNKLTYLPYSMLNLKKLTLLVVSGDHLVELPTALCDSSTPLKFVSLMDNPIDNAQCEDGNEIMESERDRQHFDKEVMKAYIEDLKERESVPSYTTKVSFSLQL

SEQ ID NO: 45468 - protein, 169 aa, Homo sapiens
MATPYTEVSGTLWQVQMHYEMLFNSFQGFFVAIIYCFCNGEVQAEIKKSWSRWTLALDFKRKARSGSSSYSYGPMVSHTSVTNVGPRVGLGLPLSPRLLPTATTNGHPQLPGHAKPGTPALETLETTPPAMAAPKDDGFLNGSCSGLDEEASGPERPPALLQEEWETVM

SEQ ID NO: 45469 - protein, 1028 aa, Homo sapiens
MAYQEYPNSQNWPEDTNFCFQPEQVVDPIQTDPFKMYHDDDLADLVFPSSATADTSIFAGQNDPLKDSYGMSPCNTAVVPQGWSVEALNSPHSESFVSPEAVAEPPQPTAVPLELAKEIEMASEERPPAQALEIMMGLKTTDMAPSKETEMALAKDMALATKTEVALAKDMESPTKLDVTLAKDMQPSMESDMALVKDMELPTEKEVALVKDVRWPTETDVSSAKNVVLPTETEVAPAKDVTLLKETERASPIKMDLAPSKDMGPPKENKKETERASPIKMDLAPSKDMGPPKENKIVPAKDLVLLSEIEVAQANDIISSTEISSAEKVALSSETEVALARDMTLPPETNVILTKDKALPLEAEVAPVKDMAQLPETEIAPAKDVAPSTVKEVGLLKDMSPLSETEMALGKDVTPPPETEVVLIKNVCLPPEMEVALTEDQVPALKTEAPLAKDGVLTLANNVTPAKDVPPLSETEATPVPIKDMEIAQTQKGISEDSHLESLQDVGQSAAPTFMISPETVTGTGKKCSLPAEEDSVLEKLGERKPCNSQPSELSSETSGIARPEEGRPVVSGTGNDITTPPNKELPPSPEKKTKPLATTQPAKTSTSKAKTQPTSLPKQPAPTTIGGLNKKPMSLASGLVPAAPPKRPAVASARPSILPSKDVKPKPIADAKAPEKRASPSKPASAPASRSGSKSTQTVAKTTTAAAVASTGPSSRSPSTLLPKKPTAIKTEGKPAEVKKMTAKSVPADLSRPKSTSTSSMKKTTTLSGTAPAAGVVPSRVKATPMPSRPSTTPFIDKKPTSAKPSSTTPRLSRLATNTSAPDLKNVRSKVGSTENIKHQPGGGRAKVEKKTEAAATTRKPESNAVTKTAGPIASAQKQPAGKVQIVSKKVSYSHIQSKCGSKDNIKHVPGGGNVQIQNKKVDISKVSSKCGSKANIKHKPGGGDVKIESQKLNFKEKAQAKVGSLDNVGHLPAGGAVKIETYRLTFRANARARTDHGADIVSRPPHFPGGPNSGSRVLGPLSRAVH

SEQ ID NO: 45470 - protein, 342 aa, Homo sapiens
MSLASGLVPAAPPKRPAVASARPSILPSKDVKPKPIADAKAPEKRASPSKPASAPASRSGSKSTQTVAKTTTAAAVASTGPSSRSPSTLLPKKPTAIKTEGKPAEVKKMTAKSVPADLSRPKSTSTSSMKKTTTLSGTAPAAGVVPSRVKATPMPSRPSTTPFIDKKPTSAKPSSTTPRLSRLATNTSAPDLKNVRSKVGSTENIKHQPGGGRVQIQNKKVDISKVSSKCGSKANIKHKPGGGDVKIESQKLNFKEKAQAKVGSLDNVGHLPAGGAVKTEGGGSEAPLCPGPPAGEEPAISEAAPEAGAPTSASGLNGHPTLSGGGDQREAQTLDSQIQETN

SEQ ID NO: 45471 - protein, 1045 aa, Homo sapiens
MAYQEYPNSQNWPEDTNFCFQPEQVVDPIQTDPFKMYHDDDLADLVFPSSATADTSIFAGQNDPLKDSYGMSPCNTAVVPQGWSVEALNSPHSESFVSPEAVAEPPQPTAVPLELAKEIEMASEERPPAQALEIMMGLKTTDMAPSKETEMALAKDMALATKTEVALAKDMESPTKLDVTLAKDMQPSMESDMALVKDMELPTEKEVALVKDVRWPTETDVSSAKNVVLPTETEVAPAKDVTLLKETERASPIKMDLAPSKDMGPPKENKKETERASPIKMDLAPSKDMGPPKENKIVPAKDLVLLSEIEVAQANDIISSTEISSAEKVALSSETEVALARDMTLPPETNVILTKDKALPLEAEVAPVKDMAQLPETEIAPAKDVAPSTVKEVGLLKDMSPLSETEMALGKDVTPPPETEVVLIKNVCLPPEMEVALTEDQVPALKTEAPLAKDGVLTLANNVTPAKDVPPLSETEATPVPIKDMEIAQTQKGISEDSHLESLQDVGQSAAPTFMISPETVTGTGKKCSLPAEEDSVLEKLGERKPCNSQPSELSSETSGIARPEEGRPVVSGTGNDITTPPNKELPPSPEKKTKPLATTQPAKTSTSKAKTQPTSLPKQPAPTTIGGLNKKPMSLASGLVPAAPPKRPAVASARPSILPSKDVKPKPIADAKAPEKRASPSKPASAPASRSGSKSTQTVAKTTTAAAVASTGPSSRSPSTLLPKKPTAIKTEGKPAEVKKMTAKSVPADLSRPKSTSTSSMKKTTTLSGTAPAAGVVPSRVKATPMPSRPSTTPFIDKKPTSAKPSSTTPRLSRLATNTSAPDLKNVRSKVGSTENIKHQPGGGRAKVEKKTEAAATTRKPESNAVTKTAGPIASAQKQPAGKVQIVSKKVSYSHIQSKCGSKDNIKHVPGGGNVQIQNKKVDISKVSSKCGSKANIKHKPGGGDVKIESQKLNFKEKAQAKVGSLDNVGHLPAGGAVKTEGGGSEAPLCPGPPAGEEPAISEAAPEAGAPTSASGLNGHPTLSGGGDQREAQTLDSQIQETSI

SEQ ID NO: 45472 - protein, 2052 aa, Homo sapiens
MPDECPQAQPTNNPNQLLLVSPGALVVCGSVHQGVCEQRRLGQLEQLLLRPERPGDTQYVAANDPAVSTVGLVAQGLAGEPLLFVGRGYTSRGVGGGIPPITTRALWPPDPQAAFSYEETAKLAVGRLSEYSHHFVSAFARGASAYFLFLRRDLQAQSRAFRAYVSRVCLRDQHYYSYVELPLACEGGRYGLIQAAAVATSREVAHGEVLFAAFSSAAPPTVGRPPSAAAGASGASALCAFPLDEVDRLANRTRDACYTREGRAEDGTEVAYIEYDVNSDCAQLPVDTLDAYPCGSDHTPSPMASRVPLEATPILEWPGIQLTAVAVTMEDGHTIAFLGDSQGQLHRVYLGPGSDGHPYSTQSIQQGSAVSRDLTFDGTFEHLYVMTQSTLLKVPVASCAQHLDCASCLAHRDPYCGWCVLLGRCSRRSECSRGQGPEQWLWSFQPELGCLQVAAMSPANISREETREVFLSVPDLPPLWPGESYSCHFGEHQSPALLTGSGVMCPSPDPSEAPVLPRGADYVSVSVELRFGAVVIAKTSLSFYDCVAVTELRPSAQCQACVSSRWGCNWCVWQHLCTHKASCDAGPMVASHQSPLVSPDPPARGGPSPSPPTAPKALATPAPDTLPVEPGAPSTATASDISPGASPSLLSPWGPWAGSGSISSPGSTGSPLHEEPSPPSPQNGPGTAVPAPTDFRPSATPEDLLASPLSPSEVAAVPPADPGPEALHPTVPLDLPPATVPATTFPGAMGSVKPALDWLTREGGELPEADEWTGGDAPAFSTSTLLSGDGDSAELEGPPAPLILPSSLDYQYDTPGLWELEEATLGASSCPCVESVQGSTLMPVHVEREIRLLGRNLHLFQDGPGDNECVMELEGLEVVVEARVECEPPPDTQCHVTCQQHQLSYEALQPELRVGLFLRRAGRLRVDSAEGLHVVLYDCSVGHGDCSRCQTAMPQYGCVWCEGERPRCVTREACGEAEAVATQCPAPLIHSVEPLTGPVDGGTRVTIRGSNLGQHVQDVLGMVTVAGVPCAVDAQEYEVSSSLVCITGASGEEVAGATAVEVPGRGRGVSEHDFAYQDPKVHSIFPARGPRAGGTRLTLNGSKLLTGRLEDIRVVVGDQPCHLLPEQQSEQLRCETSPRPTPATLPVAVWFGATERRLQRGQFKYTLDPNITSAGPTKSFLSGGREICVRGQNLDVVQTPRIRVTVVSRMLQPSQGLGRRRRVVPETACSLGPSCSSQQFEEPCHVNSSQLITCRTPALPGLPEDPWVRVEFILDNLVFDFATLNPTPFSYEADPTLQPLNPEDPTMPFRHKPGSVFSVEGENLDLAMSKEEVVAMIGDGPCVVKTLTRHHLYCEPPVEQPLPRHHALREAPDSLPEFTVQMGNLRFSLGHVQYDGESPGAFPVAAQVGLGVGTSLLALGVIIIVLMYRRKSKQALRDYKKVQIQLENLESSVRDRCKKEFTDLMTEMTDLTSDLLGSGIPFLDYKVYAERIFFPGHRESPLHRDLGVPESRRPTVEQGLGQLSNLLNSKLFLTKFIHTLESQRTFSARDRAYVASLLTVALHGKLEYFTDILRTLLSDLVAQYVAKNPKLMLRRTETVVEKLLTNWMSICLYTFVRDSVGEPLYMLFRGIKHQVDKGPVDSVTGKAKYTLNDNRLLREDVEYRPLTLNALLAVGPGAGEAQGVPVKVLDCDTISQAKEKMLDQLYKGVPLTQRPDPRTLDVEWRSGVAGHLILSDEDVTSEVQGLWRRLNTLQHYKVPDGATVALVPCLTKHVLRENQDYVPGERTPMLEDVDEGGIRPWHLVKPSDEPEPPRPRRGSLRGGERERAKAIPEIYLTRLLSMKGTLQKFVDDLFQVILSTSRPVPLAVKYFFDLLDEQAQQHGISDQDTIHIWKTNSLPLRFWINIIKNPQFVFDVQTSDNMDAVLLVIAQTFMDACTLADHKLGRDSPINKLLYARDIPRYKRMVERYYADIRQTVPASDQEMNSVLAELSWNYSGDLGARVALHELYKYINKYYDQIITALEEDGTAQKMQLGYRLQQIAAAVENKVTDL

SEQ ID NO: 45473 - protein, 135 aa, Homo sapiens
MYNCARLATLFESYKCSMEQGLYPTFPPVSSLDFSLLHDEGEWLLLFNSILPFPDLLSRTAVLDCTAPGLHIAVRTEMICKFLVQLSMDFSSYYNREPRPHLFGQMFVRLQLLRAVREVLHTGLAMLGLPPLSHI

SEQ ID NO: 45474 - protein, 217 aa, Homo sapiens
MTAPEYYEFRHTQVCKASALKHGGDLAQDPAWTEIFGVLSVATIKFEMLSTAPQSQLFLALADSSISTKGTKSGTFVMYNCARLATLFESYKCSMEQGLYPTFPPVSSLDFSLLHDEGEWLLLFNSILPFPDLLSRTAVLDCTAPGLHIAVRTEMICKFLVQLSMDFSSYYNRVHILGEPRPHLFGQMFVRLQLLRAVREVLHTGLAMLGLPPLSHI

SEQ ID NO: 45475 - protein, 165 aa, Homo sapiens
MAVLESLRVIITNFPAAKSLDIQVPNFPADETKGFHQVPFAPIVFIERTDFKEEPEPGFKRLAWGQPVGLRHTGYVIELQHVVKGPSGCVESLEVTCRRADAGEKPKAFIHWVSQPLMCEVRLYERLFQHKNPEDPTEVPGGFLSDLNLLVFNRTVTLKEDPGKV

SEQ ID NO: 45476 - protein, 1639 aa, Homo sapiens
MLVERSADFGRTWHVYRYFSYDCGADFPGVPLAPPRHWDDVVCESRYSEIEPSTEGEVIYRVLDPAIPIPDPYSSRIQNLLKITNLRVNLTRLHTLGDNLLDPRREIREKYYYALYELVVRGNCFCYGHASECAPAPGAPAHAEGMVHGACICKHNTRGLNCEQCQDFYRDLPWRPAEDGHSHACRKCECHGHTHSCHFDMAVYLASGNVSGGVCDGCQHNTAGRHCELCRPFFYRDPTKDLRDPAVCRSCDCDPMGSQDGGRCDSHDDPALGLVSGQCRCKEHVVGTRCQQCRDGFFGLSISDRLGCRRCQCNARGTVPGSTPCDPNSGSCYCKRLVTGRGCDRCLPGHWGLSHDLLGCRPCDCDVGGALDPQCDEGTGQCHCRQHMVGRRCEQVQPGYFRPFLDHLIWEAEDTRGQVLDVVERLVTPGETPSWTGSGFVRLQEGQTLEFLVASVPKAMDYDLLLRLEPQVPEQWAELELIVQRPGPVPAHSLCGHLVPKDDRIQGTLQPHARYLIFPNPVCLEPGISYKLHLKLVRTGGSAQPETPYSGPGLLIDSLVLLPRVLVLEMFSGGDAAALERQATFERYQCHEEGLVPSKTSPSEACAPLLISLSTLIYNGALPCQCNPQGSLSSECNPHGGQCLCKPGVVGRRCDLCAPGYYGFGPTGCQACQCSHEGALSSLCEKTSGQCLCRTGAFGLRCDRCQRGQWGFPSCRPCVCNGHADECNTHTGACLGCRDHTGGEHCERCIAGFHGDPRLPYGGQCRPCPCPEGPGSQRHFATSCHQDEYSQQIVCHCRAGYTGLRCEACAPGHFGDPSRPGGRCQLCECSGNIDPMDPDACDPHTGQCLRCLHHTEGPHCAHCKPGFHGQAARQSCHRCTCNLLGTNPQQCPSPDQCHCDPSSGQCPCLPNVQGPSCDRCAPNFWNLTSGHGCQPCACHPSRARGPTCNEFTGQCHCRAGFGGRTCSECQELHWGDPGLQCHACDCDSRGIDTPQCHRFTGHCSCRPGVSGVRCDQCARGFSGIFPACHPCHACFGDWDRVVQDLAARTQRLEQRAQELQQTGVLGAFESSFWHMQEKLGIVQGIVGARNTSAASTAQLVEATEELRREIGEATEHLTQLEADLTDVQDENFNANHALSGLERDRLALNLTLRQLDQHLDLLKHSNFLGAYDSIRHAHSQSAEAERRANTSALAVPSPVSNSASARHRTEALMDAQKEDFNSKHMANQRALGKLSAHTHTLSLTDINELVCGAPGDAPCATSPCGGAGCRDEDGQPRCGGLSCNGAAATADLALGRARHTQAELQRALAEGGSILSRVAETRRQASEAQQRAQAALDKANASRGQVEQANQELQELIQSVKDFLNQEGADPDSIEMVATRVLELSIPASAEQIQHLAGAIAERVRSLADVDAILARTVGDVRRAEQLLQDARRARSWAEDEKQKAETVQAALEEAQRAQGIAQGAIRGAVADTRDTEQTLYQVQERMAGAERALSSAGERARQLDALLEALKLKRAGNSLAASTAEETAGSAQGRAQEAEQLLRGPLGDQYQTVKALAERKAQGVLAAQARAEQLRDEARDLLQAAQDKLQRLQELEGTYEENERALESKAAQLDGLEARMRSVLQAINLQVQIYNTCQ

SEQ ID NO: 45477 - protein, 338 aa, Homo sapiens [sequence omitted]

SEQ ID NO: 45478 - protein, 552 aa, Homo sapiens [sequence omitted]

SEQ ID NO: 45479 - protein, 110 aa, Homo sapiens
MLCDMARISELRLILRQPSPLWLSFTVEELQIYQQGPKSPSVTFPKWLSHPVPCEQPALLREGLPDPSRVSSEVQQMWALTEMIRASHTSARIGRFDVDGCYDLNLLSYT

SEQ ID NO: 45480 - protein, 870 aa, Homo sapiens
MAQSHWPSEPSEAVRDWENQLEASMHSVLSDLHEAVPTVVGIPDGTAVVGRSFRVTIPTDLIASSGDIIKVSAAGKEALPSWLHWDSQSHTLEGLPLDTDKGVHYISVSATRLGANGSHIPQTSSVFSIEVYPEDHSELQSVRTASPDPGEVVSSACAADEPVTVLTVILDADLTKMTPKQRIDLLHRMRSFSEVELHNMKLVPVVNNRLFDMSAFMAGPGNAKKVVENGALLSWKLGCSLNQNSVPDIHGVEAPAREGAMSAQLGYPVVGWHIANKKPPLPKRVRRQIHATPTPVTAIGPPTTAIQEPPSRIVPTPTSPAIAPPTETMAPPVRDPVPGKPTVTIRTRGAIIQTPTLGPIQPTRVSEAGTTVPGQIRPTMTIPGYVEPTAVATPPTTTTKKPRVSTPKPATPSTDSTTTTTRRPTKKPRTPRPVPRVTTKVSITRLETASPPTRIRTTTSGVPRGGEPNQRPELKNHIDRVDAWVGTYFEVKIPSDTFYDHEDTTTDKLKLTLKLREQQLVGEKSWVQFNSNSQLMYGLPDSSHVGKHEYFMHATDKGGLSAVDAFEIHVHRRPQGDRAPARFKAKFVGDPALVLNDIHKKIALVKKLAFAFGDRNCSTITLQNITRGSIVVEWTNNTLPLEPCPKEQIAGLSRRIAEDDGKPRPAFSNALEPDFKATSITVTGSGSCRHLQFIPVVPPRRVPSEAPPTEVPDRDPEKSSEDDVYLHTVIPAVVVAAILLIAGIIAMICYRKKRKGKLTLEDQATFIKKGVPIIFADELDDSKPPPSSSMPLILQEEKAPLPPPEYPNQSVPETTPLNQDTMGEYTPLRDEDPNAPPYQPPPPFTAPMEGKGSRPKNMTPYRSPPPYVPP

SEQ ID NO: 45481 - protein, 675 aa, Homo sapiens
MENIRFCRQYLVFHDGDSVVFAGPAGNSVETRGELLSRESPSGTMKAVLRKAGGTGPGEEKQFLEVWEKNRKLKSFNLSALEKHGPVYEDDCFGCLSWSHSETHLLYVAEKKRPKAESFFQTKALDVSASDDEIARLKKPDQAIKGDQFVFYEDWGENMVSKSIPVLCVLDVESGNISVLEGVPENVSPGQAFWAPGDAGVVFVGWWHEPFRLGIRFCTNRRSALYYVDLIGGKCELLSDDSLAVSSPRLSPDQCRIVYLQYPSLIPHHQCSQLCLYDWYTKVTSVVVDVVPRQLGENFSGIYCSLLPLGCWSADSQRVVFDSAQRSRQDLFAVDTQVGTVTSLTAGGSGGSWKLLTIDQDLMVAQFSTPSLPPTLKVGFLPSAGKEQSVLWVSLEEAEPIPDIHWGIRVLQPPPEQENVQYAGLDFEAILLQPGSPPDKTQVPMVVMPHGGPHSSFVTAWMLFPAMLCKMGFAVLLVNYRGSTGFGQDSILSLPGNVGHQDVKDVQFAVEQVLQEEHFDASHVALMGGSHGGFISCHLIGQYPETYRACVARNPVINIASMLGSTDIPDWCVVEAGFPFSSDCLPDLSVWAEMLDKSPIRYIPQVKTPLLLMLGQEDRRVPFKQGMEYYRALKTRNVPVRLLLYPKSTHALSEVEVESDSFMNAVLWLRTHLGS

SEQ ID NO: 45482 - protein, 435 aa, Homo sapiens [sequence omitted]

SEQ ID NO: 45483 - protein, 469 aa, Homo sapiens
MRQISQDFSELSTQLTGVARDLQEEMLPGSSEDWLEPPGAVGRPATEPPREGTTEGDEEDATEAWRLHQKHVFVLSEAGKPVYSRYGSEEALSSTMGVMVALVSFLEADKNAIRSIHADGYKVVFVRRSPLVLVAVARTRQSAQELAQELLYIYYQILSLLTGAQLSHIFQQKQNYDLRRLLSGSERITDNLLQLMARDPSFLMGAARCLPLAAAVRDTVSASLQQARARSLVFSILLARNQLVALVRRKDQFLHPIDLHLLFNLISSSSSFREGEAWTPVCLPKFNAAGFFHAHISYLEPDTDLCLLLVSTDREDFFAVSDCRRRFQERLRKRGAHLALREALRTPYYSVAQVGIPDLRHFLYKSKSSGLFTSPEIEAPYTSEEEQERLLGLYQYLHSRAHNASRPLKTIYYTGPNENLLAWVTGAFELYMCYSPLGTKASAVSAIHKLMRWIRKEEDRLFILTPLTY

SEQ ID NO: 45484 - protein, 715 aa, Homo sapiens
MLRGLPITITESDIREMMESFEGPQPADVRLMKRKTGVSRGFAFVEFYHLQDATSWMEANQKKLVIQGKHIAMHYSNPRPKFEDWLCNKCCLNNFRKRLKCFRCGADKFDSEQEVPPGTTESVQSVDYYCDTIILRNIAPHTVVDSIMTALSPYASLAVNNIRLIKDKQTQQNRGFAFVQLSSAMDASQLLQILQSLHPPLKIDGKTIGVDFAKSARKDLVLSDGNRVSAFSVASTAIAAAQWSSTQSQSGEGGSVDYSYLQPGQDGYAQYAQYSQDYQQFYQQQAGGLESDASSASGTAVTTTSAAVVSQSPQLYNQTSNPPGSPTEEAQPSTSTSTQAPAASPTGVVPGTKYAVPDTSTYQYDESSGYYYDPTTGLYYDPNSQYYYNSLTQQYLYWDGEKETYVPAAESSSHQQSGLPPAKEGKEKKEKPKSKTAQQIAKDMERWAKSLNKQKENFKNSFQPVNSLREEERRESAAADAGFALFEKKGALAERQQLIPELVRNGDEENPLKRGLVAAYSGDSDNEEELVERLESEEEKLADWKKMACLLCRRQFPNKDALVRHQQLSDLHKQNMDIYRRSRLSEQELEALELREREMKYRDRAAERREKYGIPEPPEPKRKKQFDAGTVNYEQPTKDGIDHSNIGNKMLQAMGWREGSGLGRKCQGITAPIEAQVRLKGAGLGAKGSAYGLSGADSYKDAVRKAMFARFTEME

SEQ ID NO: 45485 - protein, 179 aa, Homo sapiens [sequence omitted]

SEQ ID NO: 45486 - protein, 783 aa, Homo sapiens [sequence omitted]

SEQ ID NO: 45487 - protein, 1359 aa, Homo sapiens
MRRNIRKLLREDQLEPVTKAAQQEELERRKRLEQQRKDYAAPIPTVPLEFLPEEIALRASDGPQLPPRVLAQEVICLDSSSGSEDEKSSRDEVIELSSGEEDTLHIVDSSESVSEDDEEEEKGGTHVNDVLNQRDALGRVLVNLNHPPEEENVFLAPQLARAVKPHQIGGIRFLYDNLVESLERFKTSSGFGCILAHSMGLGKTLQVISFIDVLFRHTPAKTVLAIVPVNTLQNWLAEFNMWLPPPEALPADNKPEEVQPRFFKVHILNDEHKTMASRAKVMADWVSEGGVLLMGYEMYRLLTLKKSFATGRPKKTKKRSHPVIIDLDEEDRQQEFRREFEKALCRPGPDVVICDEGHRIKNCQASTSQALKNIRSRRRVVLTGYPLQNNLIEYWCMVDFVRPDFLGTRQEFSNMFERPILNGQCIDSTPQDVRLMRYRSHVLHSLLEGFVQRRGHTVLKIHLPAKEENVILVRLSKIQRDLYTQFMDRFRDCGSSGWLGLNPLKAFCVCCKIWNHPDVLYEALQKESLANEQDLDVEELGSAGTSARCPPQGTKGKGEDSTLASSMGEATNSKFLQGVGFNPFQERGNNIVTYEWAKDLLTNYQTGVLENSPKMVLLFHLIEESVKLGDKILVFSQSLSTLALIEEFLGKREVPCPPGTEGQGAQKWVRNISYFRLDGSTPAFERERLINQFNDPSNLTTWLFLLSTRAGCLGVNLIGANRVVVFDASWNPCHDAQAVCRVYRYGQKKPCYIYRLVADYTLEKKIYDRQISKQGMSDRVVDDLNPMLNFTRKEVENLLHFVEKEPAPQVSLNVKGIKESVLQLACLKYPHLITKEPFEHESLLLNRKDHKLTKAEKKAAKKSYEEDKRTSVPYTRPSYAQYYPASDQSLTSIPAFSQRNWQPTLKGDEKPVASVRPVQSTPIPMMPRHVPLGGSVSSASSTNPSMNFPINYLQRAGVLVQKVVTTTDIVIPGLNSSTDVQARINAGESIHIIRGTKGTYIRTSDGRIFAVRATGKPKVPEDGRMAASGSQGPSCESTSNGRHSASSPKAPDPEGLARPVSPDSPEIISELQQYADVAAARESRQSSPSTNAALPGPPAQLMDSSAVPGTALGTEPRLGGHCLNSSLLVTGQPCGDRHPVLDLRGHKRKLATPPAAQESSRRRSRKGHLPAPVQPYEHGYPVSGGFAMPPVSLNHNLTTPFTSQAGENSLFMGSTPSYYQLSNLLADARLVFPVTTDPLVPAGPVSSSSTATSVTASNPSFMLNPSVPGILPSYSLPFSQPLLSEPRMFAPFPSPVLPSNLSRGMSIYPGYMSPHAGYPAGGLLRSQVPPFDSHEVAEVGFSSNDDEDKDDDVIEVTGK

SEQ ID NO: 45488 - protein, 356 aa, Homo sapiens
MVAPGYVVTVLTWPGTNPTLSSILLNSHTDVVPVFKEHWSHDPFEAFKDSEGYIYARGAQDMKCVSIQYLEAVRRLKVEGHRFPRTIHMTFVPDEEVGGHQGMELFVQRPEFHALRAGFALDEGIANPTDAFTVFYSERSPWWVRVTSTGRPGHASRFMEDTAAEKLHKVVNSILAFREKEWQRLQSNPHLKEGSVTSVNLTKLEGGVAYNVIPATMSASFDFRVAPDVDFKAFEEQLQSWCQAAGEGVTLEFAQKWMHPQVTPTDDSNPWWAAFSRVCKDMNLTLEPEIMPAATDNRYIRAVGVPALGFSPMNRTPVLLHDHDERLHEAVFLRGVDIYTRLLPALASVPALPSDS

SEQ ID NO: 45489 - protein, 117 aa, Homo sapiens [sequence omitted]

SEQ ID NO: 45490 - protein, 130 aa, Homo sapiens
MSGWSYKRVEKSDLKYPLIHGQGRQARLLGTLAVSRGLGDHQLRVLDTNIQLKPFLLSVPQVTVLDVDQLELQEDDVVVMATDGLWDVLSNEQVAWLVRSFLPGNQEDPHRYCSCWGPAWAWVGASSKPK

SEQ ID NO: 45491 - protein, 615 aa, Homo sapiens
MKDFTKGFSPESKGYAIGNAPELAKAHNSHARPEPRHLPEKQNGLSAVRTMEAFHFVSYVPITGRLFELDGLKVYPIDHGPWGEDEEWTDKARRVIMERIGLATAGEPYHDIRFNLMAVVPDRRIKYEARLHVLKVNRQTVLEALQQLIRVTQPELIQTHKSQESQLPEESKSASNKSPLVLEANRAPAASEGNHTDGAEEAAGSCAQAPSHSPPNKPKLVVKPPGSSLNGVHPNPTPIVQRLPAFLDNHNYAKSPMQEEEDLAAGVGRSRVPVRPPQQYSDDEDDYEDDEEDDVQNTNSALRYKGKGTGKPGALSGSADGQLSVLQPNTINVLAEKLKESQKDLSIPLSIKTSSGAGSPAVAVPTHSQPSPTPSNESTDTASEIGSAFNSPLRSPIRSANPTRPSSPVTSHISKVLFGEDDSLLRVDCIRYNRAVRDLGPVISTGLLHLAEDGVLSPLALTEGGKGSSPSIRPIQGSQGSSSPVEKEVVEATDSREKTGMVRPGEPLSGEKYSPKELLALLKCVEAEIANYEACLKEEVEKRKKFKIDDQRRTHNYDEFICTFISMLAQEGMLANLVEQNISVRRRQGVSIGRLHKQRKPDRRKRSRPYKAKRQ

SEQ ID NO: 45492 - protein, 230 aa, Homo sapiens
MTCHKRYKIQKKVREHHRKLRKEAKKRGHKKPRKDPGVPNSAPFKEALLREAELRKQRLEELKQQQKLDRQKELEKKRKLETNPDIKPSNVEPMEKEFGLCKTENKAKSGKQNSKKLYCQELKKVIEASDVVLEVLDARDPLGCRCPQVEEAIVQSGQKKLVLILNKSDLVPKENLESWLNYLKKELPTVVFRASTKPKDKGKITKVSFISGKKCDSFRFWLKYDECTKS

SEQ ID NO: 45493 - protein, 759 aa, Homo sapiens
MGFCEGGDLYRKLKEQKGQLLPENQVVEWFVQIAMALQYLHEKHILHRDLKTQNVFLTRTNIIKVGDLGIARVLENHCDMASTLIGTPYYMSPELFSNKPYNYKSDVWALGCCVYEMATLKHAFNAKDMNSLVYRIIEGKLPPMPRDYSPELAELIRTMLSKRPEERPSVRSILRQPYIKRQISFFLEATKIKTSKNNIKNGDSQSKPFATVVSGEAESNHEVIHPQPLSSEGSQTYIMGEGKCLSQEKPRASGLLKSPASLKAHTCKQDLSNTTELATISSVNIDILPAKGRDSVSDGFVQENQPRYLDASNELGGICSISQVEEEMLQDNTKSSAQPENLIPMWSSDIVTGEKNEPVKPLQPLIKEQKPKDQSLALSPKLECSGTILAHSNLRLLGSSDSPASASRVAGITGVCHHAQDQVAGECIIEKQGRIHPDLQPHNSGSEPSLSRQRRQKRREQTEHRGEKRQVRRDLFAFQESPPRFLPSHPIVGKVDVTSTQKEAENQRRVVTGSVSSSRSSEMSSSKDRPLSARERRRLKQSQEEMSSSGPSVRKASLSVAGPGKPQEEDQPLPARRLSSDCSVTQERKQIHCLSEDELSSSTSSTDKSDGDYGEGKGQTNEINALVQLMTQTLKLDSKESCEDVPVANPVSEFKLHRKYRDTLILHGKVAEEAEEIHFKELPSAIMPGSEKIRRLVEVLRTDVIRGLGVQLLEQVYDLLEEEDEFDREVRLREHMGEKYTTYSVKARQLKFFEENMNF

SEQ ID NO: 45494 - protein, 259 aa, Homo sapiens
MSYLTSYQPPQNPYYYVDGDPHFIIQIPEKDDALCFNIDEAPGTVLRLIQDAVTGLTVNGQITGDKRGSPDSKTRKTYFGKLGIANAQMDFQVEVTTEKITLWNRAVPSTFSWLDTVTVTQDGLSMMINRKNMVVSFGDGVTFVVVLHQVWKKHPVHRDFLGFYVVDSHRMSAQTHGLLGQFFQPFDFKVSDIRPGSDPTKPDATLVVKNHQLIVTRGSQKDYRKDASIGTKVVCWFVHNNGEGLIDGVHTDYIVPNLF

SEQ ID NO: 45495 - protein, 340 aa, Homo sapiens
MHSFGIFLQGLLGVVAFSTLMLKRFREPKHERRPWRIWFLDTSKQAIGMLFIHFANVYLADLTEEDPCSLYLINFLLDATVGMLLIYVGVRAVSVLVEWQQWESLRFGEYGDPLQCGAWVGQCALYIVIMIFEKSVVFIVLLILQWKKVALLNPIENPDLKLAIVMLIVPFFVNALMFWVVDNFLMRKGKTKAKLEERGANQDSRNGSKVRYRRAASHEESESEILISADDEMEESDVEEDLRRLTPLKPVKKKKHRFGLPAGAQEAPIKKKRPPVKDEDLKGARGNLTKNQEIKSKTYQVMRECEQAGSAAPSVFSRTRTGTETVFEKPKAGPTKSVFG

SEQ ID NO: 45496 - protein, 262 aa, Homo sapiens
MHSFGIFLQGLLGVVAFSTLMLKRFREPKHERRPWRIWFLDTSKQAIGMLFIHFANVYLADLTEEDPCSLYLINFLLDATVGMLLIYVGVRAVSVLVEWQQWESLRFGEYGDPLQCGAWVGQCALYIVIMIFEKSVVFIVLLILQWKKVALLNPIENPDLKLAIVMLIVPFFVNALMFWVVDNFLMRKGKTKAKLEERGANQDSRNGSKVRYRRAASHEESESEILISADDEMEESDVEEDLRRLTPLKPVKKKKHRFGLPV

SEQ ID NO: 45497 - protein, 572 aa, Homo sapiens [sequence omitted]

SEQ ID NO: 45498 - protein, 85 aa, Homo sapiens
MDVGNGAPLRGTVACAPSPDRRLPSCAPTRPCPCCRLARVRAPSIPGRIPALPQLGSPGPGASARFSSGSLRPPDARRRTPQPCS

SEQ ID NO: 45499 - protein, 527 aa, Homo sapiens
MFPSPKAWNFRGRKRKQSTQDEDAVSLCSLDISEPSNKRVKPLSRVTSLANLIPPVKATPLKRFSQTLQRSISFRSESRPDILAPRPWSRNAAPSSTKRRDSKLWSETFDVCVNQMLTSKEIKRQEAIFELSQGEEDLIEDLKLAKKAYHDPMLKLSIMTEQELNQIFGTLDSLIPLHEELLSQLRDVRKPDGSTEHVGPILVGWLPCLSSYDSYCSNQVAAKALLDHKKQDHRVQDFLQRCLESPFSRKLDLWNFLDIPRSRLVKYPLLLREILRHTPNDNPDQQHLEEAINIIQGIVAEINTKTGESECRYYKERLLYLEEGQKDSLIDSSRVLCCHGELKNNRGVKLHVFLFQEVLVITRAVTHNEQLCYQLYRQPIPVKDLLLEDLQDGEVRLGGSLRGAFSNNERIKNFFRVSFKNGSQSQTHSLQANDTFNKQQWLNCIRQAKETVLCAAGQAGVLDSEGSFLNPTTGSRELQGETKLEQMDQSDSESDCSMDTSEVSLDCERMEQTDSSCGNSRHGESNV

SEQ ID NO: 45500 - protein, 679 aa, Homo sapiens
MEARLRSDVIHAPLPSPVDKVAANTPSMYSQELFQLSQYLQEALHREQMLEQKLATLQRLLAITQEASDTSWQALIDEDRLLSRLEVMGNQLQACSKNQTEDSLRKELIALQEDKHNYETTAKESLRRVLQEKIEVVRKLSEVERSLSNTEDECTHLKEMNERTQEELRELANKYNGAVNEIKDLSDKLKVAEGKQEEIQQKGQAEKKELQHKIDEMEEKEQELQAKIEALQADNDFTNERLTALQEHLLSKSGGDCTFIHQFIECQKKLIVEGHLTKAVEETKLSKENQTRAKESDFSDTLSPSKEKSSDDTTDAQMDEQDLNEPLAKVSLLKDDLQGAQSEIEAKQEIQHLRKELIEAQELARTSKQKCFELQALLEEERKAYRNQVEESTKQIQVLQAQLQRLHIDTENLREEKDSEITSTRDELLSARDEILLLHQAAAKVASERDTDIASLQEELKKVRAELERWRKAASEYEKEITSLQNSFQLRCQQCEDQQREEATRLQGELEKLRKEWNALETECHSLKRENVLLSSELQRQEKELHNSQKQSLELTSDLSILQMSRKELENQVGSLKEQHLRDSADLKTLLSKAENQAKDVQKEYEKTQTVLSELKLKFEMTEQEKQSITDELKQCKNNLKLLREKGNNKPWPWMPMLAALVAVTAIVLYVPGLARASP

SEQ ID NO: 45501 - protein, 374 aa, Homo sapiens
MEARLRSDVIHAPLPSPVDKVAANTPSMYSQELFQLSQYLQEALHREQMLEQKLATLQRLLAITQEASDTSWQALIDEDRLLSRLEVMGNQLQACSKNQTEDSLRKELIALQEDKHNYETTAKESLRRVLQEKIEVVRKLSEVERSLSNTEDECTHLKEMNERTQEELRELANKYNGAVNEIKDLSDKLKVAEGKQEEIQQKGQAEKKELQHKIDEMEEKEQELQAKIEALQADNDFTNERLTALQVRLEHLQEKTLKECSSLGIQVDDFLPKINGSTEKEKLIVEGHLTKAVEETKLSKENQTRAKESDFSDTLSPSKEKSSDDTTDAQMDEQDLNEPLAKVSLLKGTLTCFYDIVNQGIKSPFAIKSVLDIM

SEQ ID NO: 45502 - protein, 696 aa, Homo sapiens
MEARLRSDVIHAPLPSPVDKVAANTPSMYSQELFQLSQYLQEALHREQMLEQKLATLQRLLAITQEASDTSWQALIDEDRLLSRLEVMGNQLQACSKNQTEDSLRKELIALQEDKHNYETTAKESLRRVLQEKIEVVRKLSEVERSLSNTEDECTHLKEMNERTQEELRELANKYNGAVNEIKDLSDKLKVAEGKQEEIQQKGQAEKKELQHKIDEMEEKEQELQAKIEALQADNDFTNERLTALQVRLEHLQEKTLKECSSLEHLLSKSGGDCTFIHQFIECQKKLIVEGHLTKAVEETKLSKENQTRAKESDFSDTLSPSKEKSSDDTTDAQMDEQDLNEPLAKVSLLKDDLQGAQSEIEAKQEIQHLRKELIEAQELARTSKQKCFELQALLEEERKAYRNQVEESTKQIQVLQAQLQRLHIDTENLREEKDSEITSTRDELLSARDEILLLHQAAAKVASERDTDIASLQEELKKVRAELERWRKAASEYEKEITSLQNSFQLRCQQCEDQQREEATRLQGELEKLRKEWNALETECHSLKRENVLLSSELQRQEKELHNSQKQSLELTSDLSILQMSRKELENQVGSLKEQHLRDSADLKTLLSKAENQAKDVQKEYEKTQTVLSELKLKFEMTEQEKQSITDELKQCKNNLKLLREKGNNKPWPWMPMLAALVAVTAIVLYVPGLARASP

SEQ ID NO: 45503 - protein, 710 aa, Homo sapiens
MEARLRSDVIHAPLPSPVDKVAANTPSMYSQELFQLSQYLQEALHREQMLEQKLATLQRLLAITQEASDTSWQALIDEDRLLSRLEVMGNQLQACSKNQTEDSLRKELIALQEDKHNYETTAKESLRRVLQEKIEVVRKLSEVERSLSNTEDECTHLKEMNERTQEELRELANKYNGAVNEIKDLSDKLKVAEGKQEEIQQKGQAEKKELQHKIDEMEEKEQELQAKIEALQADNDFTNERLTALQVRLEHLQEKTLKECSSLGIQVDDFLPKINGSTEKEHLLSKSGGDCTFIHQFIECQKKLIVEGHLTKAVEETKLSKENQTRAKESDFSDTLSPSKEKSSDDTTDAQMDEQDLNEPLAKVSLLKDDLQGAQSEIEAKQEIQHLRKELIEAQELARTSKQKCFELQALLEEERKAYRNQVEESTKQIQVLQAQLQRLHIDTENLREEKDSEITSTRDELLSARDEILLLHQAAAKVASERDTDIASLQEELKKVRAELERWRKAASEYEKEITSLQNSFQLRCQQCEDQQREEATRLQGELEKLRKEWNALETECHSLKRENVLLSSELQRQEKELHNSQKQSLELTSDLSILQMSRKELENQVGSLKEQHLRDSADLKTLLSKAENQAKDVQKEYEKTQTVLSELKLKFEMTEQEKQSITDELKQCKNNLKLLREKGNNPSILQPVPAVFIGLFLAFLFWCFGPLW

SEQ ID NO: 45504 - protein, 474 aa, Homo sapiens
MDREFIAERQKGLQNYLNVITTNHILSNCELVKKFLDPNNYSANYTEIALQQVSMFFRSEPKWEVVEPLKDIGWRIRKKYFLMKIKNQPKERLVLSWADLGPDKYLSDKDFQCLIKLLPSCLHPYIYRVTFATANESSALLIRMFNEKGTLKDLIYKAKPKDPFLKKYCNPKKIQGLELQQIKTYGRQILEVLKFLHDKGFPYGHLHASNVMLDGDTCRLLDLENSLLGLPSFYRSYFSQFRKINTLESVDVHCFGHLLYEMTYGRPPDSVPVDSFPPAPSMAVVAVLESTLSCEACKNGMPTISRLLQMPLFSDVLLTTSEKPQFKIPTKLKEALRIAKECIEKRLIEEQKQIHQHRRLTRAQSHHGSEEERKKRKILARKKSKRSALENSEEHSAKYSNSNNSGISALPPPPPPPPPPAAPLPPASTEAPAQLSSQAVNGMSRGALLSSIQNFQKGTLRKAKTCDHSAPKIG

SEQ ID NO: 45505 - protein, 495 aa, Homo sapiens
MDREFIAERQKGLQNYLNVITTNHILSNCELVKKFLDPNNYSANYTEIALQQVSMFFRSEPKWEVVEPLKDIGWRIRKKYFLMKIKNQPKERLVLSWADLGPDKYLSDKDFQCLIKLLPSCLHPYIYRVTFATANESSALLIRMFNEKGTLKDLIYKAKPKDPFLKKYCNPKKIQGLELQQIKTYGRQILEVLKFLHDKGFPYGHLHASNVMLDGDTCRLLDLENSLLGLPSFYRSYFSQFRKINTLESVDVHCFGHLLYEMTYGRPPDSVPVDSFPPAPSMAVVAVLESTLSCEACKNGMPTISRLLQMPLFSDVLLTTSEKPQFKIPTKLKEALRIAKECIEKRLIEEQKQIHQHRRLTRAQSHHGSEEERKKRKILARKKSKRSALENSEEHSAKYSNSNNSAGSGASSPLTSPSSPTPPSTSGISALPPPPPPPPPPAAPLPPASTEAPAQLSSQAVNGMSRGALLSSIQNFQKGTLRKAKTCDHSAPKIG

SEQ ID NO: 45506 - protein, 497 aa, Homo sapiens
MDREFIAERQKGLQNYLNVITTNHILSNCELVKKFLDPNNYSANYTEIALQQVSMFFRSEPKWEVVEPLKDIGWRIRKKYFLMKIKNQPKERLVLSWADLGPDKYLSDKDFQCLIKLLPSCLHPYIYRVTFATANESSALLIRMFNEKGTLKDLIYKAKPKDPFLKKYCNPKKIQGLELQQIKTYGRQILEVLKFLHDKGFPYGHLHASNVMLDGDTCRLLDLENSLLGLPSFYRSYFSQFRKINTLESVDVHCFGHLLYEMTYGRPPDSVPVDSFPPAPSMAVVAVLESTLSCEACKNGMPTISRLLQMPLFSDVLLTTSEKPQFKIPTKLKEALRIAKECIEKRLIEEQKQIHQHRRLTRAQSHHGSEEERKKRKILARKKSKRSALENSEEHSAKYSNSNNSGSGASSPLTSPSSPTPPSTSAALGLSKRCKERDICITSTSSTSTTTSSSLASCEHRGTCPALVSGCEWHEPRGLAQLHPEFPKRNFEESQNL

SEQ ID NO: 45507 - protein, 1243 aa, Homo sapiens [sequence omitted]

SEQ ID NO: 45508 - protein, 1272 aa, Homo sapiens
MQIFFYNPDDFDSFQTAISENRIIGAMAIFFQVSPRDNSALDPIIHGLKGVVHHEKETFLDPFVLRDLLPASLGSYYRYTGSLTTPPCSEIVEWIVFRRPVPISYHQLEAFYSIFTTEQQDHVKSVEYLRNNFRPQQRLHDRVVSKSAVRDSWNHDMTDFLENPLGTEASKVCSSPPIHMKVQPLNQTALQVSWSQPETIYHPPIMNYMISYSWTKNEDEKEKTFTKDSDKDLKATISHVSPDSLYLFRVQAVCRNDMRSDFSQTMLFQANTTRIFQGTRIVKTGVPTASPASSADMAPISSGSSTWTSSGIPFSFVSMATGMGPSSSGSQATVASVVTSTLLAGLGFGGGGISSFPSTVWPTRLPTAASASKQAARPVLATTEALASPGPDGDSSPTKDGEGTEEGEKDEKSESEDGEREHEEDGEKDSEKKEKSGVTHAAEERNQTEPSPTPSSPNRTAEGGHQTIPGHEQDHTAVPTDQTGGRRDAGPGLDPDMVTSTQVPPTATEEQYAGSDPKRPEMPSKKPMSRGDRFSEDSRFITVNPAEKNTSGMISRPAPGRMEWIIPLIVVSALTFVCLILLIAVLVYWRGCNKIKSKGFPRRFREVPSSGERGEKGSRKCFQTAHFYVEDSSSPRVVPNESIPIIPIPDDMEAIPVKQFVKHIGELYSNNQHGFSEDFEEVQRCTADMNITAEHSNHPENKHKNRYINILAYDHSRVKLRPLPGKDSKHSDYINANYVDGYNKAKAYIATQGPLKSTFEDFWRMIWEQNTGIIVMITNLVEKGRRKCDQYWPTENSEEYGNIIVTLKSTKIHACYTVRRFSIRNTKVKKGQKGNPKGRQNERVVIQYHYTQWPDMGVPEYALPVLTFVRRSSAARMPETGPVLVHCSAGVGRTGTYIVIDSMLQQIKDKSTVNVLGFLKHIRTQRNYLVQTEEQYIFIHDALLEAILGKETEVSSNQLHSYVNSILIPGVGGKTRLEKQFKLVTQCNAKYVECFSAQKECNKEKNRNSSVVPSERARVGLAPLPGMKGTDYINASYIMGYYRSNEFIITQHPLPHTTKDFWRMIWDHNAQIIVMLPDNQSLAEDEFVYWPSREESMNCEAFTVTLISKDRLCLSNEEQIIIHDFILEATQDDYVLEVRHFQCPKWPNPDAPISSTFELINVIKEEALTRDGPTIVHDEYGAVSAGMLCALTTLSQQLENENAVDVFQVAKMINLMRPGVFTDIEQYQFIYKAMLSLVSTKENGNGPMTVDKNGAVLIADESDPAESMESLV

SEQ ID NO: 45509 - protein, 27 aa, Homo sapiens
MLPALCGAPAGPPSAPGSWLPTPRWVP

SEQ ID NO: 45510 - protein, 397 aa, Homo sapiens [sequence omitted]

SEQ ID NO: 45511 - protein, 38 aa, Homo sapiens
MQSESGIVPDFEVGEEFHEEPKTYYELKSQPLKSRLFF

SEQ ID NO: 45512 - protein, 675 aa, Homo sapiens [sequence omitted]

SEQ ID NO: 45513 - protein, 674 aa, Homo sapiens [sequence omitted]

SEQ ID NO: 45514 - protein, 334 aa, Homo sapiens
MQESGTETKSNGSAIQNGSGGSNHLLECGGLREGRSNGETPAVDIGAADLAHAQQQQQQALQVARQLLLQQQQQQQVSGLKSPKRNDKQPALQVPVSVAMMTPQVITPQQMQQILQQQVLSPQQLQVLLQQQQALMLQQQQLQEFYKKQQEQLQLQLLQQQHAGKQPKEQQQVATQQLAFQQQLLQMQQLQQQHLLSLQRQGLLTIQPGQPALPLQPLAQGMIPTELQQLWKEVTSAHTAEETTGNNHSSLDLTTTCVSSSAPSKTSLIMNPHASTNGQLSVHTPKRESLSHEEHPHSHPLYGHGVCKWPGCEAVCEDFQSFLNLQKTKNACKP

SEQ ID NO: 45515 - protein, 333 aa, Homo sapiens
MQESGTETKSNGSAIQNGSGGSNHLLECGGLREGRSNGETPAVDIGAADLAHAQQQQQQALQVARQLLLQQQQQQQVSGLKSPKRNDKQPALQVPVSVAMMTPQVITPQQMQQILQQQVLSPQQLQVLLQQQQALMLQQQLQEFYKKQQEQLQLQLLQQQHAGKQPKEQQQVATQQLAFQQQLLQMQQLQQQHLLSLQRQGLLTIQPGQPALPLQPLAQGMIPTELQQLWKEVTSAHTAEETTGNNHSSLDLTTTCVSSSAPSKTSLIMNPHASTNGQLSVHTPKRESLSHEEHPHSHPLYGHGVCKWPGCEAVCEDFQSFLNLQKTKNACKP

SEQ ID NO: 45516 - protein, 379 aa, Homo sapiens
MIQWSQFKGYFIFKLEKVMDDFRTSAPEPRGPPNPNVEYIPFDEMKERILKIVTGFNGIPFTIQRLCELLTDPRRNYTGTDKFLRGVEKNVMVVSCVYPSSEKNNSNSLNRMNGVMFPGNSPSYTERSNINGPGTPRPLNRPKVSLSAPMTTNGLPESTDSKEANLQQNEEKNHSDSSTSESEVSSVSPLKNKHPDEDAVEAEGHEVKRLRFDKEGEVRETASQTTSSEISSVMVGETEASSSSQDKDKDSRCTRQHCTEEDEEEDEEEEEESFMTSREMIPERKNQEKESDDALTVNEETSEENNQMEESDVSQAEKDLLHSEGSENEGPVSSSSSDCRETEELVGSNSSKTGEILSESSMENDDEATEVTDEPMEQD

SEQ ID NO: 45517 - protein, 937 aa, Homo sapiens [sequence omitted]

SEQ ID NO: 45518 - protein, 956 aa, Homo sapiens
MEHRYKLNGGNLVVINPNRNWDTGTYQCFATNSLGTIVSREAKLQFAYLENFKTKMRSTVSVREGQGVVLLCGPPPHSGELSYAWIFNEYPSFVEEDSRRFVSQETGHLYISKVEPSDVGNYTCVVTSMVTNARVLGSPTPLVLRSDGVMGEYEPKIEVQFPETLPAAKGSTVKLECFALGNPIPQINWRRSDGLPFSSKIKLRKFSGVLEIPNFQQEDAGSYECIAENSRGKNVARGRLTYYAKPHWVQLIKDVEIAVEDSLYWECRASGKPKPSYRWLKNGAALVLEERTQIENGALTISNLSVTDSGMFQCIAENKHGLVYSSAELKVVASAPDFSKNPMKKLVQVQVGSLVSLDCKPRASPRALSSWKKGDVSVQEHERISLLNDGGLKIANVTKADAGTYTCMAENQFGKANGTTHLVVTEPTRITLAPSNMDVSVGESVILPCQVQHDPLLDIIFTWYFNGALADFKKDGSHFEKVGGSSSGDLMIRNIQLKHSGKYVCMVQTGVDSVSSAADLIVRGSPGPPENVKVDEITDTTAQLSWKEGKDNHSPVISYSIQARTPFSVGWQTVTTVPEVIDGKTHTATVVELNPWVEYEFRVVASNKIGGGEPSLPSEKVRTEEAVPEVPPSEVNGGGGSRSELVITWDPVPEELQNGEGFGYVVAFRPLGVTTWIQTVVTSPDTPRYVFRNESIVPYSPYEVKVGVYNNKGEGPFSPVTTVFSAEEEPTVAPSQVSANSLSSSEIEVSWNTIPWKLSNGHLLGYEVRYWNGGGKEESSSKMKVAGNETSARLRGLKSNLAYYTAVRAYNSAGAGPFSATVNVTTKKTPPSQPPGNVVWNATDTKVLLNWEQVKAMENESEVTGYKVFYRTSSQNNVQVLNTNKTSAELVLPIKEDYIIEVKATTDGGDGTSSEQIRIPRITSMDARGSTSAISNVHPMSSYMPIVLFLIVYVLW

SEQ ID NO: 45519 - protein, 21 aa, Homo sapiens
MDVDNGSGPWLAQEPGPDTRA

SEQ ID NO: 45520 - protein, 845 aa, Homo sapiens
MIFKLEQGAEPWIVEETPNLRLSAVQIIDDLIERSHESHDRFFWQIVITNSNTSTQERVELGKTFNLNSNHVLNLIINNGNSSGMKPGQFNDCQNMLFPIKPGETQSGEKPHVCDITRRSHRHHEHLTQHHKIQTLLQTFQCNEQGKTFNTEAMFFIHKRVHIVQTFGKYNEYEKACNNSAVIVQVITQVGQPTCCRKSDFTKHQQTHTGEKPYECVECEKPSISKSDLMLQCKMPTEEKPYACNWCEKLFSYKSSLIIHQRIHTGEKPYGCNECGKTFRRKSFLTLHERTHTGDKPYKCIECGKTFHCKSLLTLHHRTHSGEKPYQCSECGKTFSQKSYLTIHHRTHTGEKPYACDHCEEAFSHKSRLTVHQRTHTGEKPYECNECGKPFINKSNLRLHQRTHTGEKPYECNECGKTFHRKSFLTIHQWTHTGEKPYECNECGKTFRCKSFLTVHQRTHAGEKPYACNECGKTYSHKSYLTVHHRTHTGEKPYECNECGKSFHCKSFLTIHQRTHAGKKPYECNECEKTFINKLNLGIHKRTHTGERPYECNECGKTFRQKSNLSTHQGTHTGEKPYVCNECGKTFHRKSFLTIHQRTHTGKNRMDVMNVEKLFVRNHTLLYIRELTPGKSPMNVMNVENPFIRRQIFRSIKVFTRGRNPMNVANVEKPCQKSVLTVHHRTHTGEKPYECNECGKTFCHKSNLSTHQGTHSGEKPYECDECRKTFYDKTVLTIHQRTHTGEKPFECKECRKTFSQKSKLFVHHRTHTGEKPFRCNECRKTFSQKSGLSIHQRTHTGEKPYECKECGKTFCQKSHLSRHQQTHIGEKSDVAEAGYVFPQNHSFFP

SEQ ID NO: 45521 - protein, 1374 aa, Homo sapiens
MFTQLLLCGFLYVRVDGSRLRQEDFPPRIVEHPSDVIVSKGEPTTLNCKAEGRPTPTIEWYKDGERVETDKDDPRSHRMLLPSGSLFFLRIVHGRRSKPDEGSYVCVARNYLGEAVSRNASLEVALLRDDFRQNPTDVVVAAGEPAILECQPPRGHPEPTIYWKKDKVRIDDKEERISIRGGKLMISNTRKSDAGMYTCVGTNMVGERDSDPAELTVFERPTFLRRPINQVVLEEEAVEFRCQVQGDPQPTVRWKKDDADLPRGRYDIKDDYTLRIKKTMSTDEGTYMCIAENRVGKMEASATLTVRAPPQFVVRPRDQIVAQGRTVTFPCETKGNPQPAVFWQKEGSQNLLFPNQPQQPNSRCSVSPTGDLTITNIQRSDAGYYICQALTVAGSILAKAQLEVTDVLTDRPPPIILQGPANQTLAVDGTALLKCKATGDPLPVISWLKEGFTFPGRDPRATIQEQGTLQIKNLRISDTGTYTCVATSSSGETSWSAVLDVTESGATISKNYDLSDLPGPPSKPQVTDVTKNSVTLSWQPGTPGTLPASAYIIEAFSQSVSNSWQTVANHVKTTLYTVRGLRPNTIYLFMVRAINPQGLSDPSPMSDPVRTQDISPPAQGVDHRQVQKELGDVLVRLHNPVVLTPTTVQVTWTVDRQPQFIQGYRVMYRQTSGLQATSSWQNLDAKVPTERSAVLVNLKKGVTYEIKVRPYFNEFQGMDSESKTVRTTEEAPSAPPQSVTVLTVGSYNSTSISVSWDPPPPDHQNGIIQEYKIWCLGNETRFHINKTVDAAIRSVIIGGLFPGIQYRVEVAASTSAGVGVKSEPQPIIIGRRNEVVITENNNSITEQITDVVKQPAFIAGIGGACWVILMGFSIWLYWRRKKRKGLSNYAVTFQRGDGGLMSNGSRPGLLNAGDPSYPWLADSWPATSLPVNNSNSGPNEIGNFGRGDVLPPVPGQGDKTATMLSDGAIYSSIDFTTKTSYNSSSQITQATPYATTQILHSNSIHELAVDLPDPQWKSSIQQKTDLMGFGYSLPDQNKGNNGGKGGKKKKNKNSSKPQKNNGSTWANVPLPPPPVQPLPGTELEHYAVEQQENGYDSDSWCPPLPVQTYLHQGLEDELEEDDDRVPTPPVRGVASSPAISFGQQSTATLTPSPREEMQPMLQAHLDELTRAYQFDIAKQTWHIQSNNQPPQPPVPPLGYVSGALISDLETDVADDDADDEEEALEIPRPLRALDQTPGSSMDNLDSSVTGKAFTSSQRPRPTSPFSTDSNTSAALSQSQRPRPTKKHKGGRMDQQPALPHRREGMTDEEALVPYSKPSFPSPGGHSSSGTASSKGSTGPRKTEVLRAGHQRNASDLLDIGYMGSNSQGQFTGEL

SEQ ID NO: 45522 - protein, 1472 aa, Homo sapiens
MVAVGEPAVMECQPPRGHPEPTISWKKDGSPLDDKDERITIRGGKLMITYTRKSDAGKYVCVGTNMVGERESEVAELTVLERPSFVKRPSNLAVTVDDSAEFKCEARGDPVPTVRWRKDDGELPKSRYEIRDDHTLKIRKVTAGDMGSYTCVAENMVGKAEASATLTVQEPPHFVVKPRDQVVALGRTVTFQCEATGNPQPAIFWRREGSQNLLFSYQPPQSSSRFSVSQTGDLTITNVQRSDVGYYICQTLNVAGSIITKAYLEVTDVIADRPPPVIRQGPVNQTVAVDGTFVLSCVATGSPVPTILWRKDGVLVSTQDSRIKQLENGVLQIRYAKLGDTGRYTCIASTPSGEATWSAYIEVQEFGVPVQPPRPTDPNLIPSAPSKPEVTDVSRNTVTLSWQPNLNSGATPTSYIIEAFSHASGSSWQTVAENVKTETSAIKGLKPNAIYLFLVRAANAYGISDPSQISDPVKTQDVLPTSQGVDHKQVQRELGNAVLHLHNPTVLSSSSIEVHWTVDQQSQYIQGYKILYRPSGANHGESDWLVFEVRTPAKNSVVIPDLRKGVNYEIKARPFFNEFQGADSEIKFAKTLEEAPSAPPQGVTVSKNDGNGTAILVSWQPPPEDTQNGMVQEYKVWCLGNETRYHINKTVDGSTFSVVIPFLVPGIRYSVEVAASTGAGSGVKSEPQFIQLDAHGNPVSPEDQVSLAQQISDVVKQPAFIAGIGAACWIILMVFSIWLYRHRKKRNGLTSTYAGIRKVPSFTFTPTVTYQRGGEAVSSGGRPGLLNISEPAAQPWLADTWPNTGNNHNDCSISCCTAGNGNSDSNLTTYSRPADCIANYNNQLDNKQTNLMLPESTVYGDVDLSNKINEMKTFNSPNLKDGRFVNPSGQPTPYATTQLIQSNLSNNMNNGSGDSGEKHWKPLGQQKQEVAPVQYNIVEQNKLNKDYRANDTVPPTIPYNQSYDQNTGGSYNSSDRGSSTSGSQGHKKGARTPKVPKQGGMNWADLLPPPPAHPPPHSNSEEYNISVDESYDQEMPCPVPPARMYLQQDELEEEEDERGPTPPVRGAASSPAAVSYSHQSTATLTPSPQEELQPMLQDCPEETGHMQHQPDRRRQPVSPPPPPRPISPPHTYGYISGPLVSDMDTDAPEEEEDEADMEVAKMQTRRLLLRGLEQTPASSVGDLESSVTGSMINGWGSASEEDNISSGRSSVSSSDGSFFTDADFAQAVAAAAEYAGLKVARRQMQDAAGRRHFHASQCPRPTSPVSTDSNMSAAVMQKTRPAKKLKHQPGHLRRETYTDDLPPPPVPPPAIKSPTAQSKTQLEVRPVVVPKLPSMDARTDRSSDRKGSSYKGREVLDGRQVVDMRTNPGDPREAQEQQNDGKGRGNKAAKRDLPPAKTHLIQEDILPYCRPTFPTSNNPRDPSSSSSMSSRGSGSRQREQANVGRRNIAEMQVLGGYERGEDNNEELEETES

SEQ ID NO: 45523 - protein, 1411 aa, Homo sapiens
MVAVGEPAVMECQPPRGHPEPTISWKKDGSPLDDKDERITIRGGKLMITYTRKSDAGKYVCVGTNMVGERESEVAELTVLERPSFVKRPSNLAVTVDDSAEFKCEARGDPVPTVRWRKDDGELPKSRYEIRDDHTLKIRKVTAGDMGSYTCVAENMVGKAEASATLTVQVGSEPPHFVVKPRDQVVALGRTVTFQCEATGNPQPAIFWRREGSQNLLFSYQPPQSSSRFSVSQTGDLTITNVQRSDVGYYICQTLNVAGSIITKAYLEVTDVIADRPPPVIRQGPVNQTVAVDGTFVLSCVATGSPVPTILWRKDGVLVSTQDSRIKQLENGVLQIRYAKLGDTGRYTCIASTPSGEATWSAYIEVQEFGVPVQPPRPTDPNLIPSAPSKPEVTDVSRNTVTLSWQPNLNSGATPTSYIIEAFSHASGSSWQTVAENVKTETSAIKGLKPNAIYLFLVRAANAYGISDPSQISDPVKTQDVLPTSQGVDHKQVQRELGNAVLHLHNPTVLSSSSIEVHWTVDQQSQYIQGYKILYRPSGANHGESDWLVFEVRTPAKNSVVIPDLRKGVNYEIKARPFFNEFQGADSEIKFAKTLEEAPSAPPQGVTVSKNDGNGTAILVSWQPPPEDTQNGMVQEYKVWCLGNETRYHINKTVDGSTFSVVIPFLVPGIRYSVEVAASTGAGSGVKSEPQFIQLDAHGNPVSPEDQVSLAQQISDVVKQPAFIAGIGAACWIILMVFSIWLYRHRKKRNGLTSTYAGIRKVTYQRGGEAVSSGGRPGLLNISEPAAQPWLADTWPNTGNNHNDCSISCCTAGNGNSDSNLTTYSRPGQPTPYATTQLIQSNLSNNMNNGSGDSGEKHWKPLGQQKQEVAPVQYNIVEQNKLNKDYRANDTVPPTIPYNQSYDQNTGGSYNSSDRGSSTSGSQGHKKGARTPKVPKQGGMNWADLLPPPPAHPPPHSNSEEYNISVDESYDQEMPCPVPPARMYLQQDELEEEEDERGPTPPVRGAASSPAAVSYSHQSTATLTPSPQEELQPMLQDCPEETGHMQHQPDRRRQPVSPPPPPRPISPPHTYGYISGPLVSDMDTDAPEEEEDEADMEVAKMQTRRLLLRGLEQTPASSVGDLESSVTGSMINGWGSASEEDNISSGRSSVSSSDGSFFTDADFAQAVAAAAEYAGLKVARRQMQDAAGRRHFHASQCPRPTSPVSTDSNMSAAVMQKTRPAKKLKHQPGHLRRETYTDDLPPPPVPPPAIKSPTAQSKTQLEVRPVVVPKLPSMDARTDRSSDRKGSSYKGREVLDGRQVVDMRTNPGDPREAQEQQNDGKGRGNKAAKRDLPPAKTHLIQEDILPYCRPTFPTSNNPRDPSSSSSMSSRGSGSRQREQANVGRRNIAEMQVLGGYERGEDNNEELEETES

SEQ ID NO: 45524 - protein, 1466 aa, Homo sapiens
MVAVGEPAVMECQPPRGHPEPTISWKKDGSPLDDKDERITIRGGKLMITYTRKSDAGKYVCVGTNMVGERESEVAELTVLERPSFVKRPSNLAVTVDDSAEFKCEARGDPVPTVRWRKDDGELPKSRYEIRDDHTLKIRKVTAGDMGSYTCVAENMVGKAEASATLTVQVGSEPPHFVVKPRDQVVALGRTVTFQCEATGNPQPAIFWRREGSQNLLFSYQPPQSSSRFSVSQTGDLTITNVQRSDVGYYICQTLNVAGSIITKAYLEVTDVIADRPPPVIRQGPVNQTVAVDGTFVLSCVATGSPVPTILWRKDGVLVSTQDSRIKQLENGVLQIRYAKLGDTGRYTCIASTPSGEATWSAYIEVQEFGVPVQPPRPTDPNLIPSAPSKPEVTDVSRNTVTLSWQPNLNSGATPTSYIIEAFSHASGSSWQTVAENVKTETSAIKGLKPNAIYLFLVRAANAYGISDPSQISDPVKTQDVLPTSQGVDHKQVQRELGNAVLHLHNPTVLSSSSIEVHWTVDQQSQYIQGYKILYRPSGANHGESDWLVFEVRTPAKNSVVIPDLRKGVNYEIKARPFFNEFQGADSEIKFAKTLEEAPSAPPQGVTVSKNDGNGTAILVSWQPPPEDTQNGMVQEYKVWCLGNETRYHINKTVDGSTFSVVIPFLVPGIRYSVEVAASTGAGSGVKSEPQFIQLDAHGNPVSPEDQVSLAQQISDVVKQPAFIAGIGAACWIILMVFSIWLYRHRKKRNGLTSTYAGIRKVTYQRGGEAVSSGGRPGLLNISEPAAQPWLADTWPNTGNNHNDCSISCCTAGNGNSDSNLTTYSRPADCIANYNNQLDNKQTNLMLPESTVYGDVDLSNKINEMKTFNSPNLKDGRFVNPSGQPTPYATTQLIQSNLSNNMNNGSGDSGEKHWKPLGQQKQEVAPVQYNIVEQNKLNKDYRANDTVPPTIPYNQSYDQNTGGSYNSSDRGSSTSGSQGHKKGARTPKVPKQGGMNWADLLPPPPAHPPPHSNSEEYNISVDESYDQEMPCPVPPARMYLQQDELEEEEDERGPTPPVRGAASSPAAVSYSHQSTATLTPSPQEELQPMLQDCPEETGHMQHQPDRRRQPVSPPPPPRPISPPHTYGYISGPLVSDMDTDAPEEEEDEADMEVAKMQTRRLLLRGLEQTPASSVGDLESSVTGSMINGWGSASEEDNISSGRSSVSSSDGSFFTDADFAQAVAAAAEYAGLKVARRQMQDAAGRRHFHASQCPRPTSPVSTDSNMSAAVMQKTRPAKKLKHQPGHLRRETYTDDLPPPPVPPPAIKSPTAQSKTQLEVRPVVVPKLPSMDARTDRSSDRKGSSYKGREVLDGRQVVDMRTNPGDPREAQEQQNDGKGRGNKAAKRDLPPAKTHLIQEDILPYCRPTFPTSNNPRDPSSSSSMSSRGSGSRQREQANVGRRNIAEMQVLGGYERGEDNNEELEETES

SEQ ID NO: 45525 - protein, 320 aa, Homo sapiens [sequence omitted]

SEQ ID NO: 45526 - protein, 173 aa, Homo sapiens [sequence omitted]

SEQ ID NO: 45527 - protein, 231 aa, Homo sapiens
MAASIGTDFWYEYRSPVQENSSDLNKSIWDEFISDEADEKTYNDALFRYNGTVGLWRRCITIPKNMHWYSPPERTESFDVVTKCVSFTLTEQFMEKFVDPGNHNSGIDLLRTYLWRCQFLLPFVSLGLMCFGALIGLCACICRSLYPTIATGILHLLAGLCTLGSVSCYVAGIELLHQKLELPDNVSGEFGWSFCLACVSAPLQFMASALFIWAAHTNRKEYTLMKAYRVA

SEQ ID NO: 45528 - protein, 948 aa, Homo sapiens
MEKSDEFICLLEQECERLKKLIDQEIKSQEEKEQEKEKRVTTLKEELTKLKSFALMVVDEQQRLTAQLTLQRQKIQELTTNAKETHTKLALAEARVQEEEQKATRLEKELQTQTTKFHQDQDTIMAKLTNEDSQNRQLQQKLAALSRQIDELEETNRSLRKAEEELQDIKEKISKGEYGNAGIMAEVEELRKRVLDMEGKDEELIKMEEQCRDLNKRLERETLQSKDFKLEVEKLSKRIMALEKLEDAFNKSKQECYSLKCNLEKERMTTKQLSQELESLKVRIKELEAIESRLEKTEFTLKEDLTKLKTLTVMFVDERKTMSEKLKKTEDKLQAASSQLQVEQNKVTTVTEKLIEETKRALKSKTDVEEKMYSVTKERDDLKNKLKAEEEKGNDLLSRVNMLKNRLQSLEAIEKDFLKNKLNQDSGKSTTALHQENNKIKELSQEVERLKLKLKDMKAIEDDLMKTEDEYETLERRYANERDKAQFLSKELEHVKMELAKYKLAEKTETSHEQWLFKRLQEEEAKSGHLSREVDALKEKIHEYMATEDLICHLQGDHSVLQKKLNQQENRNRDLGREIENLTKELERYRHFSKSLRPSLNGRRISDPQVFSKEVQTEAVDNEPPDYKSLIPLERAVINGQLYEESENQDEDPNDEGSVLSFKCSQSTPCPVNRKLWIPWMKSKEGHLQNGKMQTKPNANFVQPGDLVLSHTPGQPLHIKVTPDHVQNTATLEITSPTTESPHSYTSTAVIPNCGTPKQRITILQNASITPVKSKTSTEDLMNLEQGMSPITMATFARAQTPESCGSLTPERTMSPIQVLAVTGSASSPEQGRSPEPTEISAKHAIFRVSPDRQSSWQFQRSNSNSSSVITTEDNKIHIHLGSPYMQAVASPVRPASPSAPLQDNRTQGLINGALNKTTNKVTSSITITPTATPLPRQSQITVSNIYN

SEQ ID NO: 45529 - protein, 547 aa, Homo sapiens
MNKYIPRDCSQKGRPFHLFRLLIQYHEPELCSYLDTKKITPDSYALNWLGSLFACYCSTEVTQAIWDGYLQQADPFFIYFLMLIILVNAKEVILTQESDSKEEVIKFLENTPSSLNIEDIEDLFSLAQYYCSKTPASFRKDNHHLFGSTLLGIKDDDADLSQALCLAISVSEILQANQLQGEGVRFFVVDCRPAEQYNAGHLSTAFHLDSDLMLQNPSEFAQSVKSLLEAQKQSIESGSIAGGEHLCFMGSGREEEDMYMNMVLAHFLQKNKEYVSIASGGFMALQQHLADINVDGPENGYGHWIASTSGSRSSINSVDGESPNGSSDRGMKSLVNKMTVALKTKSVNVREKVISFIENTSTPVDRMSFNLPWPDRSCTERHVSSSDRVGKPYRGVKPVFSIGDEEEYDTDEIDSSSMSDDDRKEVVNIQTWINKPDVKHHFPCKEVKESGHMFPSHLLVTATHMYCLREIVSRKGLAYIQSRQALNSVVKITSKKKHPELITFKYGNSSASGIEILAIERYLIPNAGDATKAIKQQIMKVLDALES

SEQ ID NO: 45530 - protein, 19 aa, Homo sapiens
MGLWDQKNRNSNNKSPAAV

SEQ ID NO: 45531 - protein, 1770 aa, Homo sapiens
MLSSLGCLLLCGSITLALGNAQKLPKGKRPNLKVHINTTSDSILLKFLRPSPNVKLEGLLLGYGSNVSPNQYFPLPAEGKFTEAIVDAEPKYLIVVRPAPPPSQKKSCSGKTRSRKPLQLVVGTLTPSSVFLSWGFLINPHHDWTLPSHCPNDRFYTIRYREKDKEKKWIFQICPATETIVENLKPNTVYEFGVKDNVEGGIWSKIFNHKTVVGSKKVNGKIQSTYDQDHTVPAYVPRKLIPITIIKQVIQNVTHKDSAKSPEKAPLGGVILVHLIIPGLNETTVKLPASLMFEISDALKTQLAKNETLALPAESKTPEVEKISARPTTVTPETVPRSTKPTTSSALDVSETTLVLSKRTPETLQTILIPQFELPLSTLAPKSLPEFPEAKTPFPFEKPRGTLASSEKPWIVPTAKISEDSKVLQPQTATYDVFSSPTTSDEPEISDSYTATSDRILDSIPPKTSRTLEQPRATLAPSETPFVPQKLEIFTSPEMQPTTPAPQQTTSIPSTPKRRPRPKPPRTKPERTTSAGTITPKISKSPEPTWTTPAPGKTQFISLKPKIPLSPEVTHTKPAPEPQTLLPSQSTIGPETPGTKPSTTLAPRKTKRPGRRPRPRPRPKTTPSPEVPKSKPALEPATIQPEPLVPTTASKPSERPKTTHRPDAPQIQPGSKPPKQLLPKPQTTAEPDMPPTKSVSEPVPFETEAPSMTIVPTTDIEPVTVRTEATVTTLAPKTSQRTRTRRPRPKHKTTPRPETLQTKLDFGPITPGTSSAPTTTTKRTRRPHPKPKTTPHPEVPQTKLVPATILEPVLRTEASGTTAAPKVPQRTHRPHPKPKTTLSPEELQTELVPATIFEPVSPIKEAPGTTFVPVTDLEPVTFRTEIPATTLATKTSKRTRPPRPRPKTTPSPQAPETKPVPATVLEPVTLRPEASTTLASKTSQRTRRPRLRTKTTPRPEAPESKPVPTAELKPVTLRTETWVTTQAPKTSQRTRRPRPKTKTTPSPEVPQTKLVPSTDLEPGTLRTEAPKTMVVTTVLEPDTFRTKFPETTLAPKTQRTRRPRPRPKTTSSPEVPQNKSVSVTGFEPVVHSTDAPGTTFALTELQTLILKPVTSPSLEMTESQPVSDVLESVTLSTESPKETIAPAKTDYVYPTAKAPLWPEEPKTEVVESITYVSEPPETTLETSPLPSQSITLPSPDEPQTEPAPKQTPRAPPKPKTSPRPRIPQTQPVPKVPQRVTAKPKTSPSPEVSYTTPAPKDVLLPHKPYPEVSQSEPAPLETRGIPFIPMISPSPSQEELQTTLEETDQSTQEPFTTKIPRTTELAKTTQAPHRFYTTVRPRTSDKPHIRPVLNRTTTRPTRPKPSGMPSGNGVGTGVKQAPRPSGADRNVSVDSTHPTKKPGTRRPPLPPRPTHPRRKPLPPNNVTGKPGSAGIISSGPITTPPLRSTPRPTGTPLERIETDIKQPTVPASGEELENITDFSSSPTRETDPLGKPRFKGPHVRYIQKPDNSPCSITDSVKRFPKEEATEGNATSPPQNPPTNLTVVTVEGCPSFVILDWEKPLNDTVTEYEVISRENGSFSGKNKSIQMTNQTFSTVENLKPNTSYEFQVKPKNPLGEGPVSNTVAFSTESADPRVSEPVSAGRDAIWTERPFNSDSYSECKGKQYVKRTWYKKFVGVQLCNSLRYKIYLSDSLTGKFYNIGDQRGHGEDHCQFVDSFLDGRTGQQLTSDQLPIKEGYFRAVRQEPVQFGEIGGHTQINYVQWYECGTTIPGKW

SEQ ID NO: 45532 - protein, 1222 aa, Homo sapiens
MLSSLGCLLLCGSITLALGNAQKLPKGKRPNLKVHINTTSDSILLKFLRPSPNVKLEGLLLGYGSNVSPNQYFPLPAEGKFTEAIVDAEPKYLIVVRPAPPPSQKKSCSGKTRSRKPLQLVVGTLTPSSVFLSWGFLINPHHDWTLPSHCPNDRFYTIRYREKDKEKKWIFQICPATETIVENLKPNTVYEFGVKDNVEGGIWSKIFNHKTVVGSKKVNGKIQSTYDQDHTVPAYVPRKLIPITIIKQVIQNVTHKDSAKSPEKAPLGGVILVHLIIPGLNETTVKLPASLMFEISDALKTQLAKNETLALPAESKTPEVEKISARPTTVTPETVPRSTKPTTSSALDVSETTLASSEKPWIVPTAKISEDSKVLQPQTATYDVFSSPTTSDEPEISDSYTATSDRILDSIPPKTSRTLEQPRATLAPSETPFVPQKLEIFTSPEMQPTTPAPQQTTSIPSTPKRRPRPKPPRTKPERTTSAGTITPKISKSPEPTWTTPAPGKTQFISLKPKIPLSPEVTHTKPAPEPQTLLPSQSTIGPETPGTKPSTTLAPRKTKRPGRRPRPRPRPKTTPSPEVPKSKPALEPATIQPEPLVPTTVSEPVPFETEAPSMTIVPTTDIEPVTVRTEATVTTLAPKTSQRTRTRRPRPKHKTTPRPETLQTKLDFGPITPGTSSAPTTTTKRTRRPHPKPKTTPHPEVPQTKLAPKQTPRAPPKPKTSPRPRIPQTQPVPKVPQRVTAKPKTSPSPEVSYTTPAPKDVLLPHKPYPEVSQSEPAPLETRGIPFIPMISPSPSQEELQTTLAPHRFYTTVRPRTSDKPHIRPGVKQAPRPSGADRNVSVDSTHPTKKPGTRRPPLPPRPTHPRRKPLPPNNVTGKPGSAGIISSGPITTPPLRSTPRPTGTPLERIETDIKQPTVPASGEELENITDFSSSPTRETDPLGKPRFKGPHVRYIQKPDNSPCSITDSVKRFPKEEATEGNATSPPQNPPTNLTVVTVEGCPSFVILDWEKPLNDTVTEYEVISRENGSFSGKNKSIQMTNQTFSTVENLKPNTSYEFQVKPKNPLGEGPVSNTVAFSTESADPRVSEPVSAGRDAIWTERPFNSDSYSECKGKQYVKRTWYKKFVGVQLCNSLRYKIYLSDSLTGKFYNIGDQRGHGEDHCQFVDSFLDGRTGQQLTSDQLPIKEGYFRAVRQEPVQFGEIGGHTQINYVQWYECGTTIPGKW

SEQ ID NO: 45533 - protein, 784 aa, Homo sapiens
MTIVPTTDIEPVTVRTEATVTTLAPKTSQRTRTRRPRPKHKTTPRPETLQTKLDFGPITPGTSSAPTTTTKRTRRPHPKPKTTPHPEVPQTKLAPKVPQRTHRPHPKPKTTLSPEELQTELVPVTDLEPVTFRTEIPATTLATKTSKRTRPPRPRPKTTPSPQAPETKPVPATVLEPVTLRPEASTTLASKTSQRTRRPRLRTKTTPRPEAPESKPAPKQTPRAPPKPKTSPRPRIPQTQPVPKVPQRVTAKPKTSPSPEVSYTTPAPKDVLLPHKPYPEVSQSEPAPLETRGIPFIPMISPSPSQEELQTTLEETDQSTQEPFTTKIPRTTELAKTTQAPHRFYTTVRPRTSDKPHIRPVLNRTTTRPTRPKPSGMPSGNGVGTGVKQAPRPSGADRNVSVDSTHPTKKPGTRRPPLPPRPTHPRRKPLPPNNVTGKPGSAGIISSGPITTPPLRSTPRPTGTPLERIETDIKQPTVPASGEELENITDFSSSPTRETDPLGKPRFKGPHVRYIQKPDNSPCSITDSVKRFPKEEATEGNATSPPQNPPTNLTVVTVEGCPSFVILDWEKPLNDTVTEYEVISRENGSFSGKNKSIQMTNQTFSTVENLKPNTSYEFQVKPKNPLGEGPVSNTVAFSTESADPRVSEPVSAGRDAIWTERPFNSDSYSECKGKQYVKRTWYKKFVGVQLCNSLRYKIYLSDSLTGKFYNIGDQRGHGEDHCQFVDSFLDGRTGQQLTSDQLPIKEGYFRAVRQEPVQFGEIGGHTQINYVQWYECGTTIPGKW

SEQ ID NO: 45534 - protein, 397 aa, Homo sapiens [sequence omitted]

SEQ ID NO: 45535 - protein, 769 aa, Homo sapiens
MADVAILARHLFMSEVLEICESVHKLMEEKQLTVYKKGEVQTVASTQDLRVQNGGTAPPVASSEGTTTSLPTELGDCEIVLLVNGELPEAEQNGEVGRQPEPQVSSEAESALSSVGCIADSHPEMESVDLITKNNQTELETSNNRENNTVSNIHPKLSKENVISSSPEDSGMGNDISAEDICAEDIPKHRQKVDQPLKDQENLVASTAKTDFGPDDDTYRSRLRQRSVNEGAYIRLHKGMEKKLQKRKAVPKSAVQQVAQKLVQRGKKMKQPKRDAKENTEEASHKCGECGMVFQRRYALIMHKLKHERARDYKCPLCKKQFQYSASLRAHLIRHTRKDAPSSSSSNSTSNEASGTSSEKGRTKREFICSICGRTLPKLYSLRIHMLKHTGVKPHACQVCGKTFIYKHGLKLHQSLHQSQKQFQCELCVKSFVTKRSLQEHMSIHTGESKYLCSVCGKSFHRGSGLSKHFKKHQPKPEVRGYHCTQCEKSFFEARDLRQHMNKHLGVKPFQCQFCDKCYSWKKDWYSHVKSHSVTEPYRCNICGKEFYEKALFRRHVKKATHGKKGRAKQNLERVCEKCGRKFTQLREYRRHMNNHEGVKPFECLTCGVAWADARSLKRHVRTHTGERPYVCPVCSEAYIDARTLRKHMTKFHRDYVPCKIMLEKDTLQFHNQGTQVAHAVSILTAGMQEQESSGPQELETVVVTGETMEALEAVAATEEYPSVSTLSDQSIMQVVNYVLAQQQGQKLSEVAEAIQTVKVEVAHISGGE

SEQ ID NO: 45536 - protein, 25 aa, Homo sapiens
MPGETRSIPSNIRCFRNVGRIGTRP

SEQ ID NO: 45537 - protein, 693 aa, Homo sapiens
MTSPLNLSYFYGASPPAAAPGACDASCSVLGPSAPGSPGSDSSDFSSASSVSSCGAVESRSRGGARAERQPVEPHMGVGRQQRGPFQGVRVKNSVKELLLHIRSHKQKASGQAVDDFKTQGVNIEQFRELKNTVSYSGKRKGPDSLSDGPACKRPALLHSQFLTPPQTPTPGESMEDVHLNEPKQESSADLLQNIINIKNECSPVSLNTVQVSWLNPVVVPQSSPAEQCQDFHGGQVFSPPQKCQPFQVRGSQQMIDQASLYQYSPQNQHVEQQPHYTHKPTLEYSPFPIPPQSPAYEPNLFDGPESQFCPNQSLVSLLGDQRESENIANPMQTSSSVQQQNDAHLHSFSMMPSSACEAMVGHEMASDSSNTSLPFSNMGNPMNTTQLGKSLFQWQVEQEESKLANISQDQFLSKDADGDTFLHIAVAQGRRALSYVLARKMNALHMLDIKEHNGQSAFQVAVAANQHLIVQDLVNIGAQVNTTDCWGRTPLHVCAEKGHSQVLQAIQKGAVGSNQFVDLEATNYDGLTPLHCAVIAHNAVVHELQRNQQPHSPEVQELLLKNKSLVDTIKCLIQMGAAVEAKDRKSGRTALHLAAEEANLELIRLFLELPSCLSFVNAKAYNGNTALHVAASLQYRLTQLDAVRLLMRKGADPSTRNLENEQPVHLVPDGPVGEQIRRILKGKSIQQRAPPY

SEQ ID NO: 45538 - protein, 519 aa, Homo sapiens [sequence omitted]

SEQ ID NO: 45539 - protein, 801 aa, Homo sapiens
MKANPGYKWCPTTNKPVKSPTPTVNPRKKLWAFPSDSSRDLPSPKKAKTEEMPQLNFGMADPTQMGGLSMLLLAGEHALGTPEVSSGTCRPDVSESPELRQKSPLFQFAEISSSTSHSDASTKQCQTSALFQFAEISSNTSQLGGAEPVKRCGKSALFQLAEMCLASEGMKMEESKLIKAKESDGGRIKELEKGKEEKEIKMEKTDETRLQKEAEFEKSAKENLRDSKELRNFEALQIDDIMAIKMEDPKEIRKEELEEDHKCSHFPDFSYSASSKIIISDVPSRKDHMCHPHGIMIIEDPAALNKPEKLKKKKKKSKMDRHGNDKSTPKKTCKKRQSSESDIESVIYTIEAVAKGDWGIEKLGDTPRKKVRTSSSGKGSILDAKPPKKKVKSREKKMSKEKSSDTTKESRPPDFISISASKNISGETPEGIKAEPLTPMEDALPPSLSGQAKPEDSDCHRKIETCGSRKSERSCKGALYKTLVSEGMLTSLRANVDRGKRSSGKGNSSDHEGCWNEESWTFSQSGTSGSKKFKKTKPKEDCLLGSAKLDEEFEKKFNSLPQYSPVTFDRKCVPVPRKKKKTGNVSSEPTKTSKGPFQSQKKNLFHKIVSKYKHKKEKPNVPEKGSGDKWSNKQLFLDAIHPTEAIFSEDRNTMEPVHKVKNIPSIFNTPEPTTTQEPLVGSQKRKARKTKITHLVRTADGRVSPAGGTLDDKPKEQLQRSLPKATETDCNDKCSHNTEVGETRSSTPEMPAVSAFFSLAALAEVAAMENVHRGQRSTPLTHDGQPKEMPQAPVLISCADQ

SEQ ID NO: 45540 - protein, 771 aa, Homo sapiens
MKANPGYKWCPTTNKPVKSPTPTVNPRKKLWAFPSDSSRDLPSPKKAKTEEMPQLNFGMADPTQMGGLSMLLLAGEHALGTPEVSSGTCRPDVSESPELRQKSPLFQFAEISSSTSHSDASTKQCQTSALFQFAEISSNTSQLGGAEPVKRCGKSALFQLAEMCLASEGMKMEESKLIKAKESDGGRIKELEKGKEEKEIKMEKTDETRLQKEAEFEKSAKENLRDSKELRNFEALQIDDIMAIKMEDPKEIRKEELEEDHKCSHFPDFSYSASSKIIISDVPSRKDHMCHPHGIMIIEDPAALNKPEKLKKKKKKSKMDRHGNDKSTPKKTCKKRQSSESDIESVIYTIEAVAKGDWGIEKLGDTPRKKVRTSSSGKGSILDAKPPKKKVKSREKKMSKEKSSDTTKESRPPDFISISASKNISGETPEGIKAEPLTPMEDALPPSLSGQAKPEDSDCHRKIETCGSRKSERSCKGALYKTLVSEGMLTSLRANVDRGKRSSGKGNSSDHEGCWNEESWTFSQSGTSGSKKFKKTKPKEDCLLGSAKLDEEFEKKFNSLPQYSPVTFDRKCVPVPRKKKKTGNVSSEPTKTSKGSGDKWSNKQLFLDAIHPTEAIFSEDRNTMEPVHKVKNIPSIFNTPEPTTTQEPLVGSQKRKARKTKITHLVRTADGRVSPAGGTLDDKPKEQLQRSLPKATETDCNDKCSHNTEVGETRSSTPEMPAVSAFFSLAALAEVAAMENVHRGQRSTPLTHDGQPKEMPQAPVLISCADQ

SEQ ID NO: 45541 - protein, 42 aa, Homo sapiens
MDYYEDLKMGMKFVSDEHYDENEDDLVSHVDGSVISRREWYV

SEQ ID NO: 45542 - protein, 1219 aa, Homo sapiens
MESLSPKKYSSSLRFKANGDYSGSYLTLSQPVPAKRSPSPLGTSVRSSPSLAKIQGSKQFSYDGTDKNIPMKPPTPLLNTTSSLSGYPLGRADFDHYTGRDSERALRLSEKPPYSKYSSRHKSHDNVYSLGGLEGRKASGSLLAMWNGSSLSDAGPPPISRSGAASMPSSPKQARKMSIQDSLALQPKLTRHKELASENINLRTRKYSSSSLSHMGAYSRSLPRLYRATENQLTPLSLPPRNSLGNSKRTKLGEKDLPHSVIDNDNYLNFSSLSSGALPYKTSASEGNPYVSSTLSVPASPRVARKMLLASTSSCASDDFDQASYVGTNPSHSLLAGESDRVFATRRNFSCGSVEFDEADLESLRQASGTPQPALRERKSSISSISGRDDLMDYHRRQREERLREQEMERLERQRLETILSLCAEYTKPDSRLSTGTTVEDVQKINKELEKLQLSDEESVFEEALMSPDTRYRCHRKDSLPDADLASCGSLSQSSASFFTPRSTRNDELLSDLTRTPPPPSSTFPKASSESSYLSILPKTPEGISEEQRSQELAAMEETRIVILNNLEELKQKIKDINDQMDESFRELDMECALLDGEQKSETTELMKEKEILDHLNRKIAELEKNIVGEKTKEKVKLDAEREKLERLQELYSEQKTQLDNCPESMREQLQQQLKRDADLLDVESKHFEDLEFQQLEHESRLDEEKENLTQQLLREVAEYQRNIVSRKEKISALKKQANHIVQQAQREQDHFVKEKNNLIMMLQREKENLCNLEKKYSSLSGGKGFPVNPNTLKEGYISVNEINEPCGNSTNLSPSTQFPADADAVATEPATAVLASQPQSKEHFRSLEERKKQHKEGLYLSDTLPRKKTTSSISPHFSSATMGRSITPKAHLPLGQSNSCGSVLPPSLAAMAKDSESRRMLRGYNHQQMSEGHRQKSEFYNRTASESNVYLNSFHYPDHSYKDQAFDTLSLDSSDSMETSISACSPDNISSASTSNIARIEEMERLLKQAHAEKTRLLESREREMEAKKRALEEEKRRREILEKRLQEETSQRQKLIEKEVKIRERQRAQARPLTRYLPVRKEDFDLRSHVETAGHNIDTCYHVSITEKTCRGFLIKMGGKIKTWKKRWFVFDRNKRTFSYYADKHETKLKGVIYFQAIEEVYYDHLKNANKSPNPLLTFSVKTHDRIYYMVAPSPEAMRIWMDVIVTGAEGYTHFLL

SEQ ID NO: 45543 - protein, 485 aa, Homo sapiens
MESLSPKKYSSSLRFKANGDYSGSYLTLSQPVPAKRSPSPLGTSVRSSPSLAKIQGSKQFSYDGTDKNIPMKPPTPLLNTTSSLSGYPLGRADFDHYTGRDSERALRLSEKPPYSKYSSRHKSHDNVYSLGGLEGRKASGSLLAMWNGSSLSDAGPPPISRSGAASMPSSPKQARKMSIQDSLALQPKLTRHKELASENINLRTRKYSSSSLSHMGAYSRSLPRLYRATENQLTPLSLPPRNSLGNSKRTKLGEKDLPHSVIDNDNYLNFSSLSSGALPYKTSASEGNPYVSSTLSVPASPRVARKMLLASTSSCASDDFDQASYVGTNPSHSLLAGESDRVFATRRNFSCGSVEFDEADLESLRQASGTPQPALRERKSSISSISGRDDLMDYHRRQREERLREQEMERLVIFISTVIDLTVSLTSIYRAALEMDSRICGNIGYSCSLATAAIFLFSPAILLLPISLLIGLFGYLEGLQELMLI

SEQ ID NO: 45544 - protein, 730 aa, Homo sapiens
MRTELQLESRSSGSEREERQRLETILSLCAEYTKPDSRLSTGTTVEDVQKINKELEKLQLSDEESVFEEALMSPDTRYRCHRKDSLPDADLASCGSLSQSSASFFTPRSTRNDELLSDLTRTPPPPSSTFPKASSESSYLSILPKTPEGISEEQRSQELAAMEETRIVILNNLEELKQKIKDINDQMDESFRELDMECALLDGEQKSETTELMKEKEILDHLNRKIAELEKNIVGEKTKEKVKLDAEREKLERLQELYSEQKTQLDNCPESMREQLQQQLKRDADLLDVESKHFEDLEFQQLEHESRLDEEKENLTQQLLREVAEYQRNIVSRKEKISALKKQANHIVQQAQREQDHFVKEKNNLIMMLQREKENLCNLEKKYSSLSGGKGFPVNPNTLKEAHLPLGQSNSCGSVLPPSLAAMAKDSESRRMLRGYNHQQMSEGHRQKSEFYNRTASESNVYLNSFHYPDHSYKDQAFDTLSLDSSDSMETSISACSPDNISSASTSNIARIEEMERLLKQAHAEKTRLLESREREMEAKKRALEEEKRRREILEKRLQEETSQRQKLIEKEVKIRERQRAQARPLTRYLPVRKEDFDLRSHVETAGHNIDTCYHVSITEKTCRGFLIKMGGKIKTWKKRWFVFDRNKRTFSYYADKHETKLKGVIYFQAIEEVYYDHLKNANKSPNPLLTFSVKTHDRIYYMVAPSPEAMRIWMDVIVTGAEGYTHFLL

SEQ ID NO: 45545 - protein, 330 aa, Homo sapiens [sequence omitted]

SEQ ID NO: 45546 - protein, 936 aa, Homo sapiens
MWLVCGSEPHPHATIRGSHGGRKVPLVSPDSSRPARFLRHTGRSRGIERSTLEEPNLQPLQRRRSVPVLRLARPTEPPARSDINGAAVRPEQRPAARGSPREMIRDEGSSARSRMLRFPSGSSSPNILASFAGKNRVWVISAPHASEGYYRLMMSLLKDDVYCELAERHIQQIVLFHQAGEEGGKVRRITSEGQILEQPLDPSLIPKLMSFLKLEKGKFGMVLLKKTLQVEERYPYPVRLEAMYEVIDQGPIRRIEKIRQKGFVQKCKASGVEGQVVAEGNDGGGGAGRPSLGSEKKKEDPRRAQVPPTRESRVKVLRKLAATAPALPQPPSTPRATTLPPAPATTVTRSTSRAVTVAARPMTTTAFPTTQRPWTPSPSHRPPTTTEVITARRPSVSENLYPPSRKDQHRERPQTTRRPSKATSLESFTNAPPTTISEPSTRAAGPGRFRDNRMDRREHGHRDPNVVPGPPKPAKEKPPKKKAQDKILSNEYEEKYDLSRPTASQLEDELQVGNVPLKKAKESKKHEKLEKPEKEKKKKMKNENADKLLKSEKQMKKSEKKSKQEKEKSKKKKGGKTEQDGYQKPTNKHFTQSPKKSVADLLGSFEGKRRLLLITAPKAENNMYVQQRDEYLESFCKMATRKISVITIFGPVNNSTMKIDHFQLDNEKPMRVVDDEDLVDQRLISELRKEYGMTYNDFFMVLTDVDLRVKQYYEVPITMKSVFDLIDTFQSRIKDMEKQKKEGIVCKEDKKQSLENFLSRFRWRRRLLVISAPNDEDWAYSQQLSALSGQACNFGLRHITILKLLGVGEEVGGVLELFPINGSSVVEREDVPAHLVKDIRNYFQVSPEYFSMLLVGKDGNVKSWYPSPMWSMVIVYDLIDSMQLRRQEMAIQQSLGMRCPEDEYAGYGYHSYHQGYQDGYQDDYRHHESYHHGYPY

SEQ ID NO: 45547 - protein, 52 aa, Homo sapiens
MEIQRLRRTAPFTSSYLSRSGLHNDMENGTPFHYAVGHVASVWIRTPPPCHY

SEQ ID NO: 45548 - protein, 20 aa, Homo sapiens
MEIQRLRRTAPFTSSYLSRR

SEQ ID NO: 45549 - protein, 269 aa, Homo sapiens [sequence omitted]

SEQ ID NO: 45550 - protein, 431 aa, Homo sapiens
MKVLGACKLLLRLLDCCCKTFLLTVKHLGLQEFIILNLVMVGLVSRLWVLYKGVLKRLILLYEPLFGLLQEVARIQPMPYFKDFTFPSDITEFLGQPYFEAFKKKMPIAFAAKGINKLLNKLFLINEQSPRASEETLLGISKKAKQMKINVQNNVDLGQPVKNKRVFKEESSEFDVRAFCNQLKHKATQETSFDFKCSQSRLKTTKYSSQKVIGTPHAKSFVQRFREAESFTQLSEEIQMAVVWCRSKKLKAQAIFLGNKLLKSNRLKHLEAQGTSLPKKLECIKTSICNHLLRGSGIKTSKHHLRQRRSQNKFLRRQRKPQRKLQSTLLREIQQFSQGTRKSATDTSAKWRLSHCTVHRTDLYPNSKQLLNSGVSMPVIQTKEKMIHENLRGIHENETDSWTVMQINKNSTSGTIKETDDIDDIFALMGV

SEQ ID NO: 45551 - protein, 78 aa, Homo sapiens
MLNHVLNICEKDGTFDNIYLHVQISNESAIDFYRKFGFEIIETKKNYYKRIEPADAHVLQKNLKVPSGQNADVQKTDN

SEQ ID NO: 45552 - protein, 922 aa, Homo sapiens
MGLNRWKRFTRKPSPKPTFGPDSVEHWIKRVEKASEFAVSNAFFTRNSDLPRSPWGQITDLKTSEQIEDHDEIYAEAQELVNDWLDTKLKQELASEEEGDAKNTVSSVTIMPEANGHLKYDKFDDLCGYLEEEEESTTVQKFIDHLLHKNVVDSAMMEDLGRKENQDKKQQKDPRLTMEMRHKQVKENRLRREKELEYQRIEKTLKKSAFLEAQCLVQEEKKRKALEAKKEEEEIQREMVKLRREIIERRRTVKAAWKIEKKRQEENSQNSSEKVMFQSTHILPDEEKMVKERKRKLKEVLIQTFKENQQCQKRYFAAWHKLILDHRIKLGKAGTLSDWKIQLKVLRAWRDYTRFQKLERETQALENDLREENRKQQLATEYNRKQVLRHCFTEWQHWHGAELLKRELALTKEETRKKMDALLQAASLGKLSANGLSGISLPEEATAMVGPPVKNGQETAVPPLWEKPPLGSSGCMLSPPLGRTTTGNLQGSLQNVSLSAPGNKQHKTLGAEPSQQPGSNETLRTTSQKAEPLCLGHFHNRHVFQQQLIEKQKKKLQEQQKTILELKKNLQLAEAQWAAEHALAVTEAQSHLLSKPREEEPRTCQMLVNSPVASPGTEGRSDSRNSLSGLRRKPKQLMTPHPILKAMEERAIQRAECRRILAEKKKKQEEEKLAQLKAQEEERQKREAEEKEAQLERKREEKRLKKMKELEKQKRIKRNQQLEAIAKEHYERVLLRKKGLEPWKRLRMQSKQNIQVAEEHYSLFLQRKYMLTWFQRSQESLARKMAQADQFYSQILLKRVIQSWLQYVIDLQEEVRKFCVHFLQKKIFRAWFNMVREVKIDSQGKHEIAAEHSDRRILWITLRTWKKFVKFMKEERVKEERRQQLRRKVVEILPDFQVPGRYHELYQQSDTWSLSKTSLVNE

SEQ ID NO: 45553 - protein, 12 aa, Homo sapiens
MRALLSLRGKRD

SEQ ID NO: 45554 - protein, 361 aa, Homo sapiens [sequence omitted]

SEQ ID NO: 45555 - protein, 477 aa, Homo sapiens
MSDGGFHEAQISNMEMAPGGVITSDMIEMIFSKSPEQQLSATQKFRKLLSKEPNPPIDEVISTPGVVARFVEFLKRKENCTLQFESAWVLTNIASGNSLQTRIVIQAGAVPIFIELLSSEFEDVQEQAVWALGNIAGDSTMCRDYVLDCNILPPLLQLFSKQNRLTMTRNAVWALSNLCRGKSPPPEFAKVSPCLNVLSWLLFVSDTDVLADACWALSYLSDGPNDKIQAVIDAGVCRRLVELLMHNDYKVVSPALRAVGNIVTGDDIQTQVILNCSALQSLLHLLSSPKESIKKEACWTISNITAGNRAQIQTVIDANIFPALISILQTAEFRTRKEAAWAITNATSGGSAEQIKYLVELGCIKPLCDLLTVMDSKIVQVALNGLENILRLGEQEAKRNGTGINPYCALIEEAYGLDKIEFLQSHENQEIYQKAFDLIEHYFGTEDEDSSIAPQVDLNQQQYIFQQCEAPMEGFQL

SEQ ID NO: 45556 - protein, 742 aa, Homo sapiens
MLTPRIELSVWKDDLTTHAVDAVVNAANEDLLHGGGLALALVKAGGFEIQEESKQFVARYGKVSAGEIAVTGAGRLPCKQIIHAVGPRWMEWDKQGCTGKLQRAIVSILNYVIYKNTHIKTVAIPALSSGIFQFPLNLCTKTIVETIRVSLQGKPMMSNLKEIHLVSNEDPTVAAFKAASEFILGKSELGQETTPSFNAMVVNNLTLQIVQGHIEWQTADVIVNSVNPHDITVGPVAKSILQQAGVEMKSEFLATKAKQFQRSQLVLVTKGFNLFCKYIYHVLWHSEFPKPQILKHAMKECLEKCIEQNITSISFPALGTGNMEIKKETAAEILFDEVLTFAKDHVKHQLTVKFVIFPTDLEIYKAFSSEMAKRSKMLSLNNYSVPQSTREEKRENGLEARSPAINLMGFNVEEMYEAHAWIQRILSLQNHHIIENNHILYLGRKEHDILSQLQKTSSVSITEIISPGRTELEIEGARADLIEVVMNIEDMLCKVQEEMARKKERGLWRSLGQWTIQQQKTQDEMKENIIFLKCPVPPTQELLDQKKQFEKCGLQVLKVEKIDNEVLMAAFQRKKKMMEEKLHRQPVSHRLFQQVPYQFCNVVCRVGFQRMYSTPCDPKYGAGIYFTKNLKNLAEKAKKISAADKLIYVFEAEVLTGFFCQGHPLNIVPPPLSPGAIDGHDSVVDNVSSPETFVIFSGMQAIPQYLWTCTQEYVQSQDYSSGPMRPFAQHPWRGFASGSPVD

SEQ ID NO: 45557 - protein, 633 aa, Homo sapiens
MLTPRIELSVWKDDLTTHAVDAVVNAANEDLLHGGGLALALVKAGGFEIQEESKQFVARYGKVSAGEIAVTGAGRLPCKQIIHAVGPRWMEWDKQGCTGKLQRAIVSILNYVIYKNTHIKTVAIPALSSGIFQFPLNLCTKTIVETIRVSLQGKPMMSNLKEIHLVSNEDPTVAAFKAASEFILGKSELGQETTPSFNAMVVNNLTLQIVQGHIEWQTADVIVNSVNPHDITVGPVAKSILQQAGVEMKSEFLATKAKQFQRSQLVLVTKGFNLFCKYIYHVLWHSEFPKPQILKHAMKECLEKCIEQNITSISFPALGTGNMEIKKETAAEILFDEVLTFAKDHVKHQLTVKFVIFPTDLEIYKAFSSEMAKRSKMLSLNNYSVPQSTREEKRENGLEARSPAINLMGFNVEEMYEAHAWIQRILSLQNHHIIENNHILYLGRKEHDILSQLQKTSSVSITEIISPGRTELEIEGARADLIEVVMNIEDMLCKVQEEMARKKERGLWRSLGQWTIQQQKTQDEMKENIIFLKCPVPPTQELLDQKKQFEKCGLQVLKVEKIDNEVLMAAFQRKKKMMEEKLHRQPVSHRLFQQVPYQFCNVVCRVGFQRMYSTPCGRCQCLIIGATLWNLVS

SEQ ID NO: 45558 - protein, 1773 aa, Homo sapiens
MYFQSPKRSGGGECEVRQDPRSPSRFLVFFYPEDVRQKVLERKNHELVWQGKGTFKLTVQLPATPDEIDHVFEEELLTKESKTKEDVKEPDVSEELDTKLPLDGGLDKMEDIPEECENISSLVAFENLKANVTDIMLILLVENISGLSNDDFQVEIIRDFDVAVVTFQKHIDTIRFVDDCTKHHSIKQLQLSPRLLEVTNTIRVENLPPGADDYSLKLFFENPYNGGGRVANVEYFPEESSALIEFFDRKVLDTIMATKLDFNKMPLSVFPYYASLGTALYGKEKPLIKLPAPFEESLDLPLWKFLQKKNHLIEEINDEMRRCHCELTWSQLSGKVTIRPAATLVNEGRPRIKTWQADTSTTLSSIRSKYKVNPIKVDPTMWDTIKNDVKDDRILIEFDTLKEMVILAGKSEDVQSIEVQVRELIESTTQKIKREEQSLKEKMIISPGRYFLLCHSSLLDHLLTECPEIEICYDRVTQHLCLKGPSADVYKAKCEIQEKVYTMAQKNIQVSPEIFQFLQQVNWKEFSKCLFIAQKILALYELEGTTVLLTSCSSEALLEAEKQMLSALNYKRIEVENKEVLHGKKWKGLTHNLLKKQNSSPNTVIINELTSETTAEVIITGCVKEVNETYKLLFNFVEQNMKIERLVEVKPSLVIDYLKTEKKLFWPKIKKVNVQVSFNPENKQKGILLTGSKTEVLKAVDIVKQVWDSVCVKSVHTDKPGAKQFFQDKARFYQSEIKRLFGCYIELQENEVMKEGGSPAGQKCFSRTVLAPGVVLIVQQGDLARLPVDVVVNASNEDLKHYGGLAAALSKAAGPELQADCDQIVKREGRLLPGNATISKAGKLPYHHVIHAVGPRWSGYEAPRCVYLLRRAVQLSLCLAEKYKYRSIAIPAISSGVFGFPLGRCVETIVSAIKENFQFKKDGHCLKEIYLVDVSEKTVEAFAEAVKTVFKATLPDTAAPPGLPPAAAGPGKTSWEKGSLVSPGGLQMLLVKEGVQNAKTDVVVNSVPLDLVLSRGPLSKSLLEKAGPELQEELDTVGQGVAVSMGTVLKTSSWNLDCRYVLHVVAPEWRNGSTSSLKIMEDIIRECMEITESLSLKSIAFPAIGTGNLGFPKNIFAELIISEVFKFSSKNQLKTLQEVHFLLHPSDHENIQAFSDEFARRANGNLVSDKIPKAKDTQGFYGTVSSPDSGVYEMKIGSIIFQVASGDITKEEADVIVNSTSNSFNLKAGVSKAILECAGQNVERECSQQAQQRKNDYIITGGGFLRCKNIIHVIGGNDVKSSVSSVLQECEKKNYSSICLPAIGTGNAKQHPDKVAEAIIDAIEDFVQKGSAQSVKKVKVVIFLPQVLDVFYANMKKREGTQLSSQQSVMSKLASFLGFSKQSPQKKNHLVLEKKTESATFRVCGENVTCVEYAISWLQDLIEKEQCPYTSEDECIKDFDEKEYQELNELQKKLNINISLDHKRPLIKVLGISRDVMQARDEIEAMIKRVRLAKEQESRADCISEFIEWQYNDNNTSHCFNKMTNLKLEDARREKKKTVDVKINHRHYTVNLNTYTATDTKGHSLSVQRLTKSKVDIPAHWSDMKQQNFCVVELLPSDPEYNTVASKFNQTCSHFRIEKIERIQNPDLWNSYQAKKKTMDAKNGQTMNEKQLFHGTDAGSVPHVNRNGFNRSYAGKNAVAYGKGTYFAVNANYSANDTYSRPDANGRKHVYYVRVLTGIYTHGNHSLIVPPSKNPQNPTDLYDTVTDNVHHPSLFVAFYDYQAYPEYLITFRK

SEQ ID NO: 45559 - protein, 280 aa, Homo sapiens
MAAGSEATTPVIVAAGAGGEEGEHVKPFKPEKAKEIIMSLQQPAIFCNMVFDWPARHWNAKYLSQVLHGKQIRFRMGMKSMSTVPQFETTCNYVEATLEEFLTWNCDQSSISGPFRDYDHSKFWAYADYKYFVSLFEDKTDLFQDVKWSDFGFPGRNGQESTLWIGSLGAHTPCHLDSYGCNLVFQVQGRKRWHLFPPEDTPFLYPTRIPYEESSVFSKINVVNPDLKRFPQFRKAQRHAVTLSPGQVLERKWQEGTQLLLLVKRRMDFGGRQSTRVIFI

SEQ ID NO: 45560 - protein, 371 aa, Homo sapiens
MWLLDKRGLRITVLLTSFLMVLGTGLRCIPISDLILKRRLIHGGQMLNGLAGPTVMNAAPFLSTTWFSADERATATAIASMLSYLGGACAFLVGPLVVPAPNGTSPLLAAESSRAHIKDRIEAVLYAEFGVVCLIFSATLAYFPPRPPLPPSVAAASQRLSYRRSVCRLLSNFRFLMIALAYAIPLGVFAGWSGVLDLILTPAHVSQVDAGWIGFWSIVGGCVVGIAMARFADFIRGMLKLILLLLFSGATLSSTWFTLTCLNSITHLPLTTVTLYASCILLGVFLNSSVPIFFELFVETVYPVPEGITCGVVTFLSNMFMGVLLFFLTFYHTELSWFNWCLPGSCLLSLLLILCFRESYDRLYLDVVVSV

SEQ ID NO: 45561 - protein, 1738 aa, Homo sapiens
MGRFSCKITGRPQPQVTWLKGNVPLQPSARVSVSEKNGMQVLEIHGVNQDDVGVYTCLVVNGSGKASMSAELSIQGLDSANRSFVRETKATNSDVRKEVTNVISKESKLDSLEAAAKSKNCSSPQRGGSPPWAANSQPQPPRESKLESCKDSPRTAPQTPVLQKTSSSITLQAARVQPEPRAPGLGVLSPSGEERKRPAPPRPATFPTRQPGLGSQDVVSKAANRRIPMEGQRDSAFPKFESKPQSQEVKENQTVKFRCEVSGIPKPEVAWFLEGTPVRRQEGSIEVYEDAGSHYLCLLKARTRDSGTYSCTASNAQGQLSCSWTLQVERLAVMEVAPSFSSVLKDCAVIEGQDFVLQCSVRGTPVPRITWLLNGQPIQYARSTCEAGVAELHIQDALPEDHGTYTCLAENALGQVSCSAWVTVHEKKSSRKSEYLLPVAPSKPTAPIFLQGLSDLKVMDGSQVTMTVQVSGNPPPEVIWLHNGNEIQESEDFHFEQRGTQHSLCIQEVFPEDTGTYTCEAWNSAGEVRTQAVLTVQEPHDGTQPWFISKPRSVTASLGQSVLISCAIAGDPFPTVHWLRDGKALCKDTGHFEVLQNEDVFTLVLKKVQPWHAGQYEILLKNRVGECSCQVSLMLQNSSARALPRGREPASCEDLCGGGVGADGGGSDRYGSLRPGWPARGQGWLEEEDGEDVRGVLKRRVETRQHTEEAIRQQEVEQLDFRDLLGKKVSTKTLSEDDLKEIPAEQMDFRANLQRQVKPKTVSEEERKVHSPQQVDFRSVLAKKGTSKTPVPEKVPPPKPATPDFRSVLGGKKKLPAENGSSSAETLNAKAVESSKPLSNAQPSGPLKPVGNAKPAETLKPMGNAKPAETLKPMGNAKPDENLKSASKEELKKDVKNDVNCKRGHAGTTDNEKRSESQGTAPAFKQKLQDVHVAEGKKLLLQCQVSSDPPATIIWTLNGKTLKTTKFIILSQEGSLCSVSIEKALPEDRGLYKCVAKNDAGQAECSCQVTVDDAPASENTKAPEMKSRRPKSSLPPVLGTESDATVKKKPAPKTPPKAAMPPQIIQFPEDQKVRAGESVELFGKVTGTQPITCTWMKFRKQIQESEHMKVENSENGSKLTILAARQEHCGCYTLLVENKLGSRQAQVNLTVVDKPDPPAGTPCASDIRSSSLTLSWYGSSYDGGSAVQSYSIEIWDSANKTWKELATCRSTSFNVQDLLPDHEYKFRVRAINVYGTSEPSQESELTTVGEKPEEPKDEVEVSDDDEKEPEVDYRTVTINTEQKVSDFYDIEERLGSGKFGQVFRLVEKKTRKVWAGKFFKAYSAKEKENIRQEISIMNCLHHPKLVQCVDAFEEKANIVMVLEIVSGGELFERIIDEDFELTERECIKYMRQISEGVEYIHKQGIVHLDLKPENIMCVNKTGTRIKLIDFGLARRLENAGSLKVLFGTPEFVAPEVINYEPIGYATDMWSIGVICYILVSGLSPFMGDNDNETLANVTSATWDFDDEAFDEISDDAKDFISNLLKKDMKNRLDCTQCLQHPWLMKDTKNMEAKKLSKDRMKKYMARRKWQKTGNAVRAIGRLSSMAMISGLSGRKSSTGSPTSPLNAEKLESEEDVSQAFLEAVAEEKPHVKPYFSKTIRDLEVVEGSAARFDCKIEGYPDPEVVWFKDDQSIRESRHFQIDYDEDGNCSLIISDVCGDDDAKYTCKAVNSLGEATCTAELIVETMEEGEGEGEEEEE

SEQ ID NO: 45562 - protein, 691 aa, Homo sapiens
MTPQEIAVNLRPGDKTTFQLQVRQVEDYPVDLYYLMDLSLSMKDDLDNIRSLGTKLAEEMRKLTSNFRLGFGSFVDKDISPFSYTAPRYQTNPCIGYKLFPNCVPSFGFRHLLPLTDRVDSFNEEVRKQRVSRNRDAPEGGFDAVLQAAVCKEKIGWRKDALHLLVFTTDDVPHIALDGKLGGLVQPHDGQCHLNEANEYTASNQMDYPSLALLGEKLAENNINLIFAVTKNHYMLYKNFTALIPGTTVEILDGDSKNIIQLIINAYNSIRSKVELSVWDQPEDLNLFFTATCQDGVSYPGQRKCEGLKIGDTASFEVSLEARSCPSRHTEHVFALRPVGFRDSLEVGVTYNCTCGCSVGLEPNSARCNGSGTYVCGLCECSPGYLGTRCECQDGENQSVYQNLCREAEGKPLCSGRGDCSCNQCSCFESEFGKIYGPFCECDNFSCARNKGVLCSGHGECHCGECKCHAGYIGDNCNCSTDISTCRGRDGQICSERGHCLCGQCQCTEPGAFGEMCEKCPTCPDACSTKRDCVECLLLHSGKPDNQTCHSLCRDEVITWVDTIVKDDQEAVLCFYKTAKDCVMMFTYVELPSGKSNLTVLREPECGNTPNAMTILLAVVGSILLVGLALLAIWKLLVTIHDRREFAKFQSERSRARYEMASNPLYRKPISTHTVDFTFNKFNKSYNGTVD

SEQ ID NO: 45563 - protein, 600 aa, Homo sapiens
MKGHEQESLFKCEVCAERFPTHAKLSSHQRSHFEPERPYKCDFPGCEKTFITVSALFSHNRAHFREQELFSCSFPGCSKQYDKACRLKIHLRSHTGERPFICDSDSCGWTFTSMSKLLRHRRKHDDDRRFTCPVEGCGKSFTRAEHLKGHSITHLGTKPFECPVEGCCARFSARSSLYIHSKKHVQDVGAPKSRCPVSTCNRLFTSKHSMKAHMVRQHSRRQDLLPQLEAPSSLTPSSELSSPGQSELTNMDLAALFSDTPANASGSAGGSDEALNSGILTIDVTSVSSSLGGNLPANNSSLGPMEPLVLVAHSDIPPSLDSPLVLGTAATVLQQGSFSVDDVQTVSAGALGCLVALPMKNLSDDPLALTSNSNLAAHITTPTSSSTPRENASVPELLAPIKVEPDSPSRPGAVGQQEGSHGLPQSTLPSPAEQHGAQDTELSAGTGNFYLESGGSARTDYRAIQLAKEKKQRGAGSNAGASQSTQRKIKEGKMSPPHFHASQNSWLCGSLVVPSGGRPGPAPAAGVQCGAQGVQVQLVQDDPSGEGVLPSARGPATFLPFLTVDLPVYVLQEVLPSSGGPAGPEATQFPGSTINLQDLQ

SEQ ID NO: 45564 - protein, 452 aa, Homo sapiens
MKGHEQESLFKCEVCAERFPTHAKLSSHQRSHFEPERPYKCDFPGCEKTFITVSALFSHNRAHFREQELFSCSFPGCSKQYDKACRLKIHLRSHTGERPFICDSDSCGWTFTSMSKLLRHRRKHDDDRRFTCPVEGCGKSFTRAEHLKGHSITHLGTKPFECPVEGCCARFSARSSLYIHSKKHVQDVGAPKSRCPVSTCNRLFTSKHSMKAHMVRQHSRRQDLLPQLEAPSSLTPSSELSSPGQSELTNMDLAALFSDTPANASGSAGGSDEALNSGILTIDVTSVSSSLGGNLPANNSSLGPMEPLVLVAHSDIPPSLDSPLVLGTAATVLQQGSFSVDDVQTVSAGALGCLVALPMKNLSDDPLALTSNSNLAAHITTPTSSSTPRENASVPELLAPIKVEPDSPSRPGAVGQQEGSHGLPQSTLPSPAEQHGAQDTELSAGTGNFYLV

SEQ ID NO: 45565 - protein, 483 aa, Homo sapiens
MLVIDVTKGMQTQSAECLVIGQIACQKLVVVLNKIDLLPEGKRQAAIDKMTKKMQKTLENTKFRGAPIIPVAAKPGGPEAPETEAPQGIPELIELLTSQISIPTRDPSGPFLMSVDHCFSIKGQGTVMTGTILSGSISLGDSVEIPALKVVKKVKSMQMFHMPITSAMQGDRLGICVTQFDPKLLERGLVCAPESLHTVHAALISVEKIPYFRGPLQTKAKFHITVGHETVMGRLMFFSPAPDNFDQEPILDSFNFSQEYLFQEQYLSKDLTPAVTDNDEADKKAGQATEGHCPRQQWALVEFEKPVTCPRLCLVIGSRLDADIHTNTCRLAFHGILLHGLEDRNYADSFLPRLKVYKLKHKHGLVERAMDDYSVIGRSLFKKETNIQLFVGLKVHLSTGELGIIDSAFGQSGKFKIHIPGGLSPESKKILTPALKKRARAGRGEATRQEESAERSEPSQHVVLSLTFKRYVFDTHKRMVQSP

SEQ ID NO: 45566 - protein, 149 aa, Homo sapiens [sequence omitted]

SEQ ID NO: 45567 - protein, 151 aa, Homo sapiens
MRSRGRGGFTSDRGFQFVSSSLPDICYRCGESGHLAKDCDLQEDVEACYNCGRGGHIAKDCKEPKREREQCCYNCGKPGHLARDCDHADEQKCYSCGEFGHIQKDCTKVKCYRCGETGHVAINCSKTSEVNCYRCGESGHLARECTIEATA

SEQ ID NO: 45568 - protein, 144 aa, Homo sapiens [sequence omitted]

SEQ ID NO: 45569 - protein, 150 aa, Homo sapiens
MRSRGRGGFTSDRGFQFVSSSLPDICYRCGESGHLAKDCDLQEDEACYNCGRGGHIAKDCKEPKREREQCCYNCGKPGHLARDCDHADEQKCYSCGEFGHIQKDCTKVKCYRCGETGHVAINCSKTSEVNCYRCGESGHLARECTIEATA

SEQ ID NO: 45570 - protein, 142 aa, Homo sapiens
MRSRGRGFQFVSSSLPDICYRCGESGHLAKDCDLQEDACYNCGRGGHIAKDCKEPKREREQCCYNCGKPGHLARDCDHADEQKCYSCGEFGHIQKDCTKVKCYRCGETGHVAINCSKTSEVNCYRCGESGHLARECTIEATA

SEQ ID NO: 45571 - protein, 210 aa, Homo sapiens
MEKRSFKSGSIGAADSPENWEKVWDNWRLLTMAGIFDCWEPPEGGDVLYSYTIITVDSCKGLSDIHHRMPAILDGEEAVSKWLDFGEVSTQEALKLIHPTENITFHAVSSVVNNSRNNTPECLAPVDLVVKKELRASGSSQRMLQWLATKSPKKEDSKTPQKEESDVPQWSSQFLQKSPLPTKRGTAGLLEQWLKREKEEEPVAKRPYSQ

SEQ ID NO: 45572 - protein, 252 aa, Homo sapiens [sequence omitted]

SEQ ID NO: 45573 - protein, 1259 aa, Homo sapiens
MLFRQYVRDNLYDRISTRPFLNNIEKRWIAFQILTAVDQAHKSGVRHGDIKTENVMVTSWNWVLLTDFASFKPTYLPEDNPADFNYFFDTSRRRTCYIAPERFVDGGMFATELEYMRDPSTPLVDLNSNQRTRGELKRAMDIFSAGCVIAELFTEGVPLFDLSQLLAYRNGHFFPEQVLNKIEDHSIRELVTQMIHREPDKRLEAEDYLKQQRGNAFPEIFYTFLQPYMAQFAKETFLSADERILVIRKDLGNIIHNLCGHDLPEKAEGEPKENGLVILVSVITSCLQTLKYCDSKLAALELILHLAPRLSVEILLDRITPYLLHFSNDSVPRVRAEALRTLTKVLALVKEVPRNDINIYPEYILPGIAHLAQDDATIVRLAYAENIALLAETALRFLELVQLKNLNMENDPNNEEIDEVTHPNGNYDTELQALHEMVQQKVVTLLSDPENIVKQTLMENGITRLCVFFGRQKANDVLLSHMITFLNDKNDWHLRGAFFDSIVGVAAYVGWQSSSILKPLLQQGLSDAEEFVIVKALYALTCMCQLGLLQKPHVYEFASDIAPFLCHPNLWIRYGAVGFITVVARQISTADVYCKLMPYLDPYITQPIIQIERKLVLLSVLKEPVSRSIFDYALRSKDITSLFRHLHMRQKKRNGSLPDCPPPEDPAIAQLLKKLLSQGMTEEEEDKLLALKDFMMKSNKAKANIVDQSHLHDSSQKGVIDLAALGITGRQVDLVKTKQEPDDKRARKHVKQDSNVNEEWKSMFGSLDPPNMPQALPKGSDQEVIQTGKPPRSESSAGICVPLSTSSQVPEVTTVQNKKPVIPVLSSTILPSTYQIRITTCKTELQQLIQQKREQCNAERIAKQMMENAEWESKPPPPGWRPKGLLVAHLHEHKSAVNRIRVSDEHSLFATCSNDGTVKIWNSQKMEGKTTTTRSILTYSRIGGRVKTLTFCQGSHYLAIASDNGAVQLLGIEASKLPKSPKIHPLQSRILDQKEDGCVVDMHHFNSGAQSVLAYATVNGSLVGWDLRSSSNAWTLKHDLKSGLITSFAVDIHQCWLCIGTSSGTMACWDMRFQLPISSHCHPSRARIRRLSMHPLYQSWVIAAVQGNNEVSMWDMETGDRRFTLWASSAPPLSELQPSPHSVHGIYCSPADGNPILLTAGSDMKIRFWDLAYPERSYVVAGSTSSPSVSYYRKIIEGTEVVQEIQNKQKVGPSDDTPRRGPESLPVGHHDIITDVATFQTTQGFIVTASRDGIVKVWK

SEQ ID NO: 45574 - protein, 447 aa, Homo sapiens
MSPEALKHQGYDTKSDIWSLACILYEMCCMNHAFAGSNFLSIVLKIVEGDTPSLPERYPKELNAIMESMLNKNPSLRPSAIEILKIPYLDEQLQNLMCRYSEMTLEDKNLDCQKEAAHIINAMQKRIHLQTLRALSEVQKMTPRERMRLRKLQAADEKARKLKKIVEEKYEENSKRMQELRSRNFQQLSVDVLHEKTHLKGMEEKEEQPEGRLSCSPQDEDEERWQGREEESDEPTLENLPESQPIPSMDLHELESIVEDATSDLGYHEIPEDPLVAEEYYADAFDSYCEESDEEEEEIALERPEKEIRNEGSQPAYRTNQQDSDIEALARCLENVLGCTSLDTKTITTMAEDMSPGPPIFNSVMARTKMKRMRESAMQKLGTEVFEEVYNYLKRARHQNASEAEIRECLEKVVPQASDCFEVDQLLYFEEQLLITMGKEPTLQNHL

SEQ ID NO: 45575 - protein, 130 aa, Homo sapiens [sequence omitted]

SEQ ID NO: 45576 - protein, 1910 aa, Homo sapiens
MTPTHKGQRWGLLSMPVDEEVESLHLRFLATPPNGNFADAVFRFNANISYSGVLHAVTQDGLFSENKEKLINNAITALLSQEGDVVASNAELESQFQAVRRLVASKAGFLAFTQLPKFRERLGVKVVKALKRSNNGIIHAAVDMLCALMCPMHDDYDLRQEQLNKASLLSSKKFLENLLEKFNSHVDHGTGALVISSLLDFLTFALCAPYSETTEGQQFDMLLEMVASNGRTLFKLFQHPSMAIIKGAGLVMKAIIEEGDKEIATKMQELALSEGALPRHLHTAMFTISSDQRMLTNRQLSRHLVGLWTADNATATNLLKRILPPGLLAYLESSDLVPEKDADRMHVRDNVKIAMDQYGKFNKVPEWQRLAGKAAKEVEKFAKEKVDLVLMHWRDRMGIAQKENINQKPVVLRKRRQRIKIEANWDLFYYRFGQDHARSNLIWNFKTREELKDTLESEMRAFNIDRELGSANVISWNHHEFEVKYECLAEEIKIGDYYLRLLLEEDENEESGSIKRSYEFFNELYHRFLLTPKVNMKCLCLQALAIVYGRCHEEIGPFTDTRYIIGMLERCTDKLERDRLILFLNKLILNKKNVKDLMDSNGIRILVDLLTLAHLHVSRATVPLQSNVIEAAPDMKRESEKEWYFGNADKERSGPYGFHEMQELWTKGMLNAKTRCWAQGMDGWRPLQSIPQLKWCLLASGQAVLNETDLATLILNMLITMCGYFPSRDQDNAIIRPLPKVKRLLSDSTCLPHIIQLLLTFDPILVEKVAILLYHIMQDNPQLPRLYLSGVFFFIMMYTGSNVLPVARFLKYTHTKQAFKSEETKGQDIFQRSILGHILPEAMVCYLENYEPEKFSEIFLGEFDTPEAIWSSEMRRLMIEKIAAHLADFTPRLQSNTRALYQYCPIPIINYPQLENELFCNIYYLKQLCDTLRFPDWPIKDPVKLLKDTLDAWKKEVEKKPPMMSIDDAYEVLNLPQGQGPHDESKIRKAYFRLAQKYHPDKNPEGRDMFEKVNKAYEFLCTKSAKIVDGPDPENIILILKTQSILFNRHKEDLQPYKYAGYPMLIRTITMETSDDLLFSKESPLLPAATELAFHTVNCSALNAEELRRENGLEVLQEAFSRCVAVLTRASKPSDMSVQVCGYISKCYSVAAQFEECREKITEMPSIIKDLCRVLYFGKSIPRVAALGVECVSSFAVDFWLQTHLFQAGILWYLLGFLFNYDYTLEESGIQKSEETNQQEVANSLAKLSVHALSRLGGYLAEEQATPENPTIRKSLAGMLTPYVARKLAVASVTEILKMLNSNTESPYLIWNNSTRAELLEFLESQQENMIKKGDCDKTYGSEFVYSDHAKELIVGEIFVRVYNEVPTFQLEVPKAFAASLLDYIGSQAQYLHTFMAITHAAKVESEQHGDRLPRVEMALEALRNVIKYNPGSESECIGHFKLIFSLLRVHGAGQVQQLALEVVNIVTSNQDCVNNIAESMVLSSLLALLHSLPSSRQLVLETLYALTSSTKIIKEAMAKGALIYLLDMFCNSTHPQVRAQTAELFAKMTADKLIGPKVRITLMKFLPSVFMDAMRDNPEAAVHIFEGTHENPELIWNDNSRDKVSTTVREMMLEHFKNQQDNPEANWKLPEDFAVVFGEAEGELAVGGVFLRIFIAQPAWVLRKPREFLIALLEKLTELLEKNNPHGETLETLTMATVCLFSAQPQLADQVPPLGHLPKVIQAMNHRNNAIPKSAIRVIHALSENELCVRAMASLETIGPLMNGMKKRADTVGLACEAINRMFQKEQSELVAQALKADLVPYLLKLLEGIGLENLDSPAATKAQIVKALKAMTRSLQYGEQVNEILCRSSVWSAFKDQKHDLFISESQTAGYLTGPGVAGYLTAGTSTSVMSNLPPPVDHEAGDLGYQT

SEQ ID NO: 45577 - protein, 660 aa, Homo sapiens
MEHVQGRIFRDLTIPGLSPAERSAIYVATVETLAQLHSLNIQSLQLEGYGIGAGYCKRQVSTWTKQYQAAAHQDIPAMQQLSEWLMKNLPDNDNEENLIHGDFRLDNIVFHPKECRVIAVLDWELSTIGHPLSDLAHFSLFYFWPRTVPMINQGSYSENSGIPSMEELISIYCRCRGINSILPNWNFFLALSYFKMAGIAQGVYSRYLLGNNSSEDSFLFANIVQPLAETGLQLSKRTFSTVLPQIDTTGQLFVQTRKGQEVLIKVKHFMKQHILPAEKEVTEFYVQNENSVDKWGKPLVIDKLKEMAKVEGLWNLFLPAVSGLSHVDYALIAEETGKCFFAPDVFNCQAPDTGNMEVLHLYGSEEQKKQWLEPLLQGNITSCFCMTEPDVASSDATNIECSIQRDEDSYVINGKKWWSSGAGNPKCKIAIVLGRTQNTSLSRHKQHSMILVPMNTPGVKIIRPLSVFGYTDNFHGGHFEIHFNQVRVPATNLILGEGRGFEISQGRLGPGRIHHCMRTVGLAERALQIMCERATQRIAFKKKLYAHEVVAHWIAESRIAIEKIRLLTLKAAHSMDTLGSAGAKKEIAMIKVAAPRAVSKIVDWAIQVCGGAGVSQDYPLANMYAITRVLRLADGPDEVHLSAIATMELRDQAKRLTAKI

SEQ ID NO: 45578 - protein, 305 aa, Homo sapiens
MSSEVVDSNPYSRLMALKRMGIVSDYEKIRTFAVAIVGVGGVGSVTAEMLTRCGIGKLLLFDYDKVELANMNRLFFQPHQAGLSKVQAAEHTLRNINPDVLFEVHNYNITTVENFQHFMDRISNGGLEEGKPVDLVLSCVDNFEARMTINTACNELGQTWMESGVSENAVSGHIQLIIPGESACFACAPPLVVAANIDEKTLKREGVCAASLPTTMGVVAGILVQNVLKFLLNFGTVSFYLGYNAMQDFFPTMSMKPNPQCDDRNCRKQQEEYKKKVAALPKQEVIQEEEEIIHEDNEWARRFCH

SEQ ID NO: 45579 - protein, 1017 aa, Homo sapiens
MDLFLKDYSPKLKRMCETMGYFFHAVYFPIDVENQYLTVRKWEIEKSSLVILFIHLTLPSLLLEDCEEAFLKNPEGKPRLIFHRLEDGKVSSDSVQQLIDQVSNLNKTSKAKIIDHSGDPAEGVYKTYICVEKIIKQDILGFENTDLETKDLGSEDSIPEEDDFGDVLWDIHDEQEQMETFQQASNSAHELGFEKYYQRLNDLVAAPAPIPPLLVSGGPGSGKSLLLSKWIQLQQKNSPNTLILSHFVGRPMSTSSESSLIIKRLTLKLMQHSWSVSALTLDPAKLLEEFPRWLEKLSARHQGSIIIVIDSIDQVQQVEKHMKWLIDPLPVNVRVIVSVNVETCPPAWRLWPTLHLDPLSPKDAKSIIIAECHSVDIKLSKEQEKKLERHCRSATTCNALYVTLFGKMIARAGRAGNLDKILHQCFQCQDTLSLYRLVLHSIRESMANDVDKELMKQILCLVNVSHNGVSESELMELYPEMSWTFLTSLIHSLYKMCLLTYGCGLLRFQHLQAWETVRLEYLEGPTVTSSYRQKLINYFTLQLSQDRVTWRSADELPWLFQQQGSKQKLHDCLLNLFVSQNLYKRGHFAELLSYWQFVGKDKSAMATEYFDSLKQYEKNCEGEDNMSCLADLYETLGRFLKDLGLLSQAIVPLQRSLEIRETALDPDHPRVAQSLHQLASVYVQWKKFGNAEQLYKQALEISENAYGADHPYTARELEALATLYQKQNKYEQAEHFRKKSFKIHQKAIKKKGNLYGFALLRRRALQLEELTLGKDTPDNARTLNELGVLYYLQNNLETADQFLKRSLEMRERVLGPDHPDCAQSLNNLAALCNEKKQYDKAEELYERALDIRRRALAPDHPSLAYTVKHLAILYKKMGKLDKAVPLYELAVEIRQKSFGPKHPSVATALVNLAVLYSQMKKHVEALPLYERALKIYEDSLGRMHPRVGETLKNLAVLSYEGGDFEKAAELYKRAMEIKEAETSLLGGKAPSRHSSSGDTFSLKTAHSPNVFLQQGQR

SEQ ID NO: 45580 - protein, 323 aa, Homo sapiens
MDLFLKDYSPKLKRMCETMGYFFHAVYFPIDVENQYLTVRKWEIEKSSLVILFIHLTLPSLLLEDCEEAFLKNPEGKPRLIFHRLEDGKVSSDSVQQLIDQVSNLNKTSKAKIIDHSGDPAEGVYKTYICVEKIIKQDILGFENTDLETKDLGSEDSIPEEDDFGDVLWDIHDEQEQMETFQQASNSAHELGFEKYYQRLNDLVAAPAPIPPLLVSGGPGSGKSLLLSKWIQLQQKNSPNTLILSHFVGRPMSTSSESSLIIKRLTLKLMQHSWSVSALTLDPAKLLEEFPRWLEKLSARHQGSIIIVIDSIDQVQVVAYTSS

SEQ ID NO: 45581 - protein, 79 aa, Homo sapiens
MEKSSGPWNKTAPVQAPPAPVIVTETPEPAMTSGVYRPPGARLTTTRKTPQGPPEIYSDTQFPSLQSTAKHVESRKYLK

SEQ ID NO: 45582 - protein, 77 aa, Homo sapiens
MEKSSGPWNKTAPVQAPPAPVIVTETPEPAMTSGVYRPPGARLTTTRKTPQGPPEIYSDTQFPSLQSTAKHVESRKY

SEQ ID NO: 45583 - protein, 471 aa, Homo sapiens
MVVAQLLAGIGTVPIQPFGISYVDDFSEPSNSPLYISILFAISVFGPAFGYLLGSVMLQIFVDYGRVNTAAVNLVPGDPRWIGAWWLGLLISSALLVLTSFPFFFFPRAMPIGAKRAPATADEARKLEEAKSRGSLVDFIKRFPCIFLRLLMNSLFVLVVLAQCTFSSVIAGLSTFLNKFLEKQYGTSAAYANFLIGAVNLPAAALGMLFGGILMKRFVFSLQAIPRIATTIITISMILCVPLFFMGCSTPTVAEVYPPSTSSSIHPQSPACRRDCSCPDSIFHPVCGDNGIEYLSPCHAGCSNINMSSATSKQLIYLNCSCVTGGSASAKTGSCPVPCAHFLLPAIFLISFVSLIACISHNPLYMMVLRVVNQEEKSFAIGVQFLLMRLLAWLPSPALYGLTIDHSCIRWNSLCLGRRGACAYYDNDALRDRYLGLQMGYKALGMLLLCFISWRVKKNKEYNVQKAAGLI

SEQ ID NO: 45584 - protein, 476 aa, Homo sapiens
MPQVNISVQGEVPRTLSVFRVELSCTGKVDSEVMILMQLNLTVNSSKNFTVLNFKRRKMCYKKLEEVKTSALDKNTSRTIYDPVHAAPTTSTRVFYISVGVCCAVIFLVAIILAVLHLHSMKRIELDDSISASSSSQGLSQPSTQTTQYLRADTPNNATPITSSLGYPTLRIEKNDLRSVTLLEAKGKVKDIAISRERITLKDVLQEGTFGRIFHGILIDEKDPNKEKQAFVKTVKDQASEIQVTMMLTESCKLRGLHHRNLLPITHVCIEEGEKPMVILPYMNWGNLKLFLRQCKLVEANNPQAISQQDLVHMAIQIACGMSYLARREVIHKDLAARNCVIDDTLQVKITDNALSRDLFPMDYHCLGDNENRPVRWMALESLVNNEFSSASDVWAFGVTLWELMTLGQTPYVDIDPFEMAAYLKDGYRIAQPINCPDELFAVMACCWALDPEERPKFQQLVQCLTEFHAALGAYV

SEQ ID NO: 45585 - protein, 473 aa, Homo sapiens
MPQVNISVQGEVPRTLSVFRVELSCTGKVDSEVMILMQLNLTVNSSKNFTVLNFKRRKMCYKKLEEVKTSALDKNTSRTIYDPVHAAPTTSTRVFYISVGVCCAVIFLVAIILAVLHLHSMKRIELDDSISASSSSQGLSQPSTQTTQYLRADTPNNATPITSYPTLRIEKNDLRSVTLLEAKGKVKDIAISRERITLKDVLQEGTFGRIFHGILIDEKDPNKEKQAFVKTVKDQASEIQVTMMLTESCKLRGLHHRNLLPITHVCIEEGEKPMVILPYMNWGNLKLFLRQCKLVEANNPQAISQQDLVHMAIQIACGMSYLARREVIHKDLAARNCVIDDTLQVKITDNALSRDLFPMDYHCLGDNENRPVRWMALESLVNNEFSSASDVWAFGVTLWELMTLGQTPYVDIDPFEMAAYLKDGYRIAQPINCPDELFAVMACCWALDPEERPKFQQLVQCLTEFHAALGAYV

SEQ ID NO: 45586 - protein, 419 aa, Homo sapiens [sequence omitted]

SEQ ID NO: 45587 - protein, 399 aa, Homo sapiens
MLHQQVEEHEKIKQEMTMEYKQELKKLHEELCILKRSYEKLQKKQMREFRGNTKNHREDRSEIERLTAKIEEFRQKSLDWEKQRLIYQQQVSSLEAQRKALAEQSEIIQAQLVNRKQKLESVELSSQSEIQHLSSKLERANDTICANELEIERLTMRVNDLVGTSMTVLQEQQQKEEKLRESEKLLEALQEEKRELKAALQSQENLIHEARIQKEKLQEKVKATNTQHAVEAISLESVSATCKQLSQELMEKYEELKRMEAHNNEYKAEIKKLKEQILQGEQSYSSALEGMKMEISHLTQELHQRDITIASTKGSSSDMEKRLRAEMQKAEDKAVEHKEILDQLESLKLENRHLSEMVMKLELGLHERWGFTMLSSLVLNFGIQAIRQPQRPKVLELQV

SEQ ID NO: 45588 - protein, 627 aa, Homo sapiens
MLHQQVEEHEKIKQEMTMEYKQELKKLHEELCILKRSYEKLQKKQMREFRGNTKNHREDRSEIERLTAKIEEFRQKSLDWEKQRLIYQQQVSSLEAQRKALAEQSEIIQAQLVNRKQKLESVELSSQSEIQHLSSKLERANDTICANELEIERLTMRVNDLVGTSMTVLQEQQQKEEKLRESEKLLEALQEEKRELKAALQSQENLIHEARIQKEKLQEKVKATNTQHAVEAIRPREESLAEKKYTSQGQGDLDSVLSQLNFTHTSEDLLQAEVTCLEGSLESVSATCKQLSQELMEKYEELKRMEAHNNEYKAEIKKLKEQILQGEQSYSSALEGMKMEISHLTQELHQRDITIASTKGSSSDMEKRLRAEMQKAEDKAVEHKEILDQLESLKLENRHLSEMVMKLELGLHEAKEISLADLQENYIEALNKLVSENQQLQKDLMNTKSQLEISTQMCKKQNDRIFKPTHSRTTEFKNTEFKPTHGQHRHDGIKTEHYKTDLHSPRGQASDSINPMSRVLSPLSPQISPCSSTRSLTSYSLCKTHSLPSALDTNEANFSDTMSESMNDQEEFISSCSLPVSPLGSIATRFLEEEELRSHHILERLDAHIEELKRESEKTVRQFTALK

SEQ ID NO: 45589 - protein, 12 aa, Homo sapiens
MKQVLESSKSHQ

SEQ ID NO: 45590 - protein, 401 aa, Homo sapiens [sequence omitted]

SEQ ID NO: 45591 - protein, 269 aa, Homo sapiens
MPAYVKFNYMAEREDELSLIKGTKVIVMEKCSDGWWRGSYNGQVGWFPSNYVTEEGDSPLGDHVGSLSEKLAAVVNNLNTGQVLHVVQALYPFSSSNDEELNFEKGDVMDVIEKPENDPEWWKCRKINGMVGLVPKNYVTVMQNNPLTSGLEPSPPQCDYIRPSLTGKFAGNPWYYGKVTRHQAEMALNERGHEGDFLIRDSESSPNDFSVSLKAQGKNKHFKVQLKETVYCIGQRKFSTMEELVEHYKKAPIFTSEQGEKLYLVKHLS

SEQ ID NO: 45592 - protein, 828 aa, Homo sapiens
MQIRVFNYNTLERVHMFEAHSDYIRCIAVHPTQPFILTSSDDMLIKLWDWDKKWSCSQVFEGHTHYVMQIVINPKDNNQFASASLDRTIKVWQLGSSSPNFTLEGHEKGVNCIDYYSGGDKPYLISGADDRLVKIWDYQNKTCVQTLEGHAQNVSCASFHPELPIIITGSEDGTVRIWHSSTYRLESTLNYGMERVWCVASLRGSNNVALGYDEGSIIVKLGREEPAMSMDANGKIIWAKHSEVQQANLKAMGDAEIKDGERLPLAVKDMGSCEIYPQTIQHNPNGRFVVVCGDGEYIIYTAMALRNKSFGSAQEFAWAHDSSEYAIRESNSIVKIFKNFKEKKSFKPDFGAESIYGGFLLGVRSVNGLAFYDWDNTELIRRIEIQPKHIFWSDSGELVCIATEESFFILKYLSEKVLAAQETHEGVTEDGIEDAFEVLGEIQEIVKTGLWVGDCFIYTSSVNRLNYYVGGEIVTIAHLDRTMYLLGYIPKDNRLYLGDKELNIISYSLLVSVLEYQTAVMRRDFSMADKVLPTIPKEQRTRVAHFLEKQGFKQQALTVSTDPEHRFELALQLGELKIAYQLAVEAESEQKWKQLAELAISKCQFGLAQECLHHAQDYGGLLLLATASGNANMVNKLAEGAERDGKNNVAFMSYFLQGKVDACLELLIRTGRLPEAAFLARTYLPSQVSRVVKLWRENLSKVNQKAAESLADPTEYENLFPGLKEAFVVEEWVKETHADLWPAKQYPLVTPNEERNVMEEGKDFQPSRSTAQQELDGKPASPTPVIVASHTANKEEKSLLELEVDLDNLELEDIDTTDINLDEDILDD

SEQ ID NO: 45593 - protein, 20 aa, Homo sapiens
MSTGSCKNTTAVIFCDALYF

SEQ ID NO: 45594 - protein, 82 aa, Homo sapiens
MAGASVNRVVSPGPLHCLKVILEKEGPRSLFRGLGPNLVGVAPSRAIYFAAYSNCKEKLNDVFDPDSTQVHMISAAMAGHFL

SEQ ID NO: 45595 - protein, 1017 aa, Homo sapiens
MFSPLDLRASFKKVSDSMRTASLCLERTDVCHEAEPVRTLAEHSYAVSSVAEAYRSQPVREHDGSSPGNTGKENCEALAAKPKTCRKPKTFSIPQDSDSATENIPPPPVSNLEVNQERSPQPAAVLTRSKSPNNEGDVHFSREDENQSSDVPGPPAAEVPPLVYNCSCCSKAFDSSTLLSAHMQLHKPTQEPLVCKYCNKQFTTLNRLDRHEQICMRSSHMPIPGGNQRFLENYPTIGQNGGSFTGPEPLLSENRIGEFSSTGSTLPDTDHMVKFVNGQMLYSCVVCKRSYVTLSSLRRHANVHSWRRTYPCHYCNKVFALAEYRTRHEIWHTGERRYQCIFCLETFMTYYILKNHQKSFHAIDHRLSISKKTANGGLKPSVYPYKLYRLLPMKCKRAPYKSYRNSSYENARENSQMNESAPGTYVVQNPHSSELPTLNFQDTVNTLTNSPAIPLETSACQDIPTSANVQNAEGTKWGEEALKMDLDNNFYSTEVSVSSTENAVSSDLRAGDVPVLSLSNSSENAASVISYSGSAPSVIVHSSQFSSVIMHSNAIAAMTSSNHRAFSDPAVSQSLKDDSKPEPDKVGRFASRPKSIKEKKKTTSHTRGEIPEESNYVADPGGSLSKTTNIAEETSKIETYIAKPALPGTSTNSNVAPLCQITVKIGNEAIVKRHILGSKLFYKRGRRPKYQMQEEPLPQGNDPEPSGDSPLGLCQSECMEMSEVFDDASDQDSTDKPWRPYYNYKPKKKSRQLKKMRKVNWRKEHGNRSPSHKCKYPAELDCAVGKAPQDKPFEEEETKEMPKLQCELCDGDKAVGAGNQGRPHRHLTSRPYACELCAKQFQSPSTLKMHMRCHTGEKPYQCKTCGRCFSVQGNLQKHERIHLGLKEFVCQYCNKAFTLNETLKIHERIHTGEKRYHCQFCFQRFLYLSTKRNHEQRHIREHNGKGYACFQCPKICKTAAALGMHQKKHLFKSPSQQEKIGDVCHENSNPLENQHFIGSEDNDQKDNIQTGVENVVL

SEQ ID NO: 45596 - protein, 1659 aa, Homo sapiens [sequence omitted]

SEQ ID NO: 45597 - protein, 728 aa, Homo sapiens
MALKDVREVKEENTLNEKLFLLACDKGDYYMVKKILEENSSGDLNINCVDVLGRNAVTITIENENLDILQLLLDYGCQKLMERIQNPEYSTTMDVAPVILAAHRNNYEILTMLLKQDVSLPKPHAVGCECTLCSAKNKKDSLRHSRFRLDIYRCLASPALIMLTEEDPILRAFELSADLKELSLVEVEFRNDYEELARQCKMFAKDLLAQARNSRELEVILNHTSSDEPLDKRGLLEERMNLSRLKLAIKYNQKEFVSQSNCQQFLNTVWFGQMSGYRRKPTCKKIMTVLTVGIFWPVLSLCYLIAPKSQFGRIIHTPFMKFIIHGASYFTFLLLLNLYSLVYNEDKKNTMGPALERIDYLLILWIIGMIWSDIKRLWYEGLEDFLEESRNQLSFVMNSLYLATFALKVVAHNKFHDFADRKDWDAFHPTLVAEGLFAFANVLSYLRLFFMYTTSSILGPLQISMGQMLQDFGKFLGMFLLVLFSFTIGLTQLYDKGYTSKEQKDCVGIFCEQQSNDTFHSFIGTCFALFWYIFSLAHVAIFVTRFSYGEELQSFVGAVIVGTYNVVVVIVLTKLLVAMLHKSFQLIANHEDKEWKFARAKLWLSYFDDKCTLPPPFNIIPSPKTICYMISSLSKWICSHTSKGKVKRQNSLKEWRNLKQKRDENYQKVMCCLVHRYLTSMRQKMQSTDQATVENLNELRQDLSKFRNEIRDLLGFRTSKYAMFYPRN

SEQ ID NO: 45598 - protein, 999 aa, Homo sapiens
MDASGPSDSDMPSRTRPKSPRKHNYRNESARESLCDSPHQNLSRPLLENKLKAFSIGKMSTAKRTLSKKEQEELKKKEDEKAAAEIYEEFLAAFEGSDGNKVKTFVRGGVVNAAKEEHETDEKRGKIYKPSSRFADQKNPPNQSSNERPPSLLVIETKKPPLKKGEKEKKKSNLELFKEELKQIQEERDERHKTKGRLSRFEPPQSDSDGQRRSMDAPSRRNRSSGVLDDYAPGSHDVGDPSTTNLYLGNINPQMNEEMLCQEFGRFGPLASVKIMWPRTDEERARERNCGFVAFMNRRDAERALKNLNGKMIMSFEMKLGWGKAVPIPPHPIYIPPSMMEHTLPPPPSGLPFNAQPRERLKNPNAPMLPPPKNKEDFEKTLSQAIVKVVIPTERNLLALIHRMIEFVVREGPMFEAMIMNREINNPMFRFLFENQTPAHVYYRWKLYSILQGDSPTKWRTEDFRMFKNGSFWRPPPLNPYLHGMSEEQETEAFVEEPSKKGALKEEQRDKLEEILRGLTPRKNDIGDAMVFCLNNAEAAEEIVDCITESLSILKTPLPKKIARLYLVSDVLYNSSAKVANASYYRKFFETKLCQIFSDLNATYRTIQGHLQSENFKQRVMTCFRAWEDWAIYPEPFLIKLQNIFLGLVNIIEEKETEDVPDDLDGAPIEEELDGAPLEDVDGIPIDATPIDDLDGVPIKSLDDDLDGVPLDATEDSKKNEPIFKVAPSKWEAVDESELEAQAVTTSKWELFDQHEESEEEENQNQEEESEDEEDTQSSKSEEHHLYSNPIKEEMTESKFSKYSEMSEEKRAKLREIELKVMKFQDELESGKRPKKPGQSFQEQVEHYRDKLLQREKEKELERERERDKKDKEKLESRSKDKKEKDECTPTRKERKRRHSTSPSPSRSSSGRRVKSPSPKSERSERSERSHKESSRSRSSHKDSPRDVSKKAKRSPSGSRTPKRSRRSRSRSPKKSGKKSRSQSRSPHRSHKKSKKNKH

SEQ ID NO: 45599 - protein, 998 aa, Homo sapiens
MDASGPSDSDMPSRTRPKSPRKHNYRNESARESLCDSPHQNLSRPLLENKLKAFSIGKMSTAKRTLSKKEQEELKKKEDEKAAAEIYEEFLAAFEGSDGNKVKTFVRGGVVNAAKEEHETDEKRGKIYKPSSRFADQKNPPNQSSNERPPSLLVIETKKPPLKKGEKEKKKSNLELFKEELKQIQEERDERHKTKGRLSRFEPPQSDSDGQRRSMDAPSRRNRSSVLDDYAPGSHDVGDPSTTNLYLGNINPQMNEEMLCQEFGRFGPLASVKIMWPRTDEERARERNCGFVAFMNRRDAERALKNLNGKMIMSFEMKLGWGKAVPIPPHPIYIPPSMMEHTLPPPPSGLPFNAQPRERLKNPNAPMLPPPKNKEDFEKTLSQAIVKVVIPTERNLLALIHRMIEFVVREGPMFEAMIMNREINNPMFRFLFENQTPAHVYYRWKLYSILQANSPTKWRTEDFRMFKNGSFWRPPPLNPYLHGMSEEQETEAFVEEPSKKGALKEEQRDKLEEILRGLTPRKNDIGDAMVFCLNNAEAAEEIVDCITESLSILKTPLPKKIARLYLVSDVLYNSSAKVANASYYRKFFETKLCQIFSDLNATYRTIQGHLQSENFKQRVMTCFRAWEDWAIYPEPFLIKLQNIFLGLVNIIEEKETEDVPDDLDGAPIEEELDGAPLEDVDGIPIDATPIDDLDGVPIKSLDDDLDGVPLDATEDSKKNEPIFKVAPSKWEAVDESELEAQAVTTSKWELFDQHEESEEEENQNQEEESEDEEDTQSSKSEEHHLYSNPIKEEMTESKFSKYSEMSEEKRAKLREIELKVMKFQDELESGKRPKKPGQSFQEQVEHYRDKLLQREKEKELERERERDKKDKEKLESRSKDKKEKDECTPTRKERKRRHSTSPSPSRSSSGRRVKSPSPKSERSERSERSHKESSRSRSSHKDSPRDVSKKAKRSPSGSRTPKRSRRSRSRSPKKSGKKSRSQSRSPHRSHKKSKKNKH

SEQ ID NO: 45600 - protein, 385 aa, Homo sapiens
MGMDFCRQDEKCDYYFSVDADVVLTNPRTLKILIEQNRKIIAPLVTRHGKLWSNFWGALSPDGYYARSEDYVDIVQGNRVGVWNVPYMANVYLIKGKTLRSEMNERNYFVRDKLDPDMALCRNAREMTLQREKDSPTPETFQMLSPPKGVFMYISNRHEFGRLLSTANYNTSHYNNDLWQIFENPVDWKEKYINRDYSKIFTENIVEQPCPDVFWFPIFSEKACDELVEEMEHYGKWSGGKHHDSRISGGYENVPTDDIHMKQVDLENVWLHFIREFIAPVTLKVFAGYYTKGFALLNFVVKYSPERQRSLRPHHDASTFTINIALNNVGEDFQGGGCKFLRYNCSIESPRKGWSFMHPGRLTHLHEGLPVKNGTRYIAVSFIDP

SEQ ID NO: 45601 - protein, 143 aa, Homo sapiens [sequence omitted]

SEQ ID NO: 45602 - protein, 129 aa, Homo sapiens
MCDGCCQEAAIVGYCDAKYVWAATAGGVFQSITPIEIDMIVGKDREGFFTNGLTLGAKKCSVIRDSLYVDGDCTMDIRTKSQGGEPTYNVAVGRAGRALVIVMGKEGVHGGTLNKKAYELALYLRRSDV

SEQ ID NO: 45603 - protein, 129 aa, Homo sapiens [sequence omitted]

SEQ ID NO: 45604 - protein, 777 aa, Homo sapiens
MPAKKKSCFQITSVTTAQVATSITEDTESLDDPDESRTEDVSSEIFDVSRATDYGPEEVCERSSSEETLNNVGDAETPGTVSPNLLLDGQLAAAAAAPANGGGVVSARSVSGALASTLAAAATSAPAPGAPGGPQLAGSSAGPVTAAPSQPPTTCSSRFRVIKLDHGSGEPYRRGRWTCMEYYERDSDSSVLTRSGDCIRHSSTFDQTAERDSGLGATGGSVVVVVASMQGAHGPESGTDSSLTAVSQLPPSEKMSQPTPAQPQSFSVGQPQPPPPPVGGAVAQSSAPLPPFPGAATGPQPMMAAAQPSQPQGAGPGGQTLPPTNVTLAQPAMSLPPQPGPAVGAPAAQQPQQFAYPQPQIPPGHLLPVQPSGQSEYLQQHVAGLQPPSPAQPSSTGAAASPATAATLPVGTGQNASSVGAQLMGASSQPSEAMAPRTGPAQGGQVAPCQPTGVPPATVGGVVQPCLGPAGAGQPQSVPPPQMGGSGPLSAVPGGPHAVVPGVPNVPAAVPAPSVPSVSTTSVTMPNVPAPLAQSQQLSSHTPVSRSSSIIQHVGLPLAPGTHSAPTSLPQSDLSQFQTQTQPLVGQVDDTRRKSEPLPQPPLSLIAENKPVVKPPVADSLANPLQLTPMNSLATSVFSIAIPVDGDEDRNPSTAFYQAFHLNTLKESKSLWDSASGGGVVAIDNKIEQAMDLVKSHLMYAVREEVEVLKEQIKELVERNSLLERENALLKSLSSNDQLSQLPTQQANPGSTSQQQAVIAQPPQPTQPPQQPNVSSA

SEQ ID NO: 45605 - protein, 58 aa, Homo sapiens
MANEKHSKNITQRGNVAKTSRNAPEEKASVGPWLLALFIFVVCGSAIFQIIQSIRMGM

SEQ ID NO: 45606 - protein, 2551 aa, Homo sapiens
METDFSGLTKLELLMLHSNGIHTIPDKTFSDLQALQVLKMSYNKVRKLQKDTFYGLRSLTRLHMDHNNIEFINPEVFYGLNFLRLVHLEGNQLTKLHPDTFVSLSYLQIFKISFIKFLYLSDNFLTSLPQEMVSYMPDLDSLYLHGNPWTCDCHLKWLSDWIQEKPDVIKCKKDRSPSSAQQCPLCMNPRTSKGKPLAMVSAAAFQCAKPTIDSSLKSKSLTILEDSSSAFISPQGFMAPFGSLTLNMTDQSGNEANMVCSIQKPSRTSPIAFTEENDYIVLNTSFSTFLVCNIDYGHIQPVWQILALYSDSPLILERSHLLSETPQLYYKYKQVAPKPEDIFTNIEADLRADPSWLMQDQISLQLNRTATTFSTLQIQYSSDAQITLPRAEMRPVKHKWTMISRDNNTKLEHTVLVGGTVGLNCPGQGDPTPHVDWLLADGSKVRAPYVSEDGRILIDKSGKLELQMADSFDTGVYHCISSNYDDADILTYRITVVEPLVEAYQENGIHHTVFIGETLDLPCHSTGIPDASISWVIPGNNVLYQSSRDKKVLNNGTLRILQVTPKDQGYYRCVAANPSGVDFLIFQVSVKMKGQRPLEHDGETEGSGLDESNPIAHLKEPPGAQLRTSALMEAEVGKHTSSTSKRHNYRELTLQRRGDSTHRRFRENRRHFPPSARRIDPQHWAALLEKAKKNAMPDKRENTTVSPPPVVTQLPNIPGEEDDSSGMLALHEEFMVPATKALNLPARTVTADSRTISDSPMTNINYGTEFSPVVNSQILPPEEPTDFKLSTAIKTTAMSKNINPTMSSQIQGTTNQHSSTVFPLLLGATEFQDSDQMGRGREHFQSRPPITVRTMIKDVNVKMLSSTTNKLLLESVNTTNSHQTSVREVSEPRHNHFYSHTTQILSTSTFPSDPHTAAHSQFPIPRNSTVNIPLFRRFGRQRKIGGRGRIISPYRTPVLRRHRYSIFRSTTRGSSEKSTTAFSATVLNVTCLSCLPRERLTTATAALSFPSAAPITFPKADIARVPSEESTTLVQNPLLLLENKPSVEKTTPTIKYFRTEISQVTPTGAVMTYAPTSIPMEKTHKVNASYPRVSSTNEAKRDSVITSSLSGAITKPPMTIIAITRFSRRKIPWQQNFVNNHNPKGRLRNQHKVSLQKSTAVMLPKTSPALPRDKVSPFHFTTLSTSVMQIPSNTLTTAHHTTTKTHNPGSLPTKKELPFPPLNPMLPSIISKDSSTKSIISTQTAIPATTPTFPASVITYETQTERSRAQTIQREQEPQKKNRTDPNISPDQSSGFTTPTAMTPPVLTTAETSVKPSVSAFTHSPPENTTGISSTISFHSRTLNLTDVIEELAQASTQTLKSTIASETTLSSKSHQSTTTRKAIIRHSTIPPFLSSSATLMPVPISPPFTQRAVTDNVATPISGLMTNTVVKLHESSRHNAKPQQLVAEVATSPKVHPNAKFTIGTTHFIYSNLLHSTPMPALTTVKSQNSKLTPSPWAENQFWHKPYSEIAEKGKKPEVSMLATTGLSEATTLVSDWDGQKNTKKSDFDKKPVQEATTSKLLPFDSLSRYIFEKPRIVGGKAASFTIPANSDAFLPCEAVGNPLPTIHWTRVPSGLDLSKRKQNSRVQVLPNGTLSIQRVEIQDRGQYLCSASNLFGTDHLHVTLSVVSYPPRILERRTKEITVHSGSTVELKCRAEGRPSPTVTWILANQTVVSESSQGSRQAVVTVDGTLVLHNLSIYDRGFYKCVASNPGGQDSLLVKIQVIAAPPVILEQRRQVIVGTWGESLKLPCTAKGTPQPSVYWVLSDGTEVKPLQFTNSKLFLFSNGTLYIRNLASSDRGTYECIATSSTGSERRVVMLTMEERVTSPRIEAASQKRTEVNFGDKLLLNCSATGEPKPQIMWRLPSKAVVDQQHRVGSWIHVYPNGSLFIGSVTEKDSGVYLCVARNKMGDDLILMHVSLRLKPAKIDHKQYFRKQVLHGKDFQVDCKASGSPVPEISWSLPDGTMINNAMQADDSGHRTRRYTLFNNGTLYFNKVGVAEEGDYTCYAQNTLGKDEMKVHLTVITAAPRIRQSNKTNKRIKAGDTAVLDCEVTGDPKPKIFWLLPSNDMISFSIDRYTFHANGSLTINKVKLLDSGEYVCVARNPSGDDTKMYKLDVVSKPPLINGLYTNRTVIKATAVRHSKKHFDCRAEGTPSPEVMWIMPDNIFLTAPYYGSRITVHKNGTLEIRNVRLSDSADFICVARNEGGESVLVVQLEVLEMLRRPTFRNPFNEKIVAQLGKSTALNCSVDGNPPPEIIWILPNGTRFSNGPQSYQYLIASNGSFIISKTTREDAGKYRCAARNKVGYIEKLVILEIGQKPVILTYAPGTVKGISGESLSLHCVSDGIPKPNIKWTMPSGYVVDRPQINGKYILHDNGTLVIKEATAYDRGNYICKAQNSVGHTLITVPVMIVAYPPRITNRPPRSIVTRTGAAFQLHCVALGVPKPEITWEMPDHSLLSTASKERTHGSEQLHLQGTLVIQNPQTSDSGIYKCTAKNPLGSDYAATYIQVI

SEQ ID NO: 45607 - protein, 296 aa, Homo sapiens
MAMLAQQMQLANAMMPGAPLQPVPMFSVAPSLATNASAAAFNPYLGPVSPSLVPAEILPTAPMLVTGNPGVPVPAAAAAAAQKLMRTDRLEVCREYQRGNCNRGENDCRFAHPADSTMIDTNDNTVTVCMDYIKGRCSREKCKYFHPPAHLQAKIKAAQYQVNQAAAAQAAATAAAMTQSAVKSLKRPLEATFDLGIPQAVLPPLPKRPALEKTNGATAVFNTGIFQYQQALANMQLQQHTAFLPPVPMVHGATPATVSAATTSATSVPFAATATANQIPIISAEHLTSHKYVTQM

SEQ ID NO: 45608 - protein, 308 aa, Homo sapiens
MAMLAQQMQLANAMMPGAPLQPVPMFSVAPSLATNASAAAFNPYLGPVSPSLVPAEILPTAPMLVTGNPGVPVPAAAAAAAQKLMRTDRLEVCREYQRGNCNRGENDCRFAHPADSTMIDTNDNTVTVCMDYIKGRCSREKCKYFHPPAHLQAKIKAAQYQVNQAAAAQAAATAAAMTQSAVKSLKRPLEATFDLGIPQAVLPPLPKRPALEKTNGATAVFNTGIFQYQQALANMQLQQHTAFLPPGSILCMTPATSVVPMVHGATPATVSAATTSATSVPFAATATANQIPIISAEHLTSHKYVTQM

SEQ ID NO: 45609 - protein, 290 aa, Homo sapiens
MAMLAQQMQLANAMMPGAPLQPVPMFSVAPSLATNASAAAFNPYLGPVSPSLVPAEILPTAPMLVTGNPGVPVPAAAAAAAQKLMRTDRLEVCREYQRGNCNRGENDCRFAHPADSTMIDTNDNTVTVCMDYIKGRCSREKCKYFHPPAHLQAKIKAAQYQVNQAAAAQAAATAAAMGIPQAVLPPLPKRPALEKTNGATAVFNTGIFQYQQALANMQLQQHTAFLPPGSILCMTPATSVVPMVHGATPATVSAATTSATSVPFAATATANQIPIISAEHLTSHKYVTQM

SEQ ID NO: 45610 - protein, 278 aa, Homo sapiens
MAMLAQQMQLANAMMPGAPLQPVPMFSVAPSLATNASAAAFNPYLGPVSPSLVPAEILPTAPMLVTGNPGVPVPAAAAAAAQKLMRTDRLEVCREYQRGNCNRGENDCRFAHPADSTMIDTNDNTVTVCMDYIKGRCSREKCKYFHPPAHLQAKIKAAQYQVNQAAAAQAAATAAAMGIPQAVLPPLPKRPALEKTNGATAVFNTGIFQYQQALANMQLQQHTAFLPPVPMVHGATPATVSAATTSATSVPFAATATANQIPIISAEHLTSHKYVTQM

SEQ ID NO: 45611 - protein, 250 aa, Homo sapiens
MAMLAQQMQLANAMMPGAPLQPVPMFSVAPSLATNASAAAFNPYLGPVSPSLVPAEILPTAPMLVTGNPGVPVPAAAAAAAQKLMRTDRLEVCREYQRGNCNRGENDCRFAHPADSTMIDTNDNTVTVCMDYIKGRCSREKCKYFHPPAHLQAKIKAAQYQVNQAAAAQAAATAAAMGIPQAVLPPLPKRPALEKTNGATAVFNTGIFQYQQALANMQLQQHTAFLPPGSILCMTPATSVDTHNICRTSD

SEQ ID NO: 45612 - protein, 238 aa, Homo sapiens
MAMLAQQMQLANAMMPGAPLQPVPMFSVAPSLATNASAAAFNPYLGPVSPSLVPAEILPTAPMLVTGNPGVPVPAAAAAAAQKLMRTDRLEVCREYQRGNCNRGENDCRFAHPADSTMIDTNDNTVTVCMDYIKGRCSREKCKYFHPPAHLQAKIKAAQYQVNQAAAAQAAATAAAMGIPQAVLPPLPKRPALEKTNGATAVFNTGIFQYQQALANMQLQQHTAFLPPDTHNICRTSD

SEQ ID NO: 45613 - protein, 256 aa, Homo sapiens
MAMLAQQMQLANAMMPGAPLQPVPMFSVAPSLATNASAAAFNPYLGPVSPSLVPAEILPTAPMLVTGNPGVPVPAAAAAAAQKLMRTDRLEVCREYQRGNCNRGENDCRFAHPADSTMIDTNDNTVTVCMDYIKGRCSREKCKYFHPPAHLQAKIKAAQYQVNQAAAAQAAATAAAMTQSAVKSLKRPLEATFDLGIPQAVLPPLPKRPALEKTNGATAVFNTGIFQYQQALANMQLQQHTAFLPPDTHNICRTSD

SEQ ID NO: 45614 - protein, 841 aa, Homo sapiens
MFRIRNRSYIDRDSEYLLQENEPDGTLDQKLLEDLQKKKNDLRYIEMQHFREKLPSYGMQKELVNLIDNHQVTVISGETGCGKTTQVTQFILDNYIERGKGSACRIVCTQPRRISAISVAERVAAERAESCGSGNSTGYQIRLQSRLPRKQGSILYCTTGIILQWLQSDPYLSSVSHIVLDEIHERNLQSDVLMTVVKDLLNFRSDLKVILMSATLNAEKFSEYFGNCPMIHIPGFTFPVVEYLLEDVIEKIRYVPEQKEHRSQFKRGFMQGHVNRQEKEEKEAIYKERWPDYVRELRRRYSASTVDVIEMMEDDKVDLNLIVALIRYIVLEEEDGAILVFLPGWDNISTLHDLLMSQVMFKSVNQTQVFKRTPPGVRKIVIATNIAETSITIDDVVYVIDGGKIKETHFDTQNNISTMSAEWVSKANAKQRKGRAGRVQPGHCYHLYNGLRASLLDDYQLPEILRTPLEELCLQIKILRLGGIAYFLSRLMDPPSNEAVLLSIRHLMELNALDKQEELTPLGVHLARLPVEPHIGKMILFGALFCCLDPVLTIAASLSFKDPFVIPLGKEKIADARRKELAKDTRSDHLTVVNAFEGWEEARRRGFRYEKDYCWEYFLSSNTLQMLHNMKGQFAEHLLGAGFVSSRNPKDPESNINSDNEKIIKAVICAGLYPKVAKIRLNLGKKRKMVKVYTKTDGLVAVHPKSVNVEQTDFHYNWLIYHLKMRTSSIYLYDCTEVSPYCLLFFGGDISIQKDNDQETIAVDEWIVFQSPARIAHLVKELRKELDILLQEKIESPHPVDWNDTKSRDCAVLSAIIDLIKTQEKATPRNFPPRFQDGYYS

SEQ ID NO: 45615 - protein, 855 aa, Homo sapiens
MFRIRNRSYIDRDSEYLLQENEPDGTLDQKLLEDLQKKKNDLRYIEMQHFREKLPSYGMQKELVNLIDNHQVTVISGETGCGKTTQVTQFILDNYIERGKGSACRIVCTQPRRISAISVAERVAAERAESCGSGNSTGYQIRLQSRLPRKQGSILYCTTGIILQWLQSDPYLSSVSHIVLDEIHERNLQSDVLMTVVKDLLNFRSDLKVILMSATLNAEKFSEYFGNCPMIHIPGFTFPVVEYLLEDVIEKIRYVPEQKEHRSQFKRGFMQGHVNRQEKEEKEAIYKERWPDYVRELRRRYSASTVDVIEMMEDDKVDLNLIVALIRYIVLEEEDGAILVFLPGWDNISTLHDLLMSQVMFKSDKFLIIPLHSLMPTVNQTQVFKRTPPGVRKIVIATNIAETSITIDDVVYVIDGGKIKETHFDTQNNISTMSAEWVSKANAKQRKGRAGRVQPGHCYHLYNGLRASLLDDYQLPEILRTPLEELCLQIKILRLGGIAYFLSRLMDPPSNEAVLLSIRHLMELNALDKQEELTPLGVHLARLPVEPHIGKMILFGALFCCLDPVLTIAASLSFKDPFVIPLGKEKIADARRKELAKDTRSDHLTVVNAFEGWEEARRRGFRYEKDYCWEYFLSSNTLQMLHNMKGQFAEHLLGAGFVSSRNPKDPESNINSDNEKIIKAVICAGLYPKVAKIRLNLGKKRKMVKVYTKTDGLVAVHPKSVNVEQTDFHYNWLIYHLKMRTSSIYLYDCTEVSPYCLLFFGGDISIQKDNDQETIAVDEWIVFQSPARIAHLVKELRKELDILLQEKIESPHPVDWNDTKSRDCAVLSAIIDLIKTQEKATPRNFPPRFQDGYYS

SEQ ID NO: 45616 - protein, 245 aa, Homo sapiens [sequence omitted]

SEQ ID NO: 45617 - protein, 525 aa, Homo sapiens [sequence omitted]

SEQ ID NO: 45618 - protein, 423 aa, Homo sapiens [sequence omitted]

SEQ ID NO: 45619 - protein, 312 aa, Homo sapiens
MKSGPLPPGGWDDSHLDSAGREGDREALLGDTGTGDFLKAPQSFRAELSSILLLLFLYVLQGIPLGLAGSIPLILQSKNVSYTDQAFFSFVFWPFSLKLLWAPLVDAVYVKNFGRRKSWLVPTQYILGLFMIYLSTQVDRLLGNTDDRTPDVIALTVAFFLFEFLAATQDIAVDGWALTMLSRENVGYASTCNSVGQTAGYFLGNVLFLALESADFCNKYLRFQPQPRGIVTLSDFLFFWGTVFLITTTLVALLKKENEVSVVKEETQGITDTYKLLFAIIKMPAVLTFCLLILTAKIIAWVRICPTGLVDS

SEQ ID NO: 45620 - protein, 631 aa, Homo sapiens
MRLSEKITPLKTCFKKKDQKRLGTGTLRSLRPILNTLLESGSLDGVFRSRNQSTDENSLHEPMMKKAMEINSSCPPAENNMSVLIPDRTNVGDQIPEAHPSTEAPERVVPIQDHSFPSETLSGTVADSTPAHFQTDLLHPVSSDVPTSPDCLDKVIDYVPGIFQENSFTIQYILDTSDKLSTELFQDKSEEASLDLVFELVNQLQYHTHQENGIEICMDFLQGTCIYGRDCLKHHTVLPYHWQIKRTTTQKWQSVFNDSQEHLERFYCNPENDRMRMKYGGQEFWADLNAMNVYETTEFDQLRRLSTPPSSNVNSIYHTVWKFFCRDHFGWREYPESVIRLIEEANSRGLKEVRFMMWNNHYILHNSFFRREIKRRPLFRSCFILLPYLQTLGGVPTQAPPPLEATSSSQIICPDGVTSANFYPETWVYMHPSQDFIQVPVSAEDKSYRIIYNLFHKTVPEFKYRILQILRVQNQFLWEKYKRKKEYMNRKMFGRDRIINERHLFHGTSQDVVDGICKHNFDPRVCGKHATMFGQGSYFAKKASYSHNFSKKSSKGVHFMFLAKVLTGRYTMGSHGMRRPPPVNPGSVTSDLYDSCVDNFFEPQIFVIFNDDQSYPYFVIQYEEVSNTVSI

SEQ ID NO: 45621 - protein, 359 aa, Homo sapiens
MQDGLDLPSETDLRILGCELIQAAGILLRLPQVAMATGQVLFHRFFYSKSFVKHSFEIVAMACINLASKIEEAPRRIRDVINVFHHLRQLRGKRTPSPLILDQNYINTKNQVIKAERRVLKELGFCVHVKHPHKIIVMYLQVLECERNQTLVQTAWNYMNDSLRTNVFVRFQPETIACACIYLAARALQIPLPTRPHWFLLFGTTEEEIQEICIETLRLYTRKKPNYELLEKEVEKRKVALQEAKLKAKGLNPDGTPALSTLGGFSPASKPSSPREVKAEEKSPISINVKTVKKEPEDRQQASKSPYNGVRKDSKRSRNSRSASRSRSRTRSRSRSHTPRRQDEVLLRCPGRSRTPGLK

SEQ ID NO: 45622 - protein, 457 aa, Homo sapiens
MQDGLDLPSETDLRILGCELIQAAGILLRLPQVAMATGQVLFHRFFYSKSFVKHSFEIVAMACINLASKIEEAPRRIRDVINVFHHLRQLRGKRTPSPLILDQNYINTKNQVIKAERRVLKELGFCVHVKHPHKIIVMYLQVLECERNQTLVQTAWNYMNDSLRTNVFVRFQPETIACACIYLAARALQIPLPTRPHWFLLFGTTEEEIQEICIETLRLYTRKKPNYELLEKEVEKRKVALQEAKLKAKGLNPDGTPALSTLGGFSPASKPSSPREVKAEEKSPISINVKTVKKEPEDRQQASKSPYNGVRKDSKRSRNSRSASRSRSRTRSRSRSHTPRRHYNNRRSRSGTYSSRSRSRSRSHSESPRRHHNHGSPHLKAKHTRDDLKSSNRHGHKRKKSRSRSQSKSRDHSDAAKKHRHERGHHRDRRERSRSFERSHKSKHHGGSRSGHGRHRR

SEQ ID NO: 45623 - protein, 721 aa, Homo sapiens
MSCILQNYNRPPVMALAIPIAVKFLHRGNKELCRNMSNYLSLAAITKADLLADHTEVIVKSILQGNTMLLRVLPAVYEKQPQPINRHLTELLALMSQLEQPEQYHLLRLLHVAAKKKQLEVVQKCIPFLIGHLKDSTHNDIILNILIEIAVYEPVALNSFLPMLKEIGERFPYLTGQMARIYGAVGHVDEERARSCLTYLVSQLANMEHSFHHILLLEIKSITDTFSSILGPQSRDIFRMSNSFTAIAKLLTRQLENTKAGSGRRKISTEIEFPEKLEETKLIVTENEDHEKLQVKIQAFEDKINAGSNTPGSIRRYSLGQVSKEERKNIRFNRSKSLAFHTMLTKGVGSDDGEDENRGDIPASISLSEIDPLGQGNDKLPFKTDTERSQLGESSVSYPNIIHIDSENLSETVKENSQEETPETTASPIEYQDKLYLHLKKNLSKVKAYAMEIGKKIPVPDQCTIEDTVRSCVAKLFFTCSLKGHYCLYSKSSFILISQEPQPWIQIMFLFQQSLFPEPLSIQSHSVQFLRALWEKTQAGGAHSFETAMMESTFPQQKDLDQVQLHLEEVRFFDVFGFSETAGAWQCFMCNNPEKATVVNQDGQPLIEGKLKEKQVRWKFIKRWKTRYFTLAGNQLLFQKGKSKDDPDDCPIELSKVQSVKAVAKKRRDRSLPRAFEIFTDNKTYVFKAKDEKNAEEWLQCINVAVAQAKERESREVTTYL

SEQ ID NO: 45624 - protein, 57 aa, Homo sapiens
MNTDVIILSQFMYYRLKNQKKKMIFQPQLFKDSITREKVRLSLWGVLCPVYIPYSFR

SEQ ID NO: 45625 - protein, 265 aa, Homo sapiens
MLNSSFEDDPFFSESILAHRENMRQMIRSFSEPFGRDLLSISDGRGRAHNRRGHNDGEDSLTHTDVSSFQTMDQMVSNMRNYMQKLERNFGQLSVDPNGHSFCSSSVMTYSKIGDEPPKVFQASTQTRRAPGGIKETRKAMRDSDSGLEKMAIGHHIHDRAHVIKKSKNKKTGDEEVNQEFINMNESDAHAFDEEWQSEVLKYKPGRHNLGNTRMRSVGHENPGSRELKRREKPQQSPAIEHGRRSNVLGDKLHIKGSSVKSNKK

SEQ ID NO: 45626 - protein, 679 aa, Homo sapiens
MELERQRGITIQSAATYTMWKDVNINIIDTPGHVDFTIEVERALRVLDGAVLVLCAVGGVQCQTMTVNRQMKRYNVPFLTFINKLDRMGSNPARALQQMRSKLNHNAAFMQIPMGLEGNFKGIVDLIEERAIYFDGDFGHFLRDFLPLLWNWDRRSGSQIVRYGEIPAELRAAATDHRQELIECVANSDEQLGEMFLEEKIPSISDLKLAIRRATLKRSFTPVFLGSALKNKGVQPLLDAVLEYLPNPSEVQNYAILNKEDDSKEKTKILMNSSRDNSHPFVGLAFKLEVGRFGQLTYVRSYQGELKKGDTIYNTRTRKKVRLQRLARMHADMMEDVEEVYAGDICALFGIDCASGDTFTDKANSGLSMESIHVPDPVISIAMKPSNKNDLEKFSKGIGRFTREDPTFKVYFDTENKETVISGMGELHLEIYAQRLEREYGCPCITGKPKVAFRETITAPVPFDFTHKKQSGGAGQYGKVIGVLEPLDPEDYTKLEFSDETFGSNIPKQFVPAVEKGFLDACEKGPLSGHKLSGLRFVLQDGAHHMVDSNEISFIRAGEGALKQALANATLCILEPIMAVEVVAPNEFQGQVIAGINRRHGVITGQDGVEDYFTLYADVPLNDMFGYSTELRSCTEGKGEYTMEYSRYQPCLPSTQEDVINKYLEATGQLPVKKGKAKN

SEQ ID NO: 45627 - protein, 660 aa, Homo sapiens
MELERQRGITIQSAATYTMWKDVNINIIDTPGHVDFTIEVERALRVLDGAVLVLCAVGGVQCQTMTVNRQMKRYNVPFLTFINKLDRMGSNPARALQQMRSKLNHNAAFMQIPMGLEGNFKGIVDLIEERAIYFDGDFGQIVRYGEIPAELRAAATDHRQELIECVANSDEQLGEMFLEEKIPSISDLKLAIRRATLKRSFTPVFLGSALKNKGVQPLLDAVLEYLPNPSEVQNYAILNKEDDSKEKTKILMNSSRDNSHPFVGLAFKLEVGRFGQLTYVRSYQGELKKGDTIYNTRTRKKVRLQRLARMHADMMEDVEEVYAGDICALFGIDCASGDTFTDKANSGLSMESIHVPDPVISIAMKPSNKNDLEKFSKGIGRFTREDPTFKVYFDTENKETVISGMGELHLEIYAQRLEREYGCPCITGKPKVAFRETITAPVPFDFTHKKQSGGAGQYGKVIGVLEPLDPEDYTKLEFSDETFGSNIPKQFVPAVEKGFLDACEKGPLSGHKLSGLRFVLQDGAHHMVDSNEISFIRAGEGALKQALANATLCILEPIMAVEVVAPNEFQGQVIAGINRRHGVITGQDGVEDYFTLYADVPLNDMFGYSTELRSCTEGKGEYTMEYSRYQPCLPSTQEDVINKYLEATGQLPVKKGKAKN

SEQ ID NO: 45628 - protein, 1216 aa, Homo sapiens
MTNEAGAPRLMITHIVNQNFKSYAGEKILGPFHKRFSCIIGPNGSGKSNVIDSMLFVFGYRAQKIRSKKLSVLIHNSDEHKDIQSCTVEVHFQKIIDKEGDDYEVIPNSNFYVSRTACRDNTSVYHISGKKKTFKDVGNLLRSHGIDLDHNRFLILQGEVEQIAMMKPKGQTEHDEGMLEYLEDIIGCGRLNEPIKVLCRRVEILNEHRGEKLNRVKMVEKEKDALEGEKNIAIEFLTLENEIFRKKNHVCQYYIYELQKRIAEMETQKEKIHEDTKEINEKSNILSNEMKAKNKDVKDTEKKLNKITKFIEENKEKFTQLDLEDVQVREKLKHATSKAKKLEKQLQKDKEKVEEFKSIPAKSNNIINETTTRNNALEKEKEKEEKKLKEVMDSLKQETQGLQKEKESREKELMGFSKSVNEARSKMDVAQSELDIYLSRHNTAVSQLTKAKEALIAASETLKERKAAIRDIEGKLPQTEQELKEKEKELQKLTQEETNFKSLVHDLFQKVEEAKSSLAMNRSRGKVLDAIIQEKKSGRIPGIYGRLGDLGAIDEKYDVAISSCCHALDYIVVDSIDIAQECVNFLKRQNIGVATFIGLDKMAVWAKKMTEIQTPENTPRLFDLVKVKDEKIRQAFYFALRDTLVADNLDQATRVAYQKDRRWRVVTLQGQIIEQSGTMTGGGSKVMKGRMGSSLVIEISEEEVNKMESQLQNDSKKAMQIQEQKVQLEERVVKLRHSEREMRNTLEKFTASIQRLIEQEEYLNVQVKELEANVLATAPDKKKQKLLEENVSAFKTEYDAVAEKAGKVEAEVKRLHNTIVEINNHKLKAQQDKLDKINKQLDECASAITKAQVAIKTADRNLQKAQDSVLRTEKEIKDTEKEVDDLTAELKSLEDKAAEVVKNTNAAEESLPEIQKEHRNLLQELKVIQENEHALQKDALSIKLKLEQIDGHIAEHNSKIKYWHKEISKISLHPIEDNPIEEISVLSPEDLEAIKNPDSITNQIALLEARCHEMKPNLGAIAEYKKKEELYLQRVAELDKITYERDSFRQAYEDLRKQRLNEFMAGFYIITNKLKENYQMLTLGGDAELELVDSLDPFSEGIMFSVRPPKKSWKKIFNLSGGEKTLSSLALVFALHHYKPTPLYFMDEIDAALDFKNVSIVAFYIYEQTKNAQFIIISLRNNMFEISDRLIGIYKTYNITKSVAVNPKEIASKGLC

SEQ ID NO: 45629 - protein, 289 aa, Homo sapiens [sequence omitted]

SEQ ID NO: 45630 - protein, 361 aa, Homo sapiens
MMGHRVDYFIASKAVDCLLDSKWAKAKKGEEALFTTRESVVDYCNRLLKKQFFHRALKVMKMKYDKDIKKEKDKGKAESGKEEDKKSKKENIKDEKTKKEKEKKKDGEKEESKKEETPGTPKKKETKKKFKLEPHDDQVFLDGNEVYVWIYDPVHFKTFVMGLILVIAVIAATLFPLWPAEMRVGVYYLSVGAGCFVASILLLAVARCILFLIIWLITGGRHHFWFLPNLTADVGFIDSFRPLYTHEYKGPKADLKKDEKSETKKQQKSDSEEKSDSEKKEDEEGKVGPGNHGTEGSGGERHSDTDSDRREDDRSQHSSGNGNDFEMITKEELEQQTDGDCEEDEEEENDGETPKSSHEKS

SEQ ID NO: 45631 - protein, 953 aa, Homo sapiens [sequence omitted]

SEQ ID NO: 45632 - protein, 786 aa, Homo sapiens
MQQPQISVYSGSDRHAVQVIQQALHRPPSSAAQYLQQMYAAQQQHLMLHTAALQQQHLSSSQLQSLAAVQASLSSGRPSTSPTGSVTQQSSMSQTSLIFTPATTVAAVQSDIPVVSSSSSSSCQSAATQVQNLTLRSQKLGVLSSSQNGPPKSTSQTQSLTICHNKTTVTSSKISQRDPSPESNKKGESPSLESRSTAVTRTSSIHQLIAPASYSPIQPHSLIKHQQIPLHSPPSKVSHHQLILQQQQQQIQPITLQNSTQDPPPSQHCIPLQNHGLPPAPSNAQSQHCSPIQSHPSPLTVSPNQSQSAQQSVVVSPPPPHSPSQSPTIIIHPQALIQPHPLVSSALQPGPNLQQSTANQVQATAQLNLPSHLPLPASPVVHIGPVQQSALVSPGQQIVSPSHQQYSSLQSSPIPIASPPQMSTSPPAQIPPLPLQSMQSLQVQPEILSQGQVLVQNALVSEEELPAAEALVQLPFQTLPPPQTVAVNLQVQPPAPVDPPVVYQVEDVCEEEMPEESDECVRMDRTPPPPTLSPAAITVGRGEDLTSEHPLLEQVELPAVASVSASVIKSPSDPSHVSVPPPPLLLPAATTRSNSTSMHSSIPSIENKPPQAIVKPQILTHVIEGFVIQEGLEPFPVSRSSLLIEQPVKKRPLLDNQVINSVCVQPELQNNTKHADNSSDTEMEDMIAEETLEEMDSELLKCEFCGKMGYANEFLRSKRFCTMSCAKRYNVSCSKKFALSRWNRKPDNQSLGHRGRRPSGPDGAAREHILRQKKTWLLMKILCHLL

SEQ ID NO: 45633 - protein, 482 aa, Homo sapiens
MPCPGEDKSIYRRGARRWRKLYCANGHTFQAKRFNRRAHCAICTDRIWGLGRQGYKCINCKLLVHKKCHKLVTIECGRHSLPQEPVMPMDQSSMHSDHAQTVIPYNPSSHESLDQVGEEKEAMNTRESGKASSSLGLQDFDLLRVIGRGSYAKVLLVRLKKTDRIYAMKVVKKELVNDDEDIDWVQTEKHVFEQASNHPFLVGLHSCFQTESRLFFVIEYVNGGDLMFHMQRQRKLPEEHARFYSAEISLALNYLHERGIIYRDLKLDNVLLDSEGHIKLTDYGMCKEGLRPGDTTSTFCGTPNYIAPEILRGEDYGFSVDWWALGVLMFEMMAGRSPFDIVGSSDNPDQNTEDYLFQVILEKQIRIPRSLSVKAASVLKSFLNKDPKERLGCHPQTGFADIQGHPFFRNVDWDMMEQKQVVPPFKPNISGEFGLDNFDSQFTNEPVQLTPDDDDIVRKIDQSEFEGFEYINPLLMSAEECV

SEQ ID NO: 45634 - protein, 1180 aa, Homo sapiens
MMPHLVNGDAAQQVILVQVNPGETFTIRAEDGTLQCIQGPAEVPMMSPNGSIPPIHVPPGYISQVIEDSTGVRRVVVTPQSPECYPPSYPSAMSPTHHLPPYLTHHPHFIHNSHTAYYPPVTGPGDMPPQFFPQHHLPHTIYGEQEIIPFYGMSTYITREDQYSKPPHKKLKDRQIDRQNRLNSPPSSIYKSSCTTVYNGYGKGHSGGSGGGGSGSGPGIKKTERRARSSPKSNDSDLQEYELEVKRVQDILSGIEKPQVSNIQARAVVLSWAPPVGLSCGPHSGLSFPYSYEVALSDKGRDGKYKIIYSGEELECNLKDLRPATDYHVRVYAMYNSVKGSCSEPVSFTTHSCAPECPFPPKLAHRSKSSLTLQWKAPIDNGSKITNYLLEWDEGKRNSGFRQCFFGSQKHCKLTKLCPAMGYTFRLAARNDIGTSGYSQEVVCYTLGNIPQMPSAPRLVRAGITWVTLQWSKPEGCSPEEVITYTLEIQEDENDNLFHPKYTGEDLTCTVKNLKRSTQYKFRLTASNTEGKSCPSEVLVCTTSPDRPGPPTRPLVKGPVTSHGFSVKWDPPKDNGGSEILKYLLEITDGNSEANQWEVAYSGSATEYTFTHLKPGTLYKLRACCISTGGHSQCSESLPVRTLSIAPGQCRPPRVLGRPKHKEVHLEWDVPASESGCEVSEYSVEMTEPEDVASEVYHGPELECTVGNLLPGTVYRFRVRALNDGGYGPYSDVSEITTAAGPPGQCKAPCISCTPDGCVLVGWESPDSSGADISEYRLEWGEDEESLELIYHGTDTRFEIRDLLPAAQYCCRLQAFNQAGAGPYSELVLCQTPASAPDPVSTLCVLEEEPLDAYPDSPSACLVLNWEEPCNNGSEILAYTIDLGDTSITVGNTTMHVMKDLLPETTYRIRIQAINEIGAGPFSQFIKAKTRPLPPLPPRLECAAAGPQSLKLKWGDSNSKTHAAEDIVYTLQLEDRNKRFISIYRGPSHTYKVQRLTEFTCYSFRIQAASEAGEGPFSETYTFSTTKSVPPTIKAPRVTQLEGNSCEILWETVPSMKGDPVNYILQVLVGRESEYKQVYKGEEATFQISGLQTNTDYRFRVCACRRCLDTSQELSGAFSPSAAFVLQRSEVMLTGDMGSLDDPKMKSMMPTDEQFAAIIVLGFATLSILFAFILQYFLMK

SEQ ID NO: 45635 - protein, 230 aa, Homo sapiens
MVDPGRICISGDSAGGNLAAALGQQFTQDASLKNKLKLQALIYPVLQALDFNTPSYQQNVNTPILPRYVMVKYWVDYFKGNYDFVQAMIVNNHTSLDVEEAAAVRARLNWTSLLPASFTKNYKPVVQTTGNARIVQELPQLLDARSAPLIADQAVLQLLPKTYILTCEHDVLRDDGIMYAKRLESAGVEVTLDHFEDGFHGCMIFTSWPTNFSVGIRTRNSYIKWLDQNL

SEQ ID NO: 45636 - protein, 639 aa, Homo sapiens
MEGTGNLYDGSVLASYGNVIVITVNYRLGVLGFLSTGDQAAKGNYGLLDLIQALRWTSENIGFFGGDPLRITVFGSGAGGSCVNLLTLSHYSEGNRWSNSTKGLFQRAIAQSGTALSSWAVSFQPAKYARMLATKVGCNVSDTVELVECLQKKPYKELVDQDIQPARYHIAFGPVIDGDVIPDDPQILMEQGEFLNYDIMLGVNQGEGLKFVENIVDSDDGISASDFDFAVSNFVDNLYGYPEGKDVLRETIKFMYTDWADRHNPETRRKTLLALFTDHQWVAPAVATADLHSNFGSPTYFYAFYHHCQTDQVPAWADAAHGDEVPYVLGIPMIGPTELFPCNFSKNDVMLSAVVMTYWTNFAKTGDPNQPVPQDTKFIHTKPNRFEEVAWTRYSQKDQLYLHIGLKPRVKEHYRANKVNLWLELVPHLHNLNDISQYTSTTTKVPSTDITFRPTRKNSVPVTSAFPTAKQDDPKQQPSPFSVDQRDYSTELSVTIAVGASLLFLNILAFAALYYKKDKRRHDVHRRCSPQRTTTNDLTHAQEEEIMSLQMKHTDLDHECESIHPHEVVLRTACPPDYTLAMRRSPDDVPLMTPNTITMIPNTIPGIQPLHTFNTFTGGQNNTLPHPHPHPHSHSTTRV

SEQ ID NO: 45637 - protein, 778 aa, Homo sapiens
MAYQKVHADQRAPGHSQYLDNDDLQATALDLEWDMEKELEESGFDQFQLDGAENQNLGHSETIDLNLDSIQPATSPKGRFQRLQEESDYITHYTRSAPKSNRCNFCHVLKILCTATILFIFGILIGYYVHTNCPSDAPSSGTVDPQLYQEILKTIQAEDIKKSFRNLVQLYKNEDDMEISKKIKTQWTSLGLEDVQFVNYSVLLDLPGPSPSTVTLSSSGQCFHPNGQPCSEEARKDSSQDLLYSYAAYSAKGTLKAEVIDVSYGMADDLKRIRKIKNVTNQIALLKLGKLPLLYKLSSLEKAGFGGVLLYIDPCDLPKTVNPSHDTFMVSLNPGGDPSTPGYPSVDESFRQSRSNLTSLLVQPISAPLVAKLISSPKARTKNEACSSLELPNNEIRVVSMQVQTVTKLKTVTNVVGFVMGLTSPDRYIIVGSHHHTAHSYNGQEWASSTAIITAFIRALMSKVKRGWRPDRTIVFCSWGGTAFGNIGSYEWGEDFKKVLQKNVVAYISLHSPIRGNSSLYPVASPSLQQLVVEKNNFNCTRRAQCPETNISSIQIQGDADYFINHLGVPIVQFAYEDIKTLEGPSFLSEARFSTRATKIEEMDPSFNLHETITKLSGEVILQIANEPVLPFNALDIALEVQNNLKGDQPNTHQLLAMALRLRESAELFQSDEMRPANDPKERAPIRIRMLNDILQDMEKSFLVKQAPPGFYRNILYHLDEKTSRFSILIEAWEHCKPLASNETLQEALSEVLNSINSAQVYFKAGLDVFKSVLDGKN

SEQ ID NO: 45638 - protein, 304 aa, Homo sapiens
MDSVGRIQMRTRRTLRGHLAKIYAMHWGYDSRLLVSASQDGKLIIWDSYTTNKMHAIPLRSSWVMTCAYAPSGNYVACGGLDNICSIYNLKTREGNVRVSRELPGHTGYLSCCRFLDDSQIVTSSGDTTCALWDIETAQQTTTFTGHSGDVMSLSLSPDMRTFVSGACDASSKLWDIRDGMCRQSFTGHVSDINAVSFFPNGYAFATGSDDATCRLFDLRADQELLLYSHDNIICGITSVAFSKSGRLLLAGYDDFNCNVWDTLKGDRAGVLAGHDNRVSCLGVTDDGMAVATGSWDSFLRIWN

SEQ ID NO: 45639 - protein, 845 aa, Homo sapiens [sequence omitted]

SEQ ID NO: 45640 - protein, 957 aa, Homo sapiens
MGRMIITQQMEEIVRPLGPESLLLRGARLKNTKEIFGVAVYTGMETKMALNYKSKSQKRSAVEKSMNTFLIIYLVILISEAVISTILKYTWQAEEKWDEPWYNQKTEHQRNSSKILRFISDFLAFLVLYNFIIPISLYVTVEMQKFLGSFFIGWDLDLYHEESDQKAQVNTSDLNEELGQVEYVFTDKTGTLTENEMQFRECSINGMKYQEINGRLVPEGPTPDSSEGNLSYLSSLSHLNNLSHLTTSSSFRTSPENETELIKEHDLFFKAVSLCHTVQISNVQTDCTGDGPWQSNLAPSQLEYYASSPDEKALVEAAARIGIVFIGNSEETMEVKTLGKLERYKLLHILEFDSDRRRMSVIVQAPSGEKLLFAKGAESSILPKCIGGEIEKTRIHVDEFALKGLRTLCIAYRKFTSKEYEEIDKRIFEARTALQQREEKLAAVFQFIEKDLILLGATAVEDRLQDKVRETIEALRMAGIKVWVLTGDKHETAVSVSLSCGHFHRTMNILELINQKSDSECAEQLRQLARRITEDHVIQHGLVVDGTSLSLALREHEKLFMEVCRNCSAVLCCRMAPLQKAKVIRLIKISPEKPITLAVGDGANDVSMIQEAHVGIGIMGKEGRQAARNSDYAIARFKFLSKLLFVHGHFYYIRIATLVQYFFYKNVCFITPQFLYQFYCLFSQQTLYDSVYLTLYNICFTSLPILIYSLLEQHVDPHVLQNKPTLYRDISKNRLLSIKTFLYWTILGFSHAFIFFFGSYLLIGKDTSLLGNGQMFGNWTFGTLVFTVMVITVTVKMALETHFWTWINHLVTWGSIIFYFVFSLFYGGILWPFLGSQNMYFVFIQLLSSGSAWFAIILMVVTCLFLDIIKKVFDRHLHPTSTEKAQLTETNAGIKCLDSMCCFPEGEAACASVGRMLERVIGRCSPTHISRSWSASDPFYTNDRSILTLSTMDSSTC

SEQ ID NO: 45641 - protein, 83 aa, Homo sapiens
MAIAYWNLVLNGRFKFLDLWNKFLLEHHKRSIPKDTWNLLLDFSTMIADDMSNYDEEGAWPVLIDDFVEFARPQIAGTKSTTV

SEQ ID NO: 45642 - protein, 608 aa, Homo sapiens
MGVEAKNHEVHNSHRQMKHIPSAPLPPSRATYLWRKSFKWPRPLLHSTSKSIMAAAGVPVVEGYHGEDQSDQCLKEHARRIGYPVMIKAVRGGGGKGMRIVRSEQEFQEQLESARREAKKSFNDDAMLIEKFVDTPRHVEVQVFGDHHGNAVYLFERDCSVQRRHQKIIEEAPAPGIKSEVRKKLGEAAVRAAKAVNYVGAGTVEFIMDSKHNFCFMEMNTRLQVEHPVTEMITGTDLVEWQLRIAAGEKIPLSQEEITLQGHAFEARIYAEDPSNNFMPVAGPLVHLSTPRADPSTRIETGVRQGDEVSVHYDPMIAKLVVWAADRQAALTKLRYSLRQYNIVGLHTNIDFLLNLSGHPEFEAGNVHTDFIPQHHKQLLLSRKAAAKESLCQAALGLILKEKAMTDTFTLQAHDQFSPFSSSSGRRLNISYTRNMTLKDGKNNVAIAVTYNHDGSYSMQIEDKTFQVLGNLYSEGDCTYLKCSVNGVASKAKLIILENTIYLFSKEGSIEIDIPVPKYLSSVSSQETQGGPLAPMTGTIEKVFVKAGDKVKAGDSLMVMIAMKMEHTIKSPKDGTVKKVFYREGAQANRHTPLVEFEEEESDKRESE

SEQ ID NO: 45643 - protein, 392 aa, Homo sapiens
MAAAGVPVVEGYHGEDQSDQCLKEHARRIGYPVMIKAVRGGGGKGMRIVRSEQEFQEQLESARREAKKSFNDDAMLIEKFVDTPRHVEVQVFGDHHGNAVYLFERDCSVQRRHQKIIEEAPAPGIKSEVRKKLGEAAVRAAKAVNYVGAGTVEFIMDSKHNFCFMEMNTRLQVEHPVTEMITGTDLVEWQLRIAAGEKIPLSQEEITLQGHAFEARIYAEDPSNNFMPVAGPLVHLSTPRADPSTRIETGVRQGDEVSVHYDPMIAKLVVWAADRQAALTKLRYSLRQYNIVGLHTNIDFLLNLSGHPEFEAGNVHTDFIPQHHKQLLLSRKAAAKESLCQAALGLILKEKAMTDTFTLQAHDQFSPFSSSSGRRLNISYTRNMTLKDGKNN

SEQ ID NO: 45644 - protein, 472 aa, Homo sapiens
MAAASAVSVLLVAAERNRWHRLPSLLLPPRTWVWRQRTMKYTTATGRNITKVLIANRGEIACRVMRTAKKLGVQTVAVYSEADRNSMHVDMADEAYSIGPAPSQQSYLSMEKIIQVAKTSAAQAIHPGCGFLSENMEFAELCKQEGIIFIGPPPSAIRDMGIKSTSKSIMAAAGVPVVEGYHGEDQSDQCLKEHARRIGYPVMIKAVRGGGGKGMRIVRSEQEFQEQLESARREAKKSFNDDAMLIEKFVDTPRHVEVQVFGDHHGNAVYLFERDCSVQRRHQKIIEEAPAPGIKSEVRKKLGEAAVRAAKAVNYVGAGTVEFIMDSKHNFCFMEMNTRLQVEHPVTEMITGTDLVEWQLRIAAGEKIPLSQEEITLQGHAFEARIYAEDPSNNFMPVAGPLVHLSTPRADPSTRIETGVRQGDEVSVHYDPMIAKLVVWAADRQAALTKLRYSLRQYNINSLHFRLAVEED

SEQ ID NO: 45645 - protein, 217 aa, Homo sapiens
MIRYFTSNPASKVLCSPMLLSTFSHFSLFHMAANMYVLWSFSSSIVNILGQEQFMAVYLSAGVISNFVSYVGKVATGRYGPSLGASGAIMTVLAAVCTKIPEGRLAIIFLPMFTFTAGNALKAIIAMDTAGMILGWKFFDHAAHLGGALFGIQEFQAWTGVKPSRSTKTKPARVITTHTSGWDSSPGAGFQVPEVRKKFTPNPSAIFQASAPRILNV

SEQ ID NO: 45646 - protein, 138 aa, Homo sapiens
MIRYFTSNPASSVISNFVSYVGKVATGRYGPSLGASGAIMTVLAAVCTKIPEGRLAIIFLPMFTFTAGNALKAIIAMDTAGMILGWKFFDHAAHLGGALFGIWYVTYGHELIWKNREPLVKIWHEIRTNGPKKGGGSK

SEQ ID NO: 45647 - protein, 642 aa, Homo sapiens
MYNTLRLAEPQSQGNSQVLLDAPIQLSKITENYDCGTKLPGLLKREQSSTVNAKKLEKAEARLKAKQEKRSEKDTLKTSNPLVLEEASASQAGSRKESRLESSGKNKSYDVRIENFDVSFGDRVLLAGADVNLAWGRRYGLVGRNGLGKTTLLKMLATRSLRVPAHISLLHVEQEVAGDDTPALQSVLESDSVREDLLRRERELTAQIAAGRAEGSEAAELAEIYAKLEEIEADKAPARASVILAGLGFTPKMQQQPTREFSGGWRMRLALARALFARPDLLLLDEPTNMLDVRAILWLENYLQTWPSTILVVSHDRNFLNAIATDIIHLHSQRLDGYRGDFETFIKSKQERLLNQQREYEAQQQYRQHIQVFIDRFRYNANRASQVQSKLKMLEKLPELKPVDKESEVVMKFPDGFEKFSPPILQLDEVDFYYDPKHVIFSRLSVSADLESRICVVGENGAGKSTMLKLLLGDLAPVRGIRHAHRNLKIGYFSQHHVEQLDLNVSAVELLARKFPGRPEEEYRHQLGRYGISGELAMRPLASLSGGQKSRVAFAQMTMPCPNFYILDEPTNHLDMETIEALGRALNNFRGGVILVSHDERFIRLVCRELWVCEGGGVTRVEGGFDQYRALLQEQFRREGFL

SEQ ID NO: 45648 - protein, 851 aa, Homo sapiens
MLVERLGEKDTSLYRPALEELRRQIRSSTTSMTSVPKPLKFLRPHYGKLKEIYENMAPGENKRFAADIISVLAMTMSGERECLKYRLVGSQEELASWGHEYVRHLAGEVAKEWQELDDAEKVQREPLLTLVKEIVPYNMAHNAEHEACDLLMEIEQVDMLEKDIDENAYAKVCLYLTSCVNYVPEPENSALLRCALGVFRKFSRFPEALRLALMLNDMELVEDIFTSCKDVVVQKQMAFMLGRHGVFLELSEDVEEYEDLTEIMSNVQLNSNFLALARELDIMEPKVPDDIYKTHLENNRFGGSGSQVDSARMNLASSFVNGFVNAAFGQDKLLTDDGNKWLYKNKDHGMLSAAASLGMILLWDVDGGLTQIDKYLYSSEDYIKSGALLACGIVNSGVRNECDPALALLSDYVLHNSNTMRLGSIFGLGLAYAGSNREDVLTLLLPVMGDSKSSMEVAGVTALACGMIAVGSCNGDVTSTILQTIMEKSETELKDTYARWLPLGLGLNHLGKGEAIEAILAALEVVSEPFRSFANTLVDVCAYAGSGNVLKVQQLLHICSEHFDSKEKEEDKDKKEKKDKDKKEAPADMGAHQGVAVLGIALIAMGEEIGAEMALRTFGHLLRYGEPTLRRAVPLALALISVSNPRLNILDTLSKFSHDADPEVSYNSIFAMGMVGSGTNNARLAAMLRQLAQYHAKDPNNLFMVRLAQGLTHLGKGTLTLCPYHSDRQLMSQVAVAGLLTVLVSFLDVRNIILGKSHYVLYGLVAAMQPRMLVTFDEELRPLPVSVRVGQAVDVVGQAGKPKTITGFQTHTTPVLLAHGERAELATEEFLPVTPILEGFVILRKNPNYDL

SEQ ID NO: 45649 - protein, 848 aa, Homo sapiens
MYGRYTQDLGAFAKEEAARIRLGGPEPWKGPPSSRAAPELLEYGRSRCARCRVCSVRCHKFLVSRVGEDWIFLVLLGLLMALVSWVMDYAIAACLQAQQWMSRGLNTSILLQYLAWVTYPVVLITFSAGFTQILAPQAVGSGIPEMKTILRGVVLKEYLTLKTFIAKVIGLTCALGSGMPLGKEGPFVHIASMCAALLSKFLSLFGGIYENESRNTEMLAAACAVGVGCCFAAPIGGVLFSIEVTSTFFAVRNYWRGFFAATFSAFIFRVLAVWNRDEETITALFKTRFRLDFPFDLQELPAFAVIGIASGFGGALFVYLNRKIVQVMRKQKTINRFLMRKRLLFPALVTLLISTLTFPPGFGQFMAGQLSQKETLVTLFDNRTWVRQGLVEELEPPSTSQAWNPPRANVFLTLVIFILMKFWMSALATTIPVPCGAFMPVFVIGAAFGRLVGESMAAWFPDGIHTDSSTYRIVPGGYAVVGAAALAGAVTHTVSTAVIVFELTGQIAHILPVMIAVILANAVAQSLQPSLYDSIIRIKKLPYLPELGWGRHQQYRVRVEDIMVRDVPHVALSCTFRDLRLALHRTKGRMLALVESPESMILLGSIERSQVVALLGAQLSPARRRQHMQERRATQTSPLSDQEGPPTPEASVCFQVNTEDSAFPAARGETHKPLKPALKRGPSVTRNLGESPTGSAESAGIALRSLFCGSPPPEAASEKLESCEKRKLKRVRISLASDADLEGEMSPEEILEWEEQQLDEPVNFSDCKIDPAPFQLVERTSLHKLRKAIEGSVTAQGVKVRPPLASFRDSATSSSDTETTEVHALWGPHSRHGLPREGSPSDSDDKCQ

SEQ ID NO: 45650 - protein, 206 aa, Homo sapiens
MVKYVIGDLKILFPDIIARAAEHLRYVFGFELKQFDRKHHTYILINKLKPLEEEEEEDLGGDGPRLGLLMMILGLIYMRGNSAREAQVWEMLRRLGVQPSKYHFLFGYPKRLIMEDFVQQRYLSYRRVPHTNPPEYEFSWGPRSNLEISKMEVLGFVAKLHKKEPQHWPVQYREALADEADRARAKARAEASMRARASARAGIHLW

SEQ ID NO: 45651 - protein, 374 aa, Homo sapiens
MLYTRKNLTCAQTINSSAFGNLNVTKKTTFIVHGFRPTGSPPVWMDDLVKGLLSVEDMNVVVVDWNRGATTLIYTHASSKTRKVAMVLKEFIDQMLAEGASLDDIYMIGVSLGAHISGFVGEMYDGWLGRITALGYKEPLGNIDFYPNGGLDQPGCPKTILGGFQYFKCDHQRSVYLYLSSLRESCTITAYPCDSYQDYRNGKCVSCGTSQKESCPLLGYYADNWKDHLRGKDPPMTKAFFDTAEESPFCMYHYFVDIITWNKNVRRGDITIKLRDKAGNTTESKINHEPTTFQKYHQVSLLARFNQDLDKVAAISLMFSTGSLIGPRYKLRILRMKLRSLAHPERPQLCRYDLVLMENVETVFQPILCPELQL

SEQ ID NO: 45652 - protein, 343 aa, Homo sapiens
MDTLKTKGWGEEQNHGVKTTQFVPKQYRLVETRGPLCSLRSEKRCSKGKITDTETMVGIRFENESRRGYQLEPDLSEEVSARLRLGSGSNGLLRRKVSIIETKEKNCSGKERDRRTDDLLELTEDMEKEISNALGHGPQDEILSSAFKLRITRGDIQTLKNYHWLNDEVINFYMNLLVERNKKQGYPALHVFSTFFYPKLKSGGYQAVKRWTKGVNLFEQEIILVPIHRKVHWSLVVIDLRKKCLKYLDSMGQKGHRICEILLQYLQDESKTKRNSDLNLLEWTHHSMKPHEIPQQLNGSDCGMFTCKYADYISRDKPITFTQHQMPLFRKKMVWEILHQQLL

SEQ ID NO: 45653 - protein, 555 aa, Homo sapiens
MNKLYIGNLSPAVTADDLRQLFGDRKLPLAGQVLLKSGYAFVDYPDQNWAIRAIETLSGKVELHGKIMEVDYSVSKKLRSRKIQIRNIPPHLQWEVLDGLLAQYGTVENVEQVNTDTETAVVNVTYATREEAKIAMEKLSGHQFENYSFKISYIPDEEVSSPSPPQRAQRGDHSSREQGHAPGGTSQARQIDFPLRILVPTQFVGAIIGKEGLTIKNITKQTQSRVDIHRKENSGAAEKPVTIHATPEGTSEACRMILEIMQKEADETKLAEEIPLKILAHNGLVGRLIGKEGRNLKKIEHETGTKITISSLQDLSIYNPERTITVKGTVEACASAEIEIMKKLREAFENDMLAVNTHSGYFSSLYPHHQFGPFPHHHSYPEQEIVNLFIPTQAVGAIIGKKGAHIKQLARFAGASIKIAPAEGPDVSERMVIITGPPEAQFKAQGRIFGKLKEENFFNPKEEVKLEAHIRVPSSTAGRVIGKGGKTVNELQNLTSAEVIVPRDQTPDENEEVIVRIIGHFFASQTAQRKIREIVQQVKQQEQKYPQGVASQRSK

SEQ ID NO: 45654 - protein, 598 aa, Homo sapiens
MNKLYIGNLSPAVTADDLRQLFGDRKLPLAGQVLLKSGYAFVDYPDQNWAIRAIETLSGKVELHGKIMEVDYSVSKKLRSRKIQIRNIPPHLQWEVLDGLLAQYGTVENVEQVNTDTETAVVNVTYATREEAKIAMEKLSGHQFENYSFKISYIPDEEVSSPSPPQRAQRGDHSSREQGHAPGGTSQARQIDFPLRILVPTQFVGAIIGKEGLTIKNITKQTQSRVDIHRKENSGAAEKPVTIHATPEGTSEACRMILEIMQKEADETKLAEEIPLKILAHNGLVGRLIGKEGRNLKKIEHETGTKITISSLQDLSIYNPERTITVKGTVEACASAEIEIMKKLREAFENDMLAVNQQANLIPGLNLSALGIFSTGLSVLSPPAGPRGAPPAAPYHPFTTHSGYFSSLYPHHQFGPFPHHHSYPEQEIVNLFIPTQAVGAIIGKKGAHIKQLARFAGASIKIAPAEGPDVSERMVIITGPPEAQFKAQGRIFGKLKEENFFNPKEEVKLEAHIRVPSSTAGRVIGKGGKTVNELQNLTSAEVIVPRDQTPDENEEVIVRIIGHFFASQTAQRKIREIVQQVKQQEQKYPQGVASQRSK

SEQ ID NO: 45655 - protein, 604 aa, Homo sapiens
MNKLYIGNLSPAVTADDLRQLFGDRKLPLAGQVLLKSGYAFVDYPDQNWAIRAIETLSGKVELHGKIMEVDYSVSKKLRSRKIQIRNIPPHLQWEVLDGLLAQYGTVENVEQVFAFSLVNTDTETAVVNVTYATREEAKIAMEKLSGHQFENYSFKISYIPDEEVSSPSPPQRAQRGDHSSREQGHAPGGTSQARQIDFPLRILVPTQFVGAIIGKEGLTIKNITKQTQSRVDIHRKENSGAAEKPVTIHATPEGTSEACRMILEIMQKEADETKLAEEIPLKILAHNGLVGRLIGKEGRNLKKIEHETGTKITISSLQDLSIYNPERTITVKGTVEACASAEIEIMKKLREAFENDMLAVNQQANLIPGLNLSALGIFSTGLSVLSPPAGPRGAPPAAPYHPFTTHSGYFSSLYPHHQFGPFPHHHSYPEQEIVNLFIPTQAVGAIIGKKGAHIKQLARFAGASIKIAPAEGPDVSERMVIITGPPEAQFKAQGRIFGKLKEENFFNPKEEVKLEAHIRVPSSTAGRVIGKGGKTVNELQNLTSAEVIVPRDQTPDENEEVIVRIIGHFFASQTAQRKIREIVQQVKQQEQKYPQGVASQRSK

SEQ ID NO: 45656 - protein, 243 aa, Homo sapiens
MFGGTPRQQDRNIPRGSDIIVDLEVTLEEVYAGNFVEVVRNKPVARQAPGKRKCNCRQEMRTTQLGPGRFQMTQEVVCDECPNVKLVNEERTLEVEIEPGVRDGMEYPFIGEGEPHVDGEPGDLRFRIKVVKHPIFERRGDDLYTNVTISLVESLVGFEMDITHLDGHKVHISRDKITRPGAKLWKKGEGLPNFDNNNIKGSLIITFDVDFPKEQLTEEAREGIKQLLKQGSVQKVYNGLQGY

SEQ ID NO: 45657 - protein, 370 aa, Homo sapiens
MNLKESLLRGIYAYGFEKPSAIQQRAIIPCIKGYDVIAQAQSGTGKTATFAISILQQLEIEFKETQALVLAPTRELAQQIQKVILALGDYMGATCHACIGGTNVRNEMQKLQAEAPHIVVGTPGRVFDMLNRRYLSPKWIKMFVLDEADEMLSRGFKDQIYEIFQKLNTSIQVVLLSATMPTDVLEVTKKFMRDPIRILVKKEELTLEGIKQFYINVEREEWKLDTLCDLYETLTITQAVIFLNTRRKVDWLTEKMHARDFTVSALHGDMDQKERDVIMREFRSGSSRVLITTDLLARGIDVQQVSLVINYDLPTNRENYIHRIGRGGRFGRKGVAINFVTEEDKRILRDIETFYNTTVEEMPMNVADLI

SEQ ID NO: 45658 - protein, 325 aa, Homo sapiens
MNLKESLLRGIYAYGFEKPSAIQQRAIIPCIKGYDVIAQAQSGTGKTATFAISILQQLEIEFKETQALVLAPTRELAQQIQKVILALGDYMGATCHACIGGTNVRNEMQKLQAEAPHIVVGTPGRVFDMLNRRYLSPKWIKMFVLDEADEMLSRGFKDQIYEIFQKLNTSIQVVLLSATMPTDVLEVTKKFMRDPIRILVKKEELTLEGIKQFYINVEREEWKLDTLCDLYETLTITQAVIFLNTRRKVDWLTEKMHARDFTVSALHGDMDQKERDVIMREFRSGSSRVLITTDLLARGIDVQQVSLVINYDLPTNRENYIHRSR

SEQ ID NO: 45659 - protein, 209 aa, Homo sapiens
MTSAAQAALRRTMEKESKTTRFCLICNYVSRIIEPLTSRCSKFRFKPLSDKIQQQRLLDIAKKENVKISDEGIAYLVKVSEGDLRKAITFLQSATRLTGGKEITEKVITDIAGVIPAEKIDGVFAACQSGSFDKLEAVVKDLIDEGHAATQLVNQLHDVVVENNLSDKQKSIITEKLAEVDKCLADGADEHLQLISLCATVMQQLSQNC

SEQ ID NO: 45660 - protein, 666 aa, Homo sapiens
MHFNLESSYLCEYDYVKVETEDQVLATFCGRETTDTEQTPGQEVVLSPGSFMSITFRSDFSNEERFTGFDAHYMAVDVDECKEREDEELSCDHYCHNYIGGYYCSCRFGYILHTDNRTCRVECSDNLFTQRTGVITSPDFPNPYPKSSECLYTIELEEGFMVNLQFEDIFDIEDHPEVPCPYDYIKIKVGPKVLGPFCGEKAPEPISTQSHSVLILFHSDNSGENRGWRLSYRAAGNECPELQPPVHGKIEPSQAKYFFKDQVLVSCDTGYKVLKDNVEMDTFQIECLKDGTWSNKIPTCKIVDCRAPGELEHGLITFSTRNNLTTYKSEIKYSCQEPYYKMLNNNTGIYTCSAQGVWMNKVLGRSLPTCLPECGQPSRSLPSLVKRIIGGRNAEPGLFPWQALIVVEDTSRVPNDKWFGSGALLSASWILTAAHVLRSQRRDTTVIPVSKEHVTVYLGLHDVRDKSGAVNSSAARVVLHPDFNIQNYNHDIALVQLQEPVPLGPHVMPVCLPRLEPEGPAPHMLGLVAGWGISNPNVTVDEIISSGTRTLSDVLQYVKLPVVPHAECKTSYESRSGNYSVTENMFCAGYYEGGKDTCLGDSGGAFVIFDDLSQRWVVQGLVSWGGPEECGSKQVYGVYTKVSNYVDWVWEQMGLPQSVVEPQVER

SEQ ID NO: 45661 - protein, 318 aa, Homo sapiens
MHFNLESSYLCEYDYVKVETEDQVLATFCGRETTDTEQTPGQEVVLSPGSFMSITFRSDFSNEERFTGFDAHYMAVDVDECKEREDEELSCDHYCHNYIGGYYCSCRFGYILHTDNRTCRVECSDNLFTQRTGVITSPDFPNPYPKSSECLYTIELEEGFMVNLQFEDIFDIEDHPEVPCPYDYIKIKVGPKVLGPFCGEKAPEPISTQSHSVLILFHSDNSGENRGWRLSYRAAGNECPELQPPVHGKIEPSQAKYFFKDQVLVSCDTGYKVLKDNVEMDTFQIECLKDGTWSNKIPTCKKNEIDLESELKSEQVTE

SEQ ID NO: 45662 - protein, 190 aa, Homo sapiens
MHFNLESSYLCEYDYVKVETEDQVLATFCGRETTDTEQTPGQEVVLSPGSFMSITFRSDFSNEERFTGFDAHYMAVDVDECKEREDEELSCDHYCHNYIGGYYCSCRFGYILHTDNRTCRVECSDNLFTQRTGVITSPDFPNPYPKSSECLYTIELEEGFMVNLQFEDIFDIEDHPEVPCPYDYIKVSLQ

SEQ ID NO: 45663 - protein, 617 aa, Homo sapiens
MYTSRLNLREGNIMAVMATAMYLQMEHVVDTCRKFIKASEAEMVSAIKPPREEFLNSRMLMPQDIMAYRGREVVENNLPLRSAPGCESRAFAPSLYSGLSTPPASYSMYSHLPVSSLLFSDEEFRDVRMPVANPFPKERALPCDSARPVPGEYSRPTLEVSPNVCHSNIYSPKETIPEEARSDMHYSVAEGLKPAAPSARNAPYFPCDKASKEEERPSSEDEIALHFEPPNAPLNRKGLVSPQSPQKSDCQPNSPTESCSSKNACILQASGSPPAKSPTDPKACNWKKYKFIVLNSLNQNAKPEGPEQAELGRLSPRAYTAPPACQPPMEPENLDLQSPTKLSASGEDSTIPQASRLNNIVNRSMTGSPRSSSESHSPLYMHPPKCTSCGSQSPQHAEMCLHTAGPTFPEEMGETQSEYSDSSCENGAFFCNECDCRFSEEASLKRHTLQTHSDKPYKCDRCQASFRYKGNLASHKTVHTGEKPYRCNICGAQFNRPANLKTHTRIHSGEKPYKCETCGARFVQVAHLRAHVLIHTGEKPYPCEICGTRFRHLQTLKSHLRIHTGEKPYHCEKCNLHFRHKSQLRLHLRQKHGAITNTKVQYRVSATDLPPELPKAC

SEQ ID NO: 45664 - protein, 561 aa, Homo sapiens
MYTSRLNLREGNIMAVMATAMYLQMEHVVDTCRKFIKASEAEMVSAIKPPREEFLNSRMLMPQDIMAYRGREVVENNLPLRSAPGCESRAFAPSLYSGLSTPPASYSMYSHLPVSSLLFSDEEFRDVRMPVANPFPKERALPCDSARPVPGEYSRPTLEVSPNVCHSNIYSPKETIPEEARSDMHYSVAEGLKPAAPSARNAPYFPCDKASKEEERPSSEDEIALHFEPPNAPLNRKGLVSPQSPQKSDCQPNSPTESCSSKNACILQASGSPPAKSPTDPKACNWKKYKFIVLNSLNQNAKPEGPEQAELGRLSPRAYTAPPACQPPMEPENLDLQSPTKLSASGEDSTIPQASRLNNIVNRSMTGSPRSSSESHSPLYMHPPKCTSCGSQSPQHAEMCLHTAGPTFPEEMGETQSEYSDSSCGEKPYRCNICGAQFNRPANLKTHTRIHSGEKPYKCETCGARFVQVAHLRAHVLIHTGEKPYPCEICGTRFRHLQTLKSHLRIHTGEKPYHCEKCNLHFRHKSQLRLHLRQKHGAITNTKVQYRVSATDLPPELPKAC

SEQ ID NO: 45665 - protein, 19 aa, Homo sapiens
MQEVSRKGRTPGFEQNFGL

SEQ ID NO: 45666 - protein, 539 aa, Homo sapiens
MRQIQVFEDEPARIKCPLFEHFLKFNYSTAHSAGLTLIWYWTRQDRDLEEPINFRLPENRISKEKDVLWFRPTLLNDTGNYTCMLRNTTYCSKVAFPLEVVQKDSCFNSPMKLPVHKLYIEYGIQRITCPNVDGYFPSSVKPTITWYMGCYKIQNFNNVIPEGMNLSFLIALISNNGNYTCVVTYPENGRTFHLTRTLTVKVVGSPKNAVPPVIHSPNDHVVYEKEPGEELLIPCTVYFSFLMDSRNEVWWTIDGKKPDDITIDVTINESISHSRTEDETRTQILSIKKVTSEDLKRSYVCHARSAKGEVAKAAKVKQKVPAPRYTVELACGFGATVLLVVILIVVYHVYWLEMVLFYRAHFGTDETILDGKEYDIYVSYARNAEEEEFVLLTLRGVLENEFGYKLCIFDRDSLPGGIVTDETLSFIQKSRRLLVVLSPNYVLQGTQALLELKAGLENMASRGNINVILVQYKAVKETKVKELKRAKTVLTVIKWKGEKSKYPQGRFWKQLQVAMPVKKSPRRSSSDEQGLSYSSLKNV

SEQ ID NO: 45667 - protein, 325 aa, Homo sapiens
MRQIQVFEDEPARIKCPLFEHFLKFNYSTAHSAGLTLIWYWTRQDRDLEEPINFRLPENRISKEKDVLWFRPTLLNDTGNYTCMLRNTTYCSKVAFPLEVVQKDSCFNSPMKLPVHKLYIEYGIQRITCPNVDGYFPSSVKPTITWYMGCYKIQNFNNVIPEGMNLSFLIALISNNGNYTCVVTYPENGRTFHLTRTLTVKVVGSPKNAVPPVIHSPNDHVVYEKEPGEELLIPCTVYFSFLMDSRNEVWWTIDGKKPDDITIDVTINESISHSRTEDETRTQILSIKKVTSEDLKRSYVCHARSAKGEVAKAAKVKQKGNRCGQ

SEQ ID NO: 45668 - protein, 1213 aa, Homo sapiens
MEIYGYNLSRWKLAIVSLGVICSGGFLLLLLYWMPEWRVKATCVRAAIKDCEVVLLRTTDEFKMWFCAKIRVLSLETYPVSSPKSMSNKLSNGHAVCLIENPTEENRHRISKYSQTESQQIRYFTHHSVKYFWNDTIHNFDFLKKLLYGVNEIAVKVPSVFKLLIKEVLNPFYIFQLFSVILWSTDEYYYYALAIVVMSIVSIVSSLYSIRKQYVMLHDMVATHSTVRVSVCRVNEEIEEIFSTDLVPGDVMVIPLNGTIMPCDAVLINGTCIVNESMLTGESVPVTKTNLPNPSVDVKGIGDELYNPETHKRHTLFCGTTVIQTRFYTGELVKAIVVRTGFSTSKGQLVRSILYPKPTDFKLYRDAYLFLLCLVAVAGIGFIYTIINSILNEVQVGVIIIESLDIITITVPPALPAAMTAGIVYAQRRLKKIGIFCISPQRINICGQLNLVCFDKTGTLTEDGLDLWGIQRVENARFLSPEENVCNEMLVKSQFVACMATCHSLTKIEGVLSGDPLDLKMFEAIGWILEEATEEETALHNRIMPTVVRPPKQLLPESTPAGNQEMELFELPATYEIGIVRQFPFSSALQRMSVVARVLGDRKMDAYMKGAPEAIAGLCKPETVPVDFQNVLEDFTKQGFRVIALAHRKLESKLTWHKVQNISRDAIENNMDFMGLIIMQNKLKQETPAVLEDLHKANIRTVMVTGDSMLTAVSVARDCGMILPQDKVIIAEALPPKDGKVAKINWHYADSLTQCSHPSAIDPEAIPVKLVHDSLEDLQMTRYHFAMNGKSFSVILEHFQDLVPKLMLHGTVFARMAPDQKTQLIEALQNVDYFVGMCGDGANDCGALKRAHGGISLSELEASVASPFTSKTPSISCVPNLIREGRAALITSFCVFKFMALYSIIQYFSVTLLYSILSNLGDFQFLFIDLAIILVVVFTMSLNPAWKELVAQRPPSGLISGALLFSVLSQIIICIGFQSLGFFWVKQQPWYEVWHPKSDACNTTGSGFWNSSHVDNETELDEHNIQNYENTTVFFISSFQYLIVAIAFSKGKPFRQPCYKNYFFVFSVIFLYIFILFIMLYPVASVDQVLQIVCVPYQWRVTMLIIVLVNAFVSITVENFFLDMVLWKVVFNRDKQGEYRFSTTQPPQESVDRWGKCCLPWALGCRKKTPKAKYMYLAQELLVDPEWPPKPQTTTEAKALVKENGSCQIITIT

SEQ ID NO: 45669 - protein, 689 aa, Homo sapiens
MINFHTILFDQTQRSIKAQLQNFVKEDLRKFKDAKKQFEKVSEEKENALVKNAQVQRNKQHEVEEATNILTATRKCFRHIALDYVLQINVLQSKRRSEILKSMLSFMYAHLAFFHQGYDLFSELGPYMKDLGAQLDRLVVDAAKEKREMEQKHSTIQQKDFSSDDSKLEYNVDAANGIVMEGYLFKRASNAFKTWNRRWFSIQNNQLVYQKKFKDNPTVVVEDLRLCTVKHCEDIERRFCFEVVSPTKSCMLQADSEKLRQAWIKAVQTSIATAYREKGDESEKLDKKSSPSTGSLDSGNESKEKLLKGESALQRVQCIPGNASCCDCGLADPRWASINLGITLCIECSGIHRSLGVHFSKVRSLTLDTWEPELLKLMCELGNDVINRVYEANVEKMGIKKPQPGQRQEKEAYIRAKYVERKFVDKYSISLSPPEQQKKFVSKSSEEKRLSISKFGPGDQVRASAQSSVRSNDSGIQQSSDDGRESLPSTVSANSLYEPEGERQDSSMFLDSKHLNPGLQLYRASYEKNLPKMAEALAHGADVNWANSEENKATPLIQAVLGGSLVTCEFLLQNGANVNQRDVQGRGPLHHATVLGHTGQVCLFLKRGANQHATDEEGKDPLSIAVEAANADIVTLLRLARMNEEMRESEGLYGQPGDETYQDIFRDFSQMASNNPEKLNRFQQDSQKF

SEQ ID NO: 45670 - protein, 963 aa, Homo sapiens
MSKVFSGKRLEAEFPPHHSQSTFRKTSPAPGGPAGEGPLQSLTCLIGEKDLRLLEKLGDGSFGVVRRGEWDAPSGKTVSVAVKCLKPDVLSQPEAMDDFIREVNAMHSLDHRNLIRLYGVVLTPPMKMVTELAPLGSLLDRLRKHQGHFLLGTLSRYAVQVAEGMGYLESKRFIHRDLAARNLLLATRDLVKIGDFGLMRALPQNDDHYVMQEHRKVPFAWCAPESLKTRTFSHASDTWMFGVTLWEMFTYGQEPWIGLNGSQILHKIDKEGERLPRPEDCPQDIYNVMVQCWAHKPEDRPTFVALRDFLLEAQPTDMRALQDFEEPDKLHIQMNDVITVIEGRAENYWWRGQNTRTLCVGPFPRNVVTSVAGLSAQDISQPLQNSFIHTGHGDSDPRHCWGFPDRIDELYLGNPMDPPDLLSVELSTSRPPQHLGGVKKPTYDPVSEDQDPLSSDFKRLGLRKPGLPRGLWLAKPSARVPGTKASRGSGAEVTLIDFGEEPVVPALRPCAPSLAQLAMDACSLLDETPPQSPTRALPRPLHPTPVVDWDARPLPPPPAYDDVAQDEDDFEICSINSTLVGAGVPAGPSQGQTNYAFVPEQARPPPPLEDNLFLPPQGGGKPPSSAQTAEIFQALQQECMRQLQAPAGSPAPSPSPGGDDKPQVPPRVPIPPRPTRPHVQLSPAPPGEEETSQWPGPASPPRVPPREPLSPQGSRTPSPLVPPGSSPLPPRLSSSPGKTMPTTQSFASDPKYATPQVIQAPGPRAGPCILPIVRDGKKVSSTHYYLLPERPSYLERYQRFLREAQSPEEPTPLPVPLLLPPPSTPAPAAPTATVRPMPQAALDPKANFSTNNSNPGARPPPPRATARLPQRGCPGDGPEAGRPADKIQMAMVHGVTTEECQAALQCHGWSVQRAAQYLKVEQLFGLGLRPRGECHKVLEMFDWNLEQAGCHLLGSWGPAHHKR

SEQ ID NO: 45671 - protein, 304 aa, Homo sapiens [sequence omitted]

SEQ ID NO: 45672 - protein, 41 aa, Homo sapiens
MPQLTKHLSENIKDKLKEMGFDRYKMVVQVVIGEQRGEGVF

SEQ ID NO: 45673 - protein, 162 aa, Homo sapiens [sequence omitted]

SEQ ID NO: 45674 - protein, 298 aa, Homo sapiens
MTDEEIMEKLRTIVSIGDPKKKYTRYEKIGQGASGTVFTATDVALGQEVAIKQINLQKQPKKELIINEILVMKELKNPNIVNFLDSYLVGDELFVVMEYLAGGSLTDVVTETCMDEAQIAAVCRECLQALEFLHANQVIHRDIKSDNVLLGMEGSVKLTDFGFCAQITPEQSKRSTMVGTPYWMAPEVVTRKAYGPKVDIWSLGIMAIEMVEGEPPYLNENPLRALYLIATNGTPELQNPEKLSPIFRDFLNRCLEMDVEKRGSAKELLQHPFLKLAKPLSSLTPLIMAAKEAMKSNR

SEQ ID NO: 45675 - protein, 548 aa, Homo sapiens
MAVRVLWGGLSLLRVLWCLLPQTGYVHPDEFFQSPEVMAEDILGVQAARPWEFYPSSSCRSVLFPLLISGSTFWLLRLWEELGPWPGLVSGYALLVGPRLLLTALSFALDGAVYHLAPPMGADRWNALALLSGSYVTLVFYTRTFSNTIEGLLFTWLLVLVSSHVTWGPTRKEPAPGPRWRSWLLGGIVAAGFFNRPTFLAFAVVPLYLWGTRGATNPGLKSLTREALVLLPGAALTAAVFVATDSWYFSSPATSRNLVLTPVNFLHYNLNPQNLARHGTHARLTHLAVNGFLLFGVLHAQALQAAWQRLQVGLQASAQMGLLRALGARSLLSSPRSYLLLLYFMPLALLSAFSHQEARFLIPLLVPLVLLCSPQTQPVPWKGTVVLFNALGALLFGCLHQGGLVPGLEYLEQVVHAPVLPSTPTHYTLLFTHTYMPPRHLLHLPGLGAPVEVVDMGGTEDWALCQTLKSFTRQPACQVAGGPWLCRLFVVTPGTTRRAVEKCSFPFKNETLLFPHLTLEDPPALSSLLSGAWRDHLSLHIVELGEET

SEQ ID NO: 45676 - protein, 55 aa, Homo sapiens
MAVRVLWGGLSLLRVLWCLLPQTGYVHPDEFFQSPEVMAGKTPHVWLRQAAAESA

SEQ ID NO: 45677 - protein, 718 aa, Homo sapiens
MEVRWCATSDPEQHKCGNMSEAFREAGIQPSLLCVRGTSADHCVQLIAAQEADAITLDGGAIYEAGKEHGLKPVVGEVYDQEVGTSYYAVAVVRRSSHVTIDTLKGVKSCHTGINRTVGWNVPVGYLVESGRLSVMGCDVLKAVSDYFGGSCVPGAGETSYSESLCRLCRGDSSGEGVCDKSPLERYYDYSGAFRCLAEGAGDVAFVKHSTVLENTDGKTLPSWGQALLSQDFELLCRDGSRADVTEWRQCHLARVPAHAVVVRADTDGGLIFRLLNEGQRLFSHEGSSFQMFSSEAYGQKDLLFKDSTSELVPIATQTYEAWLGHEYLHAMKGLLCDPNRLPPYLRWCVLSTPEIQKCGDMAVAFRRQRLKPEIQCVSAKSPQHCMERIQAEQVDAVTLSGEDIYTAGKTYGLVPAAGEHYAPEDSSNSYYVVAVVRRDSSHAFTLDELRGKRSCHAGFGSPAGWDVPVGALIQRGFIRPKDCDVLTAVSEFFNASCVPVNNPKNYPSSLCALCVGDEQGRNKCVGNSQERYYGYRGAFRCLVENAGDVAFVRHTTVFDNTNGHNSEPWAAELRSEDYELLCPNGARAEVSQFAACNLAQIPPHAVMVRPDTNIFTVYGLLDKAQDLFGDDHNKNGFKMFDSSNYHGQDLLFKDATVRAVPVGEKTTYRGWLGLDYVAALEGMSSQQCSGAAAPAPGAPLLPLLLPALAARLLPPAL

SEQ ID NO: 45678 - protein, 282 aa, Homo sapiens [sequence omitted]

SEQ ID NO: 45679 - protein, 287 aa, Homo sapiens [sequence omitted]

SEQ ID NO: 45680 - protein, 170 aa, Homo sapiens
MSDDRPNALLSSPATETGHASPLPPSAAPTTDSTDSITGQNSRQREEELELIDQLRKHIEYRLKVSLPCDLGAALTDGVVLCHLANHVRPRSVPSIHVPSPAVPKLTMAKCRRNVENFLEACRKIGVPQEQLCLPLHILEEKGLSQVAVTVQALLELAPPKQQQHQLSAV

SEQ ID NO: 45681 - protein, 424 aa, Homo sapiens
MTVSVTGEPPSTVEEEGIPKETDIEIIPEIPETLEPLSLPDVLRISAVLEDTTDQLSILNYIMPVQYEGRQSICVKSREMNLEGTNLDKLPMASTITKIPSPLITEEGPNLPEIRHRGRFAVEFNKMQDLVFKKPTRQTIMTTETLKKIQIDRQFFSDVIADTIKELQDSATYNSLLQALSKERENKMHFYDIIAREEKGRKQIISLQKQLINVKKEWQFEVQSQNEYIANLKDQLQEMKAKSNLENRYMKTNTELQIAQTQKKCNRTEELLVEEIEKLRMKTEEEARTHTEIEMFLRKEQQKLEERLEFWMEKYDKDTEMKQNELNALKATKASDLAHLQDLAKMIREYEQVIIEDRIEKERSKKKVKQDLLELKSVIKLQAWWRGTMIRREIGGFKMPKDKVDSKDSKGKGKGKDKRRGKKK

SEQ ID NO: 45682 - protein, 647 aa, Homo sapiens
MAAEWGGGVGYSGSGPGRSRWRWSGSVWVRSVLLLLGGLRASATSTPVSLGSSPPCRHHVPSDTEVINKVHLKANHVVKRDVDEHLRIKTVYDKSVEELLPEKKNLVKNKLFPQAISYLEKTFQVRRPAGTILLSRQCATNQYLRKENDPHRYCTGECAAHTKCGPVIVPEEHLQQCRVYRGGKWPHGAVGVPDQEGISDADFVLYVGALATERCSHENIISYAAYCQQEANMDRPIAGYANLCPNMISTQPQEFVGMLSTVKHEVIHALGFSAGLFAFYHDKDGNPLTSRFADGLPPFNYSLGLYQWSDKVVRKVERLWDVRDNKIVRHTVYLLVTPRVVEEARKHFDCPVLEGMELENQGGVGTELNHWEKRLLENEAMTGSHTQNRVLSRITLALMEDTGRQMLSPYCDTLRSNPLQLTCRQDQRAVAVCNLQKFPKPLPQEYQYFDELSGIPAEDLPYYGGSVEIADYCPFSQEFSWHLSGEYQRSSDCRILENQPEIFKNYGAEKYGPHSVCLIQKSAFVMEKCERKLSYPDWGSGCYQVSCSPQGLKVWVQDTSYLCSRAGQVLPVSIQMNGWIHDGNLLCPSCWDFCELCPPETDPPATNLTRALPLDLCSCSSSLVVTLWLLLGNLFPLLAGFLLCIWH

SEQ ID NO: 45683 - protein, 329 aa, Homo sapiens [sequence omitted]

SEQ ID NO: 45684 - protein, 616 aa, Homo sapiens
MLENYRNLVSLGFVISNPDLVTCLEQIKEPCNLKIHETAAKPPAICSPFSQDLSPVQGIEDSFHKLILKRYEKCGHENLQLRKGCKRVNECKVQKGVNNGVYQCLSTTQSKIFQCNTCVKVFSKFSNSNKHKIRHTGEKPFKCTECGRSFYMSHLTQHTGIHAGEKPYKCEKCGKAFNRSTSLSKHKRIHTGEKPYTCEECGKAFRRSTVLNEHKKIHTGEKPYKCEECGKAFTRSTTLNEHKKIHTGEKPYKCKECGKAFRWSTSLNEHKNIHTGEKPYKCKECGKAFRQSRSLNEHKNIHTGEKPYTCEKCGKAFNQSSSLIIHRSIHSEQKLYKCEECGKAFTWSSSLNKHKRIHTGEKPYTCEECGKAFYRSSHLAKHKRIHTGEKPYTCEECGKAFNQSSTLILHKRIHSGQKPYKCEECGKAFTRSTTLNEHKKIHTGEKPYKCEECGKAFIWSASLNEHKNIHTGEKPYKCKECGKAFNQSSGLIIHRSIHSEQKLYKCEECGKAFTRSTALNEHKKIHSGEKPYKCKECGKAYNLSSTLTKHKRIHTGEKPFTCEECGKAFNWSSSLTKHKIIHTGEKSYKCEECGKAFNRPSTLTVHKRIHTGKEHS

SEQ ID NO: 45685 - protein, 62 aa, Homo sapiens
MRLGSGTFATCCVAIEVLGIAVFLRGFFPAPVRSSARAEHGAEPPAPEPSAGTDPSPASPLP

SEQ ID NO: 45686 - protein, 868 aa, Homo sapiens
MPRIKALMTGSLPGFVDVIRNLNSPALLEDSVIRQAKAAGKRIVFYGDETWVKLFPKHFVEYDGTTSFFVSDYTEVDNNVTRHLDKVLKRGDWDILILHYLGLDHIGHISGPNSPLIGQKLSEMDSVLMKIHTSLQSKERETPLPNLLVLCGDHGMSETGSHGASSTEEVNTPLILISSAFERKPGDIRHPKHVQQTDVAATLAIALGLPIPKDSVGSLLFPVVEGRPMREQLRFLHLNTVQLSKLLQENVPSYEKDPGFEQFKMSERLHGNWIRLYLEEKHSEVLFNLGSKVLRQYLDALKTLSLSLSAQVAQYDIYSMMVGTVVVLEVLTLLLLSVPQALRRKAELEVPLSSPGFSLLFYLVILVLSAVHVIVCTSAESSCYFCGLSWLAAGGVMVLASALLCVIVSVLTNVLVGGNTPRKNPMHPSSRWSELDLLILLGTAGHVLSLGASSFVEEEHQTWYFLVNTLCLALSQETYRNYFLGDDGEPPCGLCVEQGHDGATAAWQDGPGCDVLERDKGHGSPSTSEVLRGREKWMVLASPWLILACCRLLRSLNQTGVQWAHRPDLGHWLTSSDHKAELSVLAALSLLVVFVLVQRGCSPVSKAALALGLLGVYCYRAAIGSVRFPWRPDSKDISKGIIEARFVYVFVLGILFTGTKDLLKSQVIAADFKLKTVGLWEIYSGLVLLAALLFRPHNLPVLAFSLLIQTLMTKFIWKPLRHDAAEITVMHYWFGQAFFYFQGNSNNIATVDISAGFVGLDTYVEIPAVLLTAFGTYAGPVLWASHLVHFLSSETRSGSALSHACFCYALICSIPVFTYIVLVTSLRYHLFIWSVFSPKLLYEGMHLLITAAVCVFFTAMDQTRLTQS

SEQ ID NO: 45687 - protein, 99 aa, Homo sapiens
MLKEASGPINFTMFLNLFGEKLSGTDAEETILNAFKMLDPDGKGKINKEYIKRLLMSQADKMTAEEVDQMFQFASIDVAGNLDYKALSYVITHGEEKEE

SEQ ID NO: 45688 - protein, 612 aa, Homo sapiens
MRPLRPRAALLALLASLLAAPPVAPAEAPHLVHVDAARALWPLRRFWRSTGFWGSTGRGLSYNFTHLDGYLDLLRENQLLPGFELMGSASGHFTDFEDKQQVFEWKDLVSSLARRYIGRYGLAHVSKWNFETWNEPDHHDFDNVSMTMQGFLNYYDACSEGLRAASPALRLGGPGDSFHTPPRSPLSWGLLRHCHDGTNFFTGEAGVRLDYISLHRKVRPAPPSAPVFCALSRCAPGRADPGGAEAAPPAGCAQLHLHPGAGEGRRAADPAALPQVRGHPHLQRRGGPAGGLVPATAVEGGRDLRGHGGEGGPAQRPARPPATFLPRRDRRAVAAPPGPSCPGHPQVIAQHQNLLLANTTSAFPYALLSNDNAFLSYHPHPFAQRTLTARFQVNNTRPPHVQLLRKPVLTAMGLLALLDEEQLWAEVSQAGTVLDSNHTVGVLASAHRPQGPADAWRAAVLIYASDDTRAHPNRSVAVTLRLRGVPPGPGLVYVTRYLDNGLCSPDGEWRRLGRPVFPTAEQFRRMRAAEDPVAAAPRPLPAGGRLTLRPALRLPSLLLVHVCARPEKPPGQVTRLRALPLTQGQLVLVWSDEHVGSKCVPVDIRDPVLSGR

SEQ ID NO: 45689 - protein, 399 aa, Homo sapiens
MPILKDVATVAFCDAQSTQEIHEKVLNEAVGALMYHTITLTREDLEKFKALRIIVRIGSGFDNIDIKSAGDLGIAVCNVPAASVEETADSTLCHILNLYRRATWLHQALREGTRVQSVEQIREVASGAARIRGETLGIIGLGRVGQAVALRAKAFGFNVLFYDPYLSDGVERALGLQRVSTLQDLLFHSDCVTLHCGLNEHNHHLINDFTVKQMRQGAFLVNTARGGLVDEKALAQALKEGRIRGAALDVHESEPFSFSQGPLKDAPNLICTPHAAWYSEQASIEMREEAAREIRRAITGRIPDSLKNCVNKDHLTAATHWASMDPAVVHPELNGAAYRYPPGVVGVAPTGIPAAVEGIVPSAMSLSHGLPPVAHPPHAPSPGQTVKPEADRDHASDQL

SEQ ID NO: 45690 - protein, 115 aa, Homo sapiens
MREEAAREIRRAITGRIPDSLKNCVNKDHLTAATHWASMDPAVVHPELNGAAYSRYPPGVVGVAPTGIPAAVEGIVPSAMSLSHGLPPVAHPPHAPSPGQTVKPEADRDHASDQL

SEQ ID NO: 45691 - protein, 38 aa, Homo sapiens
MHRCGAASRAGREERPHPHGDCISQSAPRAAERRDSMP

SEQ ID NO: 45692 - protein, 525 aa, Homo sapiens
MRESDTGLWLHNKLGATDELWAPPSIASLLTAAVIDNIRLCFHGLSSAVKLKLLLGTLHLPRRTVDEMKGALMEIIQLASLDSDPWVLMVADILKSFPDTGSLNLELEEQNPNVQDILGELREKVGECEASAMLPLECQYLNKNALTTLAGPLTPPVKHFQLKRKPKSATLRAELLQKSTETAQQLKRSAGVPFHAKGRGLLRKMDTTTPLKGIPKQAPFRSPTAPSVFSPTGNRTPIPPSRTLLRKERGVKLLDISELDMVGAGREAKRRRKTLDAEVVEKPAKEETVVENATPDYAAGLVSTQKLGSLNNEPALPSTSYLPSTPSVVPASSYIPSSETPPAPSSREASRPPEEPSAPSPTLPAQFKQRAPMYNSGLSPATPTPAAPTSPLTPTTPPAVAPTTQTPPVAMVAPQTQAPAQQQPKKNLSLTREQMFAAQEMFKTANKVTRPEKALILGFMAGSRENPCQEQGDVIQIKLSEHTEDLPKADGQGSTTMLVDTVFEMNYATGQWTRFKKYKPMTNVS

SEQ ID NO: 45693 - protein, 1424 aa, Homo sapiens
MNHRTPPYPAGDYCLLCRSERKDSSFLESGIKTASKLALSMAPKGNSVLHLPLWVCPDCRRTVEKEERHGGLDQPVSQDFLLHSSLGGSQPEAGSGGRLALGAQTLPSDTACSCEACSERREISAEADREPQQLQNYWSEVRYTVRCIYRQAGTPLADDQDQSLVPDKEGVKELVDRLCERDPYQLYQRLEQQAREYVLEMKVRLLRQLSAAAKVKAPSGLQGPPQAHQFISLLLEEYGALCQAARSISTFLGTLENEHLKKFQVTWELHNKHLFENLVFSEPLLQSNLPALVSQIRLGTTTHDTCSEDTYSTLLQRYQRSEEELRRVAEEWLECQKRIDAYVDEQMTMKTKQRMLTEDWELFKQRRFIEEQLTNKKAVTGENNFTDTMRHMLSSRLSMPDCPNCNYRRRCACDDCSLSHILTCGIMDPPVTDDIHIHQLPLQVDPAPDYLAERSPPSVSSASSGSGSSSPITIQQHPRLILTDSGSAPTFCSDDEDVAPLSAKFADIYPLSNYDDTEVVANMNGIHSELNGGGENMALKDESPQISSTSSSSSEADDEEADGESSGEPPGAPKEDGVLGSRSPRTEESKADSPPPSYPTQQAEQAPNTCECHVCKQEASGLTPSAMTAGALPPGHQFLSPEKPTHPALHLYPHIHGHVPLHTVPHLPRPLIHPTLYATPPFTHSKALPPAPVQNHTNKHQVFNASLQDHIYPSCFGNTPEWNSSKFISLWGSEVMNDKNWNPGTFLPDTISGSEILGPTLSETRPEALPPPSSNETPAVSDSKEKKNAAKKKCLYNFQDAFMEANKVVMATSSATSSVSCTATTVQSSNSQFRVSSKRPPSVGDVFHGISKEDHRHSAPAAPRNSPTGLAPLPALSPAALSPAALSPASTPHLANLAAPSFPKTATTTPGFVDTRKSFCPAPLPPATDGSISAPPSVCSDPDCEGHRCENGVYDPQQDDGDESADEDSCSEHSSSTSTSTNQKEGKYCDCCYCEFFGHGGPPAAPTSRNYAEMREKLRLRLTKRKEEQPKKMDQISERESVVDHRRVEDLLQFINSSETKPVSSTRAAKRARHKQRKLEEKARLEAEARAREHLHLQEEQRRREEEEDEEEEEDRFKEEFQRLQELQKLRAVKKKKKERPSKDCPKLDMLTRNFQAATESVPNSGNIHNGSLEQTEEPETSSHSPSRHMNHSEPRPGLGADGDAADPVDTRDSKFLLPKEVNGKQHEPLSFFFDIMQHHKEGNGKQKLRQTSKASSEPARRPTEPPKATEGQSKPRAQTESKAKVVDLMSITEQKREERKVNSNNNNKKQLNHIKDEKSNPTPMEPTSPGEHQQNSKLVLAESPQPKGKNKKNKKKKGDRVNNSIDDVFLPKDIDLDSVDMDETEREVEYFKRFCLDSARQTRQRLSINWSNFSLKKATFAAH

SEQ ID NO: 45694 - protein, 570 aa, Homo sapiens [sequence omitted]

SEQ ID NO: 45695 - protein, 379 aa, Homo sapiens
MPVEKRYNSVLFGGLIGSAFSVLQFLCAPLTGATSDCLGRRPVMLLCLMGVATSYAVWATSRSFAAFLASRLIGGISKGNVSLSTAIVADLGSPLARSQGMAVIGVAFSLGFTLGPMLGASLPLEMAPWFALLFAASDLLFIFCFLPETLPLEKRAPSIALGFRDAADLLSPLALLRFSAVARGQDPPSGDRLSSLRRLGLVYFLYLFLFSGLEYTLSFLTHQRFQFSSLQQGKMFFLIGLTMATIQGAYARRIHPGGEVAAVKRALLLLVPAFLLIGWGRSLPVLGLGLLLYSFAAAVVVPCLSSVVAGYGSPGQKGTVMGTLRSLGALARAAGPLVAASVYWLAGAQACFTTWSGLFLLPFFLLQKLSYPAQTLKAE

SEQ ID NO: 45696 - protein, 290 aa, Homo sapiens
MPVEKRYNSVLFGGLIGSAFSVLQFLCAPLTGATSDCLGRRPVMLLCLMGVATSYAVWATSRSFAAFLASRLIGGISKGNVSLSTAIVADLGSPLARSQGMAVIGVAFSLGFTLGPMLGASLPLEMAPWFALLFAASDLLFIFCFLPETLPLEKRAPSIALGFRDAADLLSPLALLRFSAVARGQDPPSGDRLSSLRRLGLVYFLYLFLFSGLEYTLSFLTHQRFQFSRPSCCWCPPSSSSAGDVLCPCWAWGCCSTPLPPPLWCPACPPWSLAMAHQGRRARSWVHCAA

SEQ ID NO: 45697 - protein, 602 aa, Homo sapiens
MVRELGFEMKAQPSNRMKTEAELAKEEQEHLRKLEAERLRRMLGKDEDENVKKPKHMSADDLNDGFVLDKDDRRLLSYKDGKMNVEEDVQEEQSKEASDPESNEEEGDSSGGEDTEESDSPDSHLDLESNVESEEENEKPAKEQRQTPGKGLISGKERAGKATRDELPYTFAAPESYEELRSLLLGRSMEEQLLVVERIQKCNHPSLAEGNKAKLEKLFGFLLEYVGDLATDDPPDLTVIDKLVVHLYHLCQMFPESASDAIKFVLRDAMHEMEEMIETKGRAALPGLDVLIYLKITGLLFPTSDFWHPVVTPALVCLSQLLTKCPILSLQDVVKGLFVCCLFLEYVALSQRFIPELINFLLGILYIATPNKASQGSTLVHPFRALGKNSELLVVSAREDVATWQQSSLSLRWASRLRAPTSTEANHIRLSCLAVGLALLKRCVLMYGSLPSFHAIMGPLQALLTDHLADCSHPQELQELCQSTLTEMESQKQLCRPLTCEKSKPVPLKLFTPRLVKVLEFGRKQGSSKEEQERKRLIHKHKREFKGAVREIRKDNQFLARMQLSEIMERDAERKRKVKQLFNSLATQEGEWKALKRKKFKK

SEQ ID NO: 45698 - protein, 349 aa, Homo sapiens
MAYWYFGQVWCGVYLALDVLFCTSSIVHLCAISLDRYWSVTQAVEYNLKRTPRRVKATIVAVWLISAVISFPPLVSLYRQPDGAAYPQCGLNDETWYILSSCIGSFFAPCLIMGLVYARIYRVAKLRTRTLSEKRAPVGPDGASPTTENGLGAAAGAGENGHCAPPPADVEPDESSAAAERRRRRGALRRGGRRRAGAEGGAGGADGQGAGPGAAESGALTASRSPGPGGRLSRASSRSVEFFLSRRRRARSSVCRRKVAQAREKRFTFVLAVVMGVFVLCWFPFFFSYSLYGICREACQVPGPLFKFFFWIGYCNSSLNPVIYTVFNQDFRRSFKHILFRRRRRGFRQ

SEQ ID NO: 45699 - protein, 738 aa, Homo sapiens
MLVVKGVCFKAHKNVLAAFSQYFRSLFQNSSSQKNDVFHLDVKNVSGIGQILDFMYTSHLDLNQDNIQVMLDTAQCLQVQNVLSLCHTFLKSATVVQPPGMPCNSTLSLQSTLTPDATCVISENYPPHLLQECSADAQQNKTLDESHPHASPSVNRHHSAGEISKQAPDTSDGSCTELPFKQPNYYYKLRNFYSKQYHKHAAGPSQERVVEQPFAFSTSTDLTTVESQPCAVSHSECILESPEHLPSNFLAQPVNDSAPHPESDATCQQPVKQMRLKKAIHLKKLNFLKSQKYAEQVSEPKSDDGLTKRLESASKNTLEKASSQSAEEKESEEVVSCENFNCISETERPEDPAALEDQSQTLQSQRQYACELCGKPFKHPSNLELHKRSHTGEKPFECNICGKHFSQAGNLQTHLRRHSGEKPYICEICGKRFAASGDVQRHIIIHSGEKPHLCDICGRGFSNFSNLKEHKKTHTADKVFTCDECGKSFNMQRKLVKHRIRHTGERPYSCSACGKCFGGSGDLRRHVRTHTGEKPYTCEICNKCFTRSAVLRRHKKMHCKAGDESPDVLEELSQAIETSDLEKSQSSDSFSQDTSVTLMPVSVKLPVHPVENSVAEFDSHSGGSYCKLRSMIQPHGVSDQEKLSLDPGKLAKPQMQQTQPQAYAYSDVDTPAGGEPLQADGMAMIRSSLAALDNHGGDPLGSRASSTTYRNSEGQFFSSMTLWGLAMKTLQNENELDQ

SEQ ID NO: 45700 - protein, 901 aa, Homo sapiens
MSKDKEAVDECEPPSNSNITAFALKAKVIYPINQKFRPLADGSSNPSLHENLKQAVLPHQPVEASPSSSLGSLSQGEKDDCSSSSSVHSATSDDRFLSRTFLRVNAFPEVLACESVDVDLCIYSLHLKDLLHLDTALRQEKHMMFIQIFKMCLLDLLPKKKSDDELYQKILSKQEKDLEELEKGLQVKLSNTEMSGAGDSEYITLADVEKKEREYSEQLIDNMEAFWKQMANIQHFLVDQFKCSSSKARQLMMTLTERMIAAEGLLCDSQELQALDALERTMGRAHMAKVIEFLKLQVQEETRCRLAAISHGLELLAGEGKLSGRQKEELLTQQHKAFWQEAERFSREFVQRGKDLVTASLAHQVEGTAKLTLAQEEEQRSFLAEAQPTADPEKFLEAFHEVLERQRLMQCDLEEEENVRATEAVVALCQELYFSTVDTFQKFVDALFLQTLPGMTGLPPEECDYLRQEVQENAAWQLGKSNRFRRQQWKLFQELLEQDQQVWMEECALSSVLQTHLREDHEGTIRGVLGRLGGLTEESTRCVLQGHDLLLRSALRRLALRGNALATLTQMRLSGKKHLLQELREQRALEQGSSQCLDEHQWQLLRALEARVLEEASRLEEEAQQTRLQLQQRLLAEAQEVGQLLQQHMECAIGQALLVHARNAATKSRAKDRDDFKRTLMEAAVESVYVTSAGVSRLVQAYYQQIGRIMEDHEERKLQHLKTLQGERMENYKLRKKQELSNPSSGSRTAGGAHETSQAVHQRMLSQQKRFLAQFPVHQQMRLHAQQQQAGVMDLLEAQLETQLQEAEQNFISELAALARVPLAESKLLPAKRGLLEKPLRTKRKKPLPQERGDLGVPNNEDLASGDQTSGSLSSKRLSQQESEAGDSGNSKKMLKRRSNL

SEQ ID NO: 45701 - protein, 1341 aa, Homo sapiens
MIYTRYVLSLLLHDSYDYDLQEQENDIFLGWEKGAYKKWGKSKKKCSDLTLEEMKKQAAVQCLRSASDESSGIETLVEELCSRLKDLQSKQEEKIHKKLEGSPSPEAELSPPAKDQVEMYYEAFPPLSEKPVCLQEIMTVWNKSKVCSYSSSSSSSTAPPASTDTSSPKDCNSESEVTKERSSEVPTTVHEKTQSKSKNEKENKFSNGTIEEKPALYKKQIRHKPEGKIRPRSWSSGSSEAGSSSSGNQGELKASMKYVKVRHKAREIRNKKGRNGQSRLSLKHGEKAERNIHTGSSSSSSSGSVKQLCKRGKRPLKEIGRKDPGSTEGKDLYMENRKDTEYKEEPLWYTEPIAEYFVPLSRKSKLETTYRNRQDTSDLTSEAVEELSESVHGLCISNNNLHKTYLAAGTFIDGHFVEMPAVINEDIDLTGTSLCSLPEDNKYLDDIHLSELTHFYEVDIDQSMLDPGASETMQGESRILNMIRQKSKENTDFEAECCIVLDGMELQGERAIWTDSTSSVGAEGLFLQDLGNLAQFWECCSSSSGDADGESFGGDSPVRLSPILDSTVLNSHLLAGNQELFSDINEGSGINSCFSVFEVQCSNSVLPFSFETLNLGNENTDSSANMLGKTQSRLLIWTKNSAFEENEHCSNLSTRTCSPWSHSEETRSDNETLNIQFEESTQFNAEDINYVVPRVSSNYVDEELLDFLQDETCQQNSRTLGEIPTLVFKKTSKLESVCGIQLEQKTENKNFETTQVCNESPHGDGYSSGVIKDIWTKMADTNSVATVEIERTDAELFSADVNNYCCCLDAEAELETLQEPDKAVRRSEYHLWEGQKESLEKRAFASSELSNVDGGDYTTPSKPWDVAQDKENTFILGGVYGELKTFNSDGEWAVVPPSHTKGSLLQCAASDVVTIAGTDVFMTPGNSFAPGHRQLWKPFVSFEQNDQPKSGENGLNKGFSFIFHEDLLGACGNFQVEDPGLEYSFSSFDLSNPFSQVLHVECSFEPEGIASFSPSFKPKSILCSDSDSEVFHPRICGVDRTQYRAIRISPRTHFRPISASELSPGGGSESEFESEKDEANIPIPSQVDIFEDPQADLKPLEEDAEKEGHYYGKSELESGKFLPRLKKSGMEKSAQTSLDSQEESTGILSVGKQNQCLECSMNESLEIDLESSEANCKIMAQCEEEINNFCGCKAGCQFPAYEDNPVSSGQLEEFPVLNTDIQGMNRSQEKQTWWEKALYSPLFPASECEECYTNAKGESGLEEYPDAKETPSNEERLLDFNRVSSVYEARCTGERDSGAKSDGFRGKMCSSASSTSEETGSEGGGEWVGPSEEELFSRTHL

SEQ ID NO: 45702 - protein, 314 aa, Homo sapiens [sequence omitted]

SEQ ID NO: 45703 - protein, 528 aa, Homo sapiens
MSNVYQIQLSHSKEEWFISVLIFCPERWHSDGIVYPKPTWLGEELLAKLAKWSVENKKSDFKSTLSLISIMKYSKAYQELKEKYKEMVKVWPEVTDPEKFVYEDVAIAAYLLILWEEERAERRLTARQSFVDLGCGNGLLVHILSSEGHPGRGIDVRRRKIWDMYGPQTQLEEDAITPNDKTLFPDVDWLIGNHSDELTPWIPVIAARSSYNCRFFVLPCCFFDFIGRYSRRQSKKTQYREYLDFIKEVGFTCGFHVDEDCLRIPSTKRVCLVGKSRTYPSSREASVDEKRTQYIKSRRGCPVSPPGWELSPSPRWVAAGSAGHCDGQQALDARVGCVTRAWAAEHGAGPQAEGPWLPGFHPREKAERVRNCAALPRDFIDQVVLQVANLLLGGKQLNTRSSRNGSLKTWNGGESLSLAEVANELDTETLRRLKRECGGLQTLLRNSHQVFQVVNGRVHIRDWREETLWKTKQPEAKQRLLSEACKTRLCWFFMHHPDGCALSTDCCPFAHGPAELRPPRTTPRKKIS

SEQ ID NO: 45704 - protein, 143 aa, Homo sapiens
MLDKYIYGAQGVLLVYDITNYQSFENLEDWYTVVKKVSEESETQPLVALVGNKIDLEHMRTIKPEKHLRFCQENGFSSHFVSAKTGDSVFLCFQKVAAEILGIKLNKAEIEQSQRIVRAEIVKYPEEENQHTTSTQSRICSVQ

SEQ ID NO: 45705 - protein, 570 aa, Homo sapiens
MPPPSPDSENGFYPGLPSSMNPAFFPSFSPVSPHGCTGLSVPTSGGGGGGFGGPFSATAVPPPPPPAMNIPQQQPPPPAAPQQPQSRRSPVSPQLQQQHQAAAAAFLQQRNSYNHHQPLLKQSPWSNHQSSGWGTGSMSWGAMHGRDHRRTGNMGIPGTMNQISPLKKPFSGNVIAPPKFTRSTPSLTPKSWIEDNVFRTDNNSNTLLPLQVRMDRSRMYDSLNMHSLENSLIDIMRAEHDPLKGRLSYPHPGTDNLLMLNARSYGRRRGRSSLFPIDDGLLDDGHSDQVGVLNSPTCYSAHQNGERIERFSRKVFVGGLPPDIDEDEITASFRRFGPLVVDWPHKAESKSYFPPKGYAFLLFQEESSVQALIDACIEEDGKLYLCVSSPTIKDKPVQIRPWNLSDSDFVMDGSQPLDPRKTIFVGGVPRPLRAVELAMIMDRLYGGVCYAGIDTDPELKYPKGAGRVAFSNQQSYIAAISARFVQLQHGDIDKRVEVKPYVLDDQMCDECQGARCGGKFAPFFCANVTCLQYYCEFCWANIHSRAGREFHKPLVKEGADRPRQIHFRWN

SEQ ID NO: 45706 - protein, 597 aa, Homo sapiens
MPPPSPDSENGFYPGLPSSMNPAFFPSFSPVSPHGCTGLSVPTSGGGGGGFGGPFSATAVPPPPPPAMNIPQQQPPPPAAPQQPQSRRSPVSPQLQQQHQAAAAAFLQQRNSYNHHQPLLKQSPWSNHQSSGWGTGSMSWGAMHGRDHRRTGNMGIPGTMNQISPLKKPFSGNVIAPPKFTRSTPSLTPKSWIEDNVFRTDNNSNTLLPLQVRSSLQLPAWGSDSLQDSWCTAAGTSRIDQDRSRMYDSLNMHSLENSLIDIMRAEHDPLKGRLSYPHPGTDNLLMLNARSYGRRRGRSSLFPIDDGLLDDGHSDQVGVLNSPTCYSAHQNGERIERFSRKVFVGGLPPDIDEDEITASFRRFGPLVVDWPHKAESKSYFPPKGYAFLLFQEESSVQALIDACIEEDGKLYLCVSSPTIKDKPVQIRPWNLSDSDFVMDGSQPLDPRKTIFVGGVPRPLRAVELAMIMDRLYGGVCYAGIDTDPELKYPKGAGRVAFSNQQSYIAAISARFVQLQHGDIDKRVEVKPYVLDDQMCDECQGARCGGKFAPFFCANVTCLQYYCEFCWANIHSRAGREFHKPLVKEGADRPRQIHFRWN

SEQ ID NO: 45707 - protein, 1597 aa, Homo sapiens
MGRQNKNSKVRRQPRKKQPPTAVPKEMVSEKSHLGNPQEPVQEEPKTRLLSMTVRRGPRSLPPIPSTSRTGFAEFSMRGRMREKLQAARSKAESALLQEIPTPRPRRLRSPSKKELETEFGTEPGKEVERTQQEVDSQSYSRVKFHDSARKIKPKPQVPPGFPSAEEAYNFFTFNFDPEPEGSEEKPKARHRAGTNQEEEEGEEEEPPAQGGGKEMDEEELLNGDDAEDFLLGLDHVADDFVAVRPADYESIHDRLQMEREMLFIPSRQTVPTYKKLPENVQPRFLEDEGLYTGVRPEVARTNQNIMENRLLMQDPERRWFGDDGRILALPNPIKPFPSRPPVLTQEQSIKAELETLYKKAVKYVHSSQHVIRSGDPPGNFQLDIDISGLIFTHHPCFSREHVLAAKLAQLYDQYLARHQRNKAKFLTDKLQALRNAVQTGLDPEKPHQSLDTIQKTINEYKSEIRQTRKFRDAEQEKDRTLLKTIIKVWKEMKSLREFQRFTNTPLKLVLRKEKADQKADEEAYEAEIQAEISELLEEHTEEYAQKMEEYRTSLQQWKAWRKVQRAKKKKRKQAAEEHPGDEIAEPYPEEDLVKPSPPEPTDRAVIEQEVRERAAQSRRRPWEPTLVPELSLAGSVTPNDQCPRAEVSRREDVKKRSVYLKVLFNNKEVSRTVSRPLGADFRVHFGQIFNLQIVNWPESLTLQVYETVGHSSPTLLAEVFLPIPETTVVTGRAPTEEVEFSSNQHVTLDHEGVGSGVPFSFEADGSNQLTLMTSGKVSHSVAWAIGENGIPLIPPLSQQNIGFRSALKKADAISSIGTSGLTDMKKLAKWAAESKLDPNDPNNAPLMQLISVATSGESYVPDFFRLEQLQQEFNFVSDQELNRSKRFRLLHLRSQEVPEFRNYKQVPVYDREIMEKVFQDYEKRLRDRNVIETKEHIDTHRAIVAKYLQQVRESVINRFLIAKQYFLLADMIVEEEVPNISILGLSLFKLAEQKRPLRPRRKGRKKVTAQNLSDGDIKLLVNIVRAYDIPVRKPAVSKFQQPSRSSRMFSEKHAASPSTYSPTHNADYPLGQVLVRPFVEVSFQRTVCHTTTAEGPNPSWNEELELPFRAPNGDYSTASLQSVKDVVFINIFDEVLHDVLEDDRERGSGIHTRIERHWLGCVKMPFSTIYFQARIDGTFKIDIPPVLLGYSKERNMILERGFDSVRSLSEGSYITLFITIEPQLVPGESIREKFESQEDEKLLQATEKFQAECALKFPNRQCLTTVIDISGKTVFITRYLKPLNPPQELLNVYPNNLQATAELVARYVSLIPFLPDTVSFGGICDLWSTSDQFLDLLAGDEEEHAVLLCNYFLSLGKKAWLLMGNAIPEGPTAYVLTWEQGRYLIWNPCSGHFYGQFDTFCPLKNVGCLIGPDNIWFNIQRYESPLRINFDVTRPKLWKSFFSRSLPYPGLSSVQPEELIYQRSDKAAAAELQDRIEKILKEKIMDWRPRHLTRWNRYCTSTLRHFLPLLEKSQGEDVEDDHRAELLKQLGDYRFSGFPLHMPYSEVKPLIDAVYSTGVHNIDVPNVEFALAVYIHPYPKNVLSVWIYVASLIRNR

SEQ ID NO: 45708 - protein, 674 aa, Homo sapiens
MKQLVGLYCDKLSKTNFSNNNDFRALLQSLYATFKEFKMHEQIENEYIIGLLQQRSQTIYNVHSDNKLSEMLSLFEKGLKNVKNEYEQLNYAKQLKERLEAFTRDFLPHMKEEEEVFQPMLMEYFTYEELKDIKKKVIAQHCSQKDTAELLRGLSLWNHAEERQKFFKYSVDEKSDKEAEVSEHSTGITHLPPEVMLSIFSYLNPQELCRCSQVSMKWSQLTKTGSLWKHLYPVHWARGDWYSGPATELDTEPDDEWVKNRKDESRAFHEWDEDADIDESEESAEESIAISIAQMEKRLLHGLIHNVLPYVGTSVKTLVLAYSSAVSSKMVRQILELCPNLEHLDLTQTDISDSAFDSWSWLGCCQSLRHLDLSGCEKITDVALEKISRALGILTSHQSGFLKTSTSKITSTAWKNKDITMQSTKQYACLHDLTNKGIGEEIDNEHPWTKPVSSENFTSPYVWMLDAEDLADIEDTVEWRHRNVESLCVMETASNFSCSTSGCFSKDIVGLRTSVCWQQHCASPAFAYCGHSFCCTGTALRTMSSLPESSAMCRKAARTRLPRGKDLIYFGSEKSDQETGRVLLFLSLSGCYQITDHGLRVLTLGGGLPYLEHLNLSGCLTITGAGLQDLVSACPSLNDEYFYYCDNINGPHADTASGCQNLQCGFRACCRSGE

SEQ ID NO: 45709 - protein, 653 aa, Homo sapiens
MKQLVGLYCDKLSKTNFSNNNDFRALLQSLYATFKEFKMHEQIENEYIIGLLQQRSQTIYNVHSDNKLSEMLSLFEKGLKNVKNEYEQLNYAKQLKERLEAFTRDFLPHMKEEEEVFQPMLMEYFTYEELKDIKKKVIAQHCSQKDTAELLRGLSLWNHAEERQKFFKYSVDEKSDKEAEVSEHSTGITHLPPEVMLSIFSYLNPQELCRCSQVSMKWSQLTKTGSLWKHLYPVHWARGDWYSGPATELDTEPDDEWVKNRKDESRAFHEWDEDADIDESEESAEESIAISIAQMEKRLLHGLIHNVLPYVGTSVKTLVLAYSSAVSSKMVRQILELCPNLEHLDLTQTDISDSAFDSWSWLGCCQSLRHLDLSGCEKITDVALEKISRALGILTSHQSGFLKTSTSKITSTAWKNKDITMQSTKQYACLHDLTNKGIGEEIDNEHPWTKPVSSENFTSPYVWMLDAEDLADIEDTVEWRHRNVESLCVMETASNFSCSTSGCFSKDIVGLRTSVCWQQHCASPAFAYCGHSFCCTGTALRTMSSLPESSAMCRKAARTRLPRGKDLIYFGSEKSDQETGRVLLFLSLSGCYQITDHGLRVLTLGGGLPYLEHLNLSGCLTITGAGLQDLVSACPSLNDEYFYYCDNINGNAF

SEQ ID NO: 45710 - protein, 199 aa, Homo sapiens
MHYVDYSMMYHLIRGQSVIKLYIIYNMLEVADRLFSSFGQDILDALYWTATEPKERKRAHIGFVEIKGSVFKKFEKNNLFQMSNSDIKERFTNYVLLLIVCLRNMEQFSWNPDHLWVLFPDVCMVIASEIAVDIVKHAFITKFNDITADVYSEYRASLAFDLVSSRQKNAYTDYSDSVARRMGFIPLPLAVLVDIPEST

SEQ ID NO: 45711 - protein, 240 aa, Homo sapiens
MFTKVCTEGRLILEFTFDDLMRIKTWHFTIRQYRELVPRSILAMHAQDPQVLDQLSKNITRMGLTNFTLNYLRLCVILEPMQELMSRHKTYNLSPRDCLKTCLFQKWQRMVAPPEPTRQPTTKRRKRKNSTSSTSNSSAGNNANSTGSKKKTTAANLSLSSQVPDVMVVGEPTLMGGEFGDEDERLITRLENTQYDAANGMDDEEDFNNSPALGNNSPWNSKPPATQETKSENPPPQASQ

SEQ ID NO: 45712 - protein, 174 aa, Homo sapiens
MADKLLLTTPSKKFTCQGPVDVNILAKCNPCLSNPCKNDGTCNSDPVDFYRCTCPYGFKGQDCDVPIHACISNPCKHGGTCHLKEGEEDGFWCICADGFEGENCEVNVDDCEDNDCENNSTCVDGINNYTCLCPPEYTGTNNRKYFAFHQYICLKASLELCYICLVNLFLFDKW

SEQ ID NO: 45713 - protein, 728 aa, Homo sapiens
MLISAGLPPLKASHSAHSTHSAHSTHSTHSAHSTHAGHAGHTSLPQCINPFTNLPHTPRYYDILKKRLQLPVWEYKDRFTDILVRHQSFVLVGETGSGKTTQIPQWCVEYMRSLPGPKRGVACTQPRRVAAMSVAQRVADEMDVMLGQEVGYSIRFEDCSSAKTILKYMTDGMLLREAMNDPLLERYGVIILDEAHERTLATDILMGVLKEVVRQRSDLKVIVMSATLDAGKFQIYFDNCPLLTIPGRTHPVEIFYTPEPERDYLEAAIRTVIQIHMCEEEEGDLLLFLTGQEEIDEACKRIKREVDDLGPEVGDIKIIPLYSTLPPQQQQRIFEPPPPKKQNGAIGRKVVVSTNIAETSLTIDGVVFVIDPGFAKQKVYNPRIRVESLLVTAISKASAQQRAGRAGRTRPGKCFRLYTEKAYKTEMQDNTYPEILRSNLGSVVLQLKKLGIDDLVHFDFMDPPAPETLMRALELLNYLAALNDDGDLTELGSMMAEFPLDPQLAKMVIASCDYNCSNEVLSITAMLSVPQCFVRPTEAKKAADEAKMRFAHIDGDHLTLLNVYHAFKQNHESVQWCYDNFINYRSLMSADNVRQQLSRIMDRFNLPRRSTDFTSRDYYINIRKALVTGYFMQVAHLERTGHYLTVKDNQVVQLHPSTVLDHKPEWVLYNEFVLTTKNYIRTCTDIKPEWLVKIAPQYYDMSNFPQCEAKRQLDRIIAKLQSKEYSQY

SEQ ID NO: 45714 - protein, 441 aa, Homo sapiens
MDSNNFLGNCGVGEREGRVASALVARRHYRFIHGIGRSGDISAVQPKAAGSSLLNKITNSLVLDIIKLAGVHTVANCFVVPMATGMSLTLCFLTLRHKRPKAKYIIWPRIDQKSCFKSMITAGFEPVVIENVLEGDELRTDLKAVEAKVQELGPDCILCIHSTTSCFAPRVPDRLEELAVICANYDIPHIVNNAYGVQSSKCMHLIQQGARVGRIDAFVQSLDKNFMVPVGGAIIAGFNDSFIQEISKMYPGRASASPSLDVLITLLSLGSNGYKKLLKERKEMFSYLSNQIKKLSEAYNERLLHTPHNPISLAMTLKTLDEHRDKAVTQLGSMLFTRQVSGARVVPLGSMQTVSGYTFRGFMSHTNNYPCAYLNAASAIGMKMQDVDLFIKRLDRCLKAVRKERSKESDDNYDKTEDVDIEEMALKLDNVLLDTYQDASS

SEQ ID NO: 45715 - protein, 489 aa, Homo sapiens
MEVVLPLDPAVPAPLCPHGPTLLFVKVTQGKEETRRFYACSACRDRKDCNFFQWEDEKLSGARLAAREAHNRRCQPPLSRTQCVERYLKFIELPLTQRKFCQTCQQLLLPDDWGQHSEHQVLGNVSITQLRRPSQLLYPLENKKTNAQYLFADRSCQFLVDLLSALGFRRVLCVGTPRLHELIKLTASGDKKSNIKSLLLDIDFRYSQFYMEDSFCHYNMFNHHFFDGKTALEVCRAFLQEDKGEGIIMVTDPPFGGLVEPLAITFKKLIAMWKEGQSQDDSHKELPIFWIFPYFFESRICQFFPSFQMLDYQVDYDNHALYKHGKTGRKQSPVRIFTNIPPNKIILPTEEGYRFCSPCQRYVSLENQHCELCNSCTSKDGRKWNHCFLCKKCVKPSWIHCSICNHCAVPDHSCEGPKHGCFICGELDHKRSTCPNIATSKRANKAVRKQKQRKSNKMKMETTKGQSMNHTSATRRKKRRERAHQYLGS

SEQ ID NO: 45716 - protein, 25 aa, Homo sapiens
MLHRLVIEIMRLSFKWKHYSSSEPL

SEQ ID NO: 45717 - protein, 1066 aa, Homo sapiens
MRTAGWARGWCLGCCLLLPLSLSLAAAKQLLRYRLAEEGPADVRIGNVASDLGIVTGSGEVTFSLESGSEYLKIDNLTGELSTSERRIDREKLPQCQMIFDENECFLDFEVSVIGPSQSWVDLFEGQVIVLDINDNTPTFPSPVLTLTVEENRPVGTLYLLPTATDRDFGRNGIERYELLQEPGGGGSGGESRRAGAADSAPYPGGGGNGASGGGSGGSKRRLDASEGGGGTNPGGRSSVFELQVADTPDGEKQPQLIVKGALDREQRDSYELTLRVRDGGDPPRSSQAILRVLITDVNDNSPRFEKSVYEADLAENSAPGTPILQLRAADLDVGVNGQIEYVFGAATESVRRLLRLDETSGWLSVLHRIDREEVNQLRFTVMARDRGQPPKTDKATVVLNIKDENDNVPSIEIRKIGRIPLKDGVANVAEDVLVDTPIALVQVSDRDQGENGVVTCTVVGDVPFQLKPASDTEGDQNKKKYFLHTSTPLDYEATREFNVVIVAVDSGSPSLSSNNSLIVKVGDTNDNPPMFGQSVVEVYFPENNIPGERVATVLATDADSGKNAEIAYSLDSSVMGIFAIDPDSGDILVNTVLDREQTDRYEFKVNAKDKGIPVLQGSTTVIVQVADKNDNDPKFMQDVFTFYVKENLQPNSPVGMVTVMDADKGRNAEMSLYIEENNNIFSIENDTGTIYSTMSFDREHQTTYTFRVKAVDGGDPPRSATATVSLFVMDENDNAPTVTLPKNISYTLLPPSSNVRTVVATVLATDSDDGINADLNYSIVGGNPFKLFEIDPTSGVVSLVGKLTQKHYGLHRLVVQVNDSGQPSQSTTTLVHVFVNESVSNATAIDSQIARSLHIPLTQDIAGDPSYEISKQRLSIVIGVVAGIMTVILIILIVVMARYCRSKNKNGYEAGKKDHEDFFTPQQHDKSKKPKKDKKNKKSKQPLYSSIVTVEASKPNGQRYDSVNEKLSDSPSMGRYRSVNGGPGSPDLARHYKSSSPLPTVQLHPQSPTAGKKHQAVQDLPPANTFVGAGDNISIGSDHCSEYSCQTNNKYSKQMRLHPYITVFG

SEQ ID NO: 45718 - protein, 862 aa, Homo sapiens
MARDRGQPPKTDKATVVLNIKDENDNVPSIEIRKIGRIPLKDGVANVAEDVLVDTPIALVQVSDRDQGENGVVTCTVVGDVPFQLKPASDTEGDQNKKKYFLHTSTPLDYEATREFNVVIVAVDSGSPSLSSNNSLIVKVGDTNDNPPMFGQSVVEVYFPENNIPGERVATVLATDADSGKNAEIAYSLDSSVMGIFAIDPDSGDILVNTVLDREQTDRYEFKVNAKDKGIPVLQGSTTVIVQVADKNDNDPKFMQDVFTFYVKENLQPNSPVGMVTVMDADKGRNAEMSLYIEENNNIFSIENDTGTIYSTMSFDREHQTTYTFRVKAVDGGDPPRSATATVSLFVMDENDNAPTVTLPKNISYTLLPPSSNVRTVVATVLATDSDDGINADLNYSIVGGNPFKLFEIDPTSGVVSLVGKLTQKHYGLHRLVVQVNDSGQPSQSTTTLVHVFVNESVSNATAIDSQIARSLHIPLTQDIAGDPSYEISKQRLSIVIGVVAGIMTVILIILIVVMARYCRSKNKNGYEAGKKDHEDFFTPQQHDKSKKPKKDKKNKKSKQPLYSSIVTVEASKPNGQRYDSVNEKLSDSPSMGRYRSVNGGPGSPDLARHYKSSSPLPTVQLHPQSPTAGKKHQAVQDLPPANTFVGAGDNISIGSDHCSEYSCQTNNKYSKQPFRRVTFSVVSQPQDPHQGSLQSCYDSGLEESETPSSKSSSGPRLGALPLPEDNYERTTPDGSVDSRPLPDVALTGKCTRECDEYGHSDSCWMPVRTSPERKKSQPKLSTFMPVDERGSQEKLANGEAAIMGDRNRNLLNKKLTSSYETFSAASFSKNEEANPEDIPLTKTGEYKPSPVNTLTRREVYL

SEQ ID NO: 45719 - protein, 1130 aa, Homo sapiens
MLPWVVAEVRRLSRQSTRKEPVTKQVRLCVSPSGLRCEPEPGRSQQWDPLIYSSIFECKPQRVHKLIHNSHDPSYFACLIKEDAVHRQSICYVFKADDQTKVPEIISSIRQAGKIARQEELHCPSEFDDTFSKKFEVLFCGRVTVAHKKAPPALIDECIEKFNHVSGSRGSESPRPNPPHAAPTGSQEPVRRPMRKSFSQPGLRSLAFRKELQDGGLRSSGFFSSFEESDIENHLISGHNIVQPTDIEENRTMLFTIGQSEVYLISPDTKKIALEKNFKEISFCSQGIRHVDHFGFICRESSGGGGFHFVCYVFQCTNEALVDEIMMTLKQAFTVAAVQQTAKAPAQLCEGCPLQSLHKLCERIEGMNSSKTKLELQKHLTTLTNQEQATIFEEVQKLRPRNEQRENELIISFLRCLYEEKQKEHIHIGEMKQTSQMAAENIGSELPPSATRFRLDMLKNKAKRSLTESLESILSRGNKARGLQEHSISVDLDSSLSSTLSNTSKEPSVCEKEALPISESSFKLLGSSEDLSSDSESHLPEEPAPLSPQQAFRRRANTLSHFPIECQEPPQPARGSPGVSQRKLMRYHSVSTETPHERKDFESKANHLGDSGGTPVKTRRHSWRQQIFLRVATPQKACDSSSRYEDYSELGELPPRSPLEPVCEDGPFGPPPEEKKRTSRELRELWQKAILQQILLLRMEKENQKLQASENDLLNKRLKLDYEEITPCLKEVTTVWEKMLSTPGRSKIKFDMEKMHSAVGQGVPRHHRGEIWKFLAEQFHLKHQFPSKQQPKDVPYKELLKQLTSQQHAILIDLGRTFPTHPYFSAQLGAGQLSLYNILKAYSLLDQEVGYCQGLSFVAGILLLHMSEEEAFKMLKFLMFDMGLRKQYRPDMIILQIQMYQLSRLLHDYHRDLYNHLEEHEIGPSLYAAPWFLTMFASQFPLGFVARVFDMIFLQGTEVIFKVALSLLGSHKPLILQHENLETIVDFIKSTLPNLGLVQMEKTINQVFEMDIAKQLQAYEVEYHVLQEELIDSSPLSDNQRMDKLEKTNSSLRKQNLDLLEQLQVANGRIQSLEATIEKLLSSESKLKQAMLTLELERSALLQTVEELRRRSAEPSDREPECTQPEPTGD

SEQ ID NO: 45720 - protein, 1015 aa, Homo sapiens [sequence omitted]

SEQ ID NO: 45721 - protein, 469 aa, Homo sapiens
MCPEIRVTVVDVNESRINAWNSPTLPIYEPGLKEVVESCRGKNLFFSTNIDDAIKEADLVFISVNTPTKTYGMGKGRAADLKYIEACARRIVQNSNGYKIVTEKSTVPVRAAESIRRIFDANTKPNLNLQVLSNPEFLAEGTAIKDLKNPDRVLIGGDETPEGQRAVQALCAVYEHWVPREKILTTNTWSSELSKLAANAFLAQRISSINSISALCEATGADVEEVATAIGMDQRIGNKFLKASVGFGGSCFQKDVLNLVYLCEALNLPEVARYWQQVIDMNDYQRRRFASRIIDSLFNTVTDKKIAILGFAFKKDTGDTRESSSIYISKYLMDEGAHLHIYDPKVPREQIVVDLSHPGVSEDDQVSRLVTISKDPYEACDGAHAVVICTEWDMFKELDYERIHKKMLKPAFIFDGRRVLDGLHNELQTIGFQIETIGKKVSSKRIPYAPSGEIPKFSLQDPPNKKPKV

SEQ ID NO: 45722 - protein, 45 aa, Homo sapiens
MILVAWMVIALILFLLRPPNLRGSSLPGKPTSPHNGQDPPAPPVD

SEQ ID NO: 45723 - protein, 97 aa, Homo sapiens
MTLRTVLLSLQALLAAAEPDDPQDAVVANQYKQNPEMFKQTARLWAHVYAGAPVSSPEYTKKIENLCAMGFDRNAVIVALSSKSWDVETATELLLSN

SEQ ID NO: 45724 - protein, 721 aa, Homo sapiens
MASSGTTDVTNRNSPATPPNTLNLRSSHNELLNAEIKHTETKNSTPPKCRKKYALTNIQAAMGLSDPAAQPLLGNGSANIKLVKNGENQLRKAAEQGQQDPNKNLSPTAVINITSEKLEGKEPHPQDSSSCEILPSQPRRTKSFLNYYADLETSARELEQNRGNHHGTAEEKSQPVQGQASTIIGNGDLLLQKPNRPQSSPEDGQVATVSSSPETKKDHPKTGAKTDCALHRIQNLAPSDEESSWTTLSQDSASPSSPDETADIWSDHSFQTDPDLPPGWKRVSDIAGTYYWHIPTGTTQWERPVSIPADLQGSRKGSLSSVTPSPTPENEDLHAATVNPDPSLKEFEGATLRYASLKLRNAPHPDDDDSCSINSDPEAKCFAVRSLGWVEMAEEDLAPGKSSVAVNNCIRQLSYCKNDIRDTVGIWGEGKDMYLILENDMLSLVDPMDRSVLHSQPIVSIRVWGVGRDNGRDFAYVARDKDTRILKCHVFRCDTPAKAIATSLHEICSKIMAERKNAKALACSSLQERANVNLDVPLQVDFPTPKTELVQKFHVQYLGMLPVDKPVGMDILNSAIENLMTSSNKEDWLSVNMNVADATVTVISEKNEEEVLVECRVRFLSFMGVGKDVHTFAFIMDTGNQRFECHVFWCEPNAGNVSEAVQAACMLRYQKCLVARPPSQKVRPPPPPADSVTRRVTTNVKRGVLSLIDTLKQKRPVTEMP

SEQ ID NO: 45725 - protein, 21 aa, Homo sapiens
MGSLLSRQLIFQIITYFLHHC

SEQ ID NO: 45726 - protein, 229 aa, Homo sapiens [sequence omitted]

SEQ ID NO: 45727 - protein, 324 aa, Homo sapiens
MQEESLRQEYAATTSRRSSGSSCNSTRRGTFSDQELDAQSLDDEDDNMHHAVYPAVNRFSPSPRNSPRPSPKQSPRNSPRSRSPARGIEYSRVSPQPMISRLQQPRLSLQGHPTDLQTSNVKNEEKLRRSLPNLSRTSNTQVDSVKSSRSDSNFQVPNGGIPRMQPQASATSQRLKNLPRTSLKAKQLLQTSSTKRVPSPGKFRSPAAPSPLALRQPVKAFSNHGSGSPGSQEITQLTQTTSSPGPPMVQSTVSANPPSNINSATLTRPAGTTAMRSGLPRPSAPSAGGIPVPRSKLAQPVRRSLPAPKTYGSMKDDSWKDGCY

SEQ ID NO: 45728 - protein, 2978 aa, Homo sapiens
MAEPLEKLLSRSLQRGEDLQFDQLISSMSSVAEHCLPSLLRTLFDWYRRQNGTEDESYEYRPRSSTKSKGDEQQRERDYLLERRDLAVDFIFCLVLVEVLKQIPVHPVPDPLVHEVLNLAFKHFKHKEGYSGTNTGNVHIIADLYAEVIGVLAQSKFQAVRKKFVTELKELRQKEQSPHVVQSVISLIMGMKFFRVKMYPVEDFEASFQFMQECAQYFLEVKDKDIKHALAGLFVEILIPVAAAVKNEVNVPCLKNFVEMLYQTTFELSSRKKHSLALYPLITCLLCVSQKQFFLNNWHIFLQNCLSHLKNKDPKMSRVALESLYRLLWVYVIRIKCESNTVTQSRLMSIVSALFPKGSRSVVPRDTPLNIFVKIIQFIAQERLDFAMKEIIFDLLSVGKSTKTFTINPERMNIGLRVFLVIADSLQQKDGEPPMPTTGVILPSGNTLRVKKIFLNKTLTDEEAKVIGMSVYYPQVRKALDSILRHLDKEVGRPMCMTSVQMSNKEPEDMITGERKPKIDLFRTCIAAIPRLIPDGMSRTDLIELLARLTIHMDEELRALAFNTLQALMLDFPDWREDVLSGFVYFIVREVTDVHPTLLDNAVKMLVQLINQWKQAAQMHNKNQDTQHGVANGASHPPPLERSPYSNVFHVVEGFALVILCSSRPATRRLAVSVLREIRALFALLEIPKGDDELAIDVMDRLSPSILESFIHLTGADQTTLLYCPSSIDLQTLAEWNSSPISHQFDVISPSHIWIFAHVTQGQDPWIISLSSFLKQENLPKHCSTAVSYAWMFAYTRLQLLSPQVDINSPINAKKVNTTTSSDSYIGLWRNYLILCCSAATSSSSTSAGSVRCSPPETLASTPDSGYSIDSKIIGIPSPSSLFKHIVPMMRSESMEITESLVLGLGRTNPGAFRELIEELHPIIKEALERRPENMKRRRRRDILRVQLVRIFELLADAGVISHSASGGLDNETHFLNNTLLEYVDLTRQLLEAENEKDSDTLKDIRCHFSALVANIIQNVPVHQRRSIFPQQSLRHSLFMLFSHWAGPFSIMFTPLDRYSDRNMQINRHQYCALKAMSAVLCCGPVADNVGLSSDGYLYKWLDNILDSLDKKVHQLGCEAVTLLLELNPDQSNLMYWAVDRCYTGSGRVAAGCFKAIANVFQNRDYQCDTVMLLNLILFKAADSSRSIYEVAMQLLQILEPKMFRYAHKLEVQRTDGVLSQLSPLPHLYSVSYYQLSEELARAYPELTLAIFSEISQRIQTAHPAGRQVMLHYLLPWMNNIELVDLKPLPTARRHDEDEDDSLKDRELMVTSRRWLRGEGWGSPQATAMVLNNLMYMTAKYGDELAWSEVENVWTTLADGWPKNLKIILHFLISICGVNSEPSLLPYVKKVIVYLGRDKTMQLLEELVSELQLTDPVSSGVTHMDNPPYYRITSSYKIPSVTSGTTSSSNTMVAPTDGNPDNKPIKENIEESYVHLDIYSGLNSHLNRQHHRLESRYSSSSGGSYEEEKSDSMPLYSNWRLKVMEHNQGEPLPFPPAGGCWSPLVDYVPETSSPGLPLHRCNIAVILLTDLIIDHSVKVEWGSYLHLLLHAIFIGFDHCHPEVYEHCKRLLLHLLIVMGPNSNIRTVASVLLRNKEFNEPRVLTVKQVAHLDYNFTAGINDFIPDYQPSPMTDSGLSSSSTSSSISLGNNSAAISHLHTTILNEVDISVEQDGKVKTLMEFITSRKRGPLWNHEDVSAKNPSIKSAEQLTTFLKHVVSVFKQSSSEGIHLEHHLSEVALQTALSCSSRHYAGRSFQIFRALKQPLTATTLSDVLSRLVETVGDPGEDAQGFVIELLLTLESAIDTLAETMKHYDLLSALSQTSYHDPIMGNKYAANRKSTGQLNLSTSPINSSSYLGYNSNARSNSLRLSLIGDRRGDRRRSNTLDIMDGRINHSSSLARTRSLSSLREKGMYDVQSTTEPTNLMATIFWIAASLLESDYEYEYLLALRLLNKLLIHLPLDKSESREKIENVQSKLKWTNFPGLQQLFLKGFTSASTQEMTVHLLSKLISVSKHTLVDPSQLSGFPLNILCLLPHLIQHFDSPTQFCKETASRIAKVCAEEKCPTLVNLAHMMSLYSTHTYSRDCSNWINVVCRYLHDSFSDTTFNLVTYLAELLEKGLSSMQQSLLQIIYSLLSHIDLSAAPAKQFNLEIIKIIGKYVQSPYWKEALNILKLVVSRSASLVVPSDIPKTYGGDTGSPEISFTKIFNNVSKELPGKTLDFHFDISETPIIGNKYGDQHSAAGRNGKPKVIAVTRSTSSTSSGSNSNALVPVSWKRPQLSQRRTREKLMNVLSLCGPESGLPKNPSVVFSSNEDLEVGDQQTSLISTTEDINQEEEVAVEDNSSEQQFGVFKDFDFLDVELEDAEGESMDNFNWGVRRRSLDSIDKGDTPSLQEYQCSSSTPSLNLTNQEDTDESSEEEAALTASQILSRTQMLNSDSATDETIPDHPDLLLQSEDSTGSITTEEVLQIRDETPTLEASLDNANSRLPEDTTSVLKEEHVTTFEDEGSYIIQEQQESLVCQGILDLEETEMPEPLAPESYPESVCEEDVTLALKELDERCEEEEADFSGLSSQDEEEQDGFPEVQTSPLPSPFLSAIIAAFQPVAYDDEEEAWRCHVNQMLSDTDGSSAVFTFHVFSRLFQTIQRKFGEITNEAVSFLGDSLQRIGTKFKSSLEVMMLCSECPTVFVDAETLMSCGLLETLKFGVLELQEHLDTYNVKREAAEQWLDDCKRTFGAKEDMYRINTDAQQMEILAELELCRRLYKLHFQLLLLFQAYCKLINQVNTIKNEAEVINMSEELAQLESILKEAESASENEEIDISKAAQTTIETAIHSLIETLKNKEFISAVAQVKAFRSLWPSDIFGSCEDDPVQTLLHIYFHHQTLGQTGSFAVIGSNLDMSEANYKLMELNLEIRESLRMVQSYQLLAQAKPMGNMVSTGF

SEQ ID NO: 45729 - protein, 28 aa, Homo sapiens
MNGRADFREPNAEVPRPIPRNYLLSIYN

SEQ ID NO: 45730 - protein, 152 aa, Homo sapiens
MLVLAWKLDAQNMGYFTLQEWLKGMTSLQCDTTEKLRNTLDYLRSFLNDSTNFKLIYRYAFDFAREKDQRSLDINTAKCMLGLLLGKIWPLFPVFHQFLEQSKYKVINKDQWCNVLEFSRTINLDLSNYDEDGAWPVLLDEFVEWYKDKQMS

SEQ ID NO: 45731 - protein, 117 aa, Homo sapiens
MLVLAWKLDAQNMGYFTLQEWLKGMTSLQCDTTEKLRNTLDYLRSFLNDSTNFKLIYRYAFDFARQSKYKVINKDQWCNVLEFSRTINLDLSNYDEDGAWPVLLDEFVEWYKDKQMS

SEQ ID NO: 45732 - protein, 339 aa, Homo sapiens
MGLEVIPVTSTTNKITVQQGRTGNSEKETALPSTKAEFTSPPSLFKTGLPPSRRLPGAIDVIGQTITISRVEGRRRANENSNIQVLSERSATEVDNNFSKPPPFFPPGAPPTHLPPPPFLPPPPTVSTAPPLIPPPGFPPPPGAPPPSLIPTIESGHSSGYDSRSARAFPYGNVAFPHLPGSAPSWPSLVDTSKQWDYYARREKDRDRERDRDRERDRDRDRERERTRERERERDHSPTPSVFNSDEERYRYREYAERGYERHRASREKEERHRERRHREKEETRHKSSRSNSRRRHESEEGDSHRRHKHKKSKRSKEGKEAGSEPAPEQESTEATPAE

SEQ ID NO: 45733 - protein, 398 aa, Homo sapiens
MGLEVIPVTSTTNKITAEDCTMEVTPGAEIQDGRFNLFKVQQGRTGNSEKETALPSTKAEFTSPPSLFKTGLPPSRNSTSSQSQTSTASRKANSSVGKWQDRYGRAESPDLRRLPGAIDVIGQTITISRVEGRRRANENSNIQVLSERSATEVDNNFSKPPPFFPPGAPPTHLPPPPFLPPPPTVSTAPPLIPPPGFPPPPGAPPPSLIPTIESGHSSGYDSRSARAFPYGNVAFPHLPGSAPSWPSLVDTSKQWDYYARREKDRDRERDRDRERDRDRDRERERTRERERERDHSPTPSVFNSDEERYRYREYAERGYERHRASREKEERHRERRHREKEETRHKSSRSNSRRRHESEEGDSHRRHKHKKSKRSKEGKEAGSEPAPEQESTEATPAE

SEQ ID NO: 45734 - protein, 407 aa, Homo sapiens
MGLEVIPVTSTTNKITAEDCTMEVTPGAEIQDGRFNLFKVQQGRTGNSEKETALPSTKAEFTSPPSLFKTGLPPSRNSTSSQSQTSTASRKANSSVGKWQDRYGRAESPDLRRLPGAIDVIGQTITISRVEGRRRANENSNIQVLSERSATEVDNNFSKPPPFFPPGAPPTHLPPPPFLPPPPTVSTAPPLIPPPGIPITVPPPGFPPPPGAPPPSLIPTIESGHSSGYDSRSARAFPYGNVAFPHLPGSAPSWPSLVDTSKQWDYYARREKDRDRERDRDRERDRDRDRERERTRERERERDHSPTPSVFNSDEERYRYREYAERGYERHRASREKEERHRERRHREKEETRHKSSRSNSRRRHESEEGDSHRRHKHKKSKRSKEGKEAGSEPAPEQESTEATPAE

SEQ ID NO: 45735 - protein, 375 aa, Homo sapiens
MGLEVIPVTSTTNKITVQQGRTGNSEKETALPSTKAEFTSPPSLFKTGLPPSRNSTSSQSQTSTASRKANSSVGKWQDRYGRAESPDLRRLPGAIDVIGQTITISRVEGRRRANENSNIQVLSERSATEVDNNFSKPPPFFPPGAPPTHLPPPPFLPPPPTVSTAPPLIPPPGFPPPPGAPPPSLIPTIESGHSSGYDSRSARAFPYGNVAFPHLPGSAPSWPSLVDTSKQWDYYARREKDRDRERDRDRERDRDRDRERERTRERERERDHSPTPSVFNSDEERYRYREYAERGYERHRASREKEERHRERRHREKEETRHKSSRSNSRRRHESEEGDSHRRHKHKKSKRSKEGKEAGSEPAPEQESTEATPAE

SEQ ID NO: 45736 - protein, 205 aa, Homo sapiens
MAMRYNRLTVLAGAMLALGLMTCLSVLFGYATTVIPRVYTYYVSTVLFAIFGIRMLREGLKMSPDEGQEELEEVQAELKKKDEEFQRTKLLNGPGDVETGTSITVPQKKWLHFISPIFVQALTLTFLAEWGDRSQLTTIVLAAREDPYGVAVGGTVGHCLCTGLAVIGGRMIAQKISVRTVTIIGGIVFLAFAFSALFISPDSGF

SEQ ID NO: 45737 - protein, 787 aa, Homo sapiens
MLPGNARKMDKSTVLQKSIDFLRKHKEITAQSDASEIRQDWKPTFLSNEEFTQLMLEALDGFFLAIMTDGSIIYVSESVTSLLEHLPSDLVDQSIFNFIPEGEHSEVYKILSTHLLESDSLTPEYLKSKNQLEFCCHMLRGTIDPKEPSTYEYVKFIGNFKSLNSVSSSAHNGFEGTIQRTHRPSYEDRVCFVATVRLATPQFIKEMCTVEEPNEEFTSRHSLEWKFLFLDHRAPPIIGYLPFEVLGTSGYDYYHVDDLENLAKCHEHLMQYGKGKSCYYRFLTKGQQWIWLQTHYYITYHQWNSRPEFIVCTHTVVSYAEVRAERRRELGIEESLPETAADKSQDSGSDNRINTVSLKEALERFDHSPTPSASSRSSRKSSHTAVSDPSSTPTKIPTDTSTPPRQHLPAHEKMVQRRSSFSSQSINSQSVGSSLTQPVMSQATNLPIPQGMSQFQFSAQLGAMQHLKDQLEQRTRMIEANIHRQQEELRKIQEQLQMVHGQGLQMFLQQSNPGLNFGSVQLSSGNSSNIQQLAPINMQGQVVPTNQIQSGMNTGHIGTTQHMIQQQTLQSTSTQSQQNVLSGHSQQTSLPSQTQSTLTAPLYNTMVISQPAAGSMVQIPSSMPQNSTQSAAVTTFTQDRQIRFSQGQQLVTKLVTAPVACGAVMVPSTMLMGQVVTAYPTFATQQQQSQTLSVTQQQQQQSSQEQQLTSVQQPSQAQLTQPPQQFLQTSRLLHGNPSTQLILSAAFPLQQSTFPQSHHQQHQSQQQQQLSRHRTDSLPDPSKVQPQ

SEQ ID NO: 45738 - protein, 20 aa, Homo sapiens
MPLDNSTVLLNESLELGKSH

SEQ ID NO: 45739 - protein, 1084 aa, Homo sapiens
MDRVAVCFDECNNQLPVYYTYKTVVNAASELSNFLLLHCDFQGIREIGLYCQPGIDLPSWILGILQVPAAYVPIEPDSPPSLSTHFMKKCNLKYILVEKKQINKFKSFHETLLNYDTFTVEHNDLVLFRLHWKNTEVNLMLNDGKEKYEKEKIKSISSEHVNEEKAEEHMDLRLKHCLAYVLHTSGTTGIPKIVRVPHKCIVPNIQHFRVLFDITQEDVLFLASPLTFDPSVVEIFLALSSGASLLIVPTSVKLLPSKLASVLFSHHRVTVLQATPTLLRRFGSQLIKSTVLSATTSLRVLALGGEAFPSLTVLRSWRGEGNKTQIFNVYGITEVSSWATIYRIPEKTLNSTLKCELPVQLGFPLLGTVVEVRDTNGFTIQEGSGQVFLGGRNRVCFLDDEVTVPLGTMRATGDFVTVKDGEIFFLGRKDSQIKRHGKRLNIELVQQVAEELQQVESCAVTWYNQEKLILFMVSKDASVKEYIFKELQKYLPSHAVPDELVLIDSLPFTSHGKIDVSELNKIYLNYINLKSENKLSGKEDLWEKLQYLWKSTLNLPEDLLRVPDESLFLNSGGDSLKSIRLLSEIEKLVGTSVPGLLEIILSSSILEIYNHILQTVVPDEDVTFRKSCATKRKLSDINQEEASGTSLHQKAIMTFTCHNEINAFVVLSRGSQILSLNSTRFLTKLGHCSSACPSDSVSQTNIQNLKGLNSPVLIGKSKDPSCVAKVSEEGKPAIGTQKMELHVRWRSDTGKCVDASPLVVIPTFDKSSTTVYIGSHSHRMKAVDFYSGKVKWEQILGDRIESSACVSKCGNFIVVGCYNGLVYVLKSNSGEKYWMFTTEDAVKSSATMDPTTGLIYIGSHDQHAYALDIYRKKCVWKSKCGGTVFSSPCLNLIPHHLYFATLGGLLLAVNPATGNVIWKHSCGKPLFSSPQCCSQYICIGCVDGNLLCFTHFGEQVWQFSTSGPIFSSPCTSPSEQKIFFGSHDCFIYCCNMKGHLQWKFETTSRVYATPFAFHNYNGSNEMLLAAASTDGKVWILESQSGQLQSVYELPGEVFSSPVVLESMLIIGCRDNYVYCLDLLGGNQK

SEQ ID NO: 45740 - protein, 451 aa, Homo sapiens [sequence omitted]

SEQ ID NO: 45741 - protein, 440 aa, Homo sapiens [sequence omitted]

SEQ ID NO: 45742 - protein, 1068 aa, Homo sapiens
MYDLHDLSKAELAAPQLIMLANVALTGEVNGSCCDYLVGEERQMAELMPVGDNNFSDSEEGEGLEESADIKGEPHGLENMELRSLELSVVEPQPVFEASGAPDIYSSNKDLPPETPGAEDKGKSSKTKPFRCKPCQYEAESEEQFVHHIRVHSAKKFFVEESAEKQAKARESGSSTAEEGDFSKGPIRCDRCGYNTNRYDHYTAHLKHHTRAGDNERVYKCIICTYTTVSEYHWRKHLRNHFPRKVYTCGKCNYFSDRKNNYVQHVRTHTGERPYKCELCPYSSSQKTHLTRHMRTHSGEKPFKCDQCSYVASNQHEVTRHARQVHNGPKPLNCPHCDYKTADRSNFKKHVELHVNPRQFNCPVCDYAASKKCNLQYHFKSKHPTCPNKTMDVSKVKLKKTKKREADLPDNITNEKTEIEQTKIKGDVAGKKNEKSVKAEKRDVSKEKKPSNNVSVIQVTTRTRKSVTEVKEMDVHTGSNSEKFSKTKKSKRKLEVDSHSLHGPVNDEESSTKKKKKVESKSKNNSQEVPKGDSKVEENKKQNTCMKKSTKKKTLKNKSSKKSSKPPQKEPVEKGSAQMDPPQMGPAPTEAVQKGPVQVEPPPPMEHAQMEGAQIRPAPDEPVQMEVVQEGPAQKELLPPVEPAQMVGAQIVLAHMELPPPMETAQTEVAQMGPAPMEPAQMEVAQVESAPMQVVQKEPVQMELSPPMEVVQKEPVQIELSPPMEVVQKEPVKIELSPPIEVVQKEPVQMELSPPMGVVQKEPAQREPPPPREPPLHMEPISKKPPLRKDKKEKSNMQSERARKEQVLIEVGLVPVKDSWLLKESVSTEDLSPPSPPLPKENLREEASGDQKLLNTGEGNKEAPLQKVGAEEADESLPGLAANINESTHISSSGQNLNTPEGETLNGKHQTDSIVCEMKMDTDQNTRENLTGINSTVEEPVSPMLPPSAVEEREAVSKTALASPPATMAANESQEIDEDEGIHSHEGSDLSDNMSEGSDDSGLHGARPVPQESSRKNAKEALAVKAAKGDFVCIFCDRSFRKGKDYSKHLNRHLVNVYYLEEAAQGQE

SEQ ID NO: 45743 - protein, 1020 aa, Homo sapiens
MLRSTYCLLNGLTDRDLCELNECPLDPGGYFIINGSEKVLIAQEKMATNTVYVFAKKDSKYAYTGECRSCLENSSRPTSTIWVSMLARGGQGAKKSAIGQRIVATLPYIKQEVPIIIVFRALGFVSDRDILEHIIYDFEDPEMMEMVKPSLDEAFVIQEQNVALNFIGSRGAKPGVTKEKRIKYAKEVLQKEMLPHVGVSDFCETKKAYFLGYMVHRLLLAALGRRELDDRDHYGNKRLDLAGPLLAFLFRGMFKNLLKEVRIYAQKFIDRGKDFNLELAIKTRIISDGLKYSLATGNWGDQKKAHQARAGVSQVLNRLTFASTLSHLRRLNSPIGRDGKLAKPRQLHNTLWGMVCPAETPEGHAVGLVKNLALMAYISVGSQPSPILEFLEEWSMENLEEISPAAIADATKIFVNGCWVGIHKDPEQLMNTLRKLRRQMDIIVSEVSMIRDIREREIRIYTDAGRICRPLLIVEKQKLLLKKRHIDQLKEREYNNYSWQDLVASGVVEYIDTLEEETVMLAMTPDDLQEKEVAYCSTYTHCEIHPSMILGVCASIIPFPDHNQSPRNTYQSAMGKQAMGVYITNFHVRMDTLAHVLYYPQKPLVTTRSMEYLRFRELPAGINSIVAIASYTGYNQEDSVIMNRSAVDRGFFRSVFYRSYKEQESKKGFDQEEVFEKPTRETCQGMRHAIYDKLDDDGLIAPGVRVSGDDVIIGKTVTLPENEDELESTNRRYTKRDCSTFLRTSETGIVDQVMVTLNQEGYKFCKIRVRSVRIPQIGDKFASRHGQKGTCGIQYRQEDMPFTCEGITPDIIINPHAIPSRMTIGHLIECLQGKVSANKGEIGDATPFNDAVNVQKISNLLSDYGYHLRGNEVLYNGFTGRKITSQIFIGPTYYQRLKHMVDDKIHSRARGPIQILNRQPMEGRSRDGGLRFGEMERDCQIAHGAAQFLRERLFEASDPYQVHVCNLCGIMAIANTRTHTYECRGCRNKTQISLVRMPYACKLLFQELMSMSIAPRMMSV

SEQ ID NO: 45744 - protein, 752 aa, Homo sapiens
MLPSSTEVSVKTKKRLNFDDKVMLKKIEIDNKVSDEEDKTSEGQERKPSGSSQNRIRDSEYEIQRQAKKSFSTLFLETVKRKSESSPIVRHAATAPPHSCPPDDTKLIEDEFIIDESDQSFASRSWITIPRKAGSLKQRTISPAESTALLQGRKSREKHHNILPKTLANDKHSHKPHPVETSQPSDKTVLDTSYALIGETVNNYRSTKYEMYSKNAEKPSRSKRTIKQKQRRKFMAKPAEEQLDVGQSKDENIHTSHITQDEFQRNSDRNMEEHEEMGNDCVSKKQMPPVGSKKSSTRKDKEESKKKRFSSESKNKLVPEEVTSTVTKSRRISRRPSDWWVVKSEESPVYSNSSVRNELPMHHNSSRKSTKKTNQSSKNIRKKTIPLKRQKTATKGNQRVQKFLNAEGSGGIVGHDEISRCSLSEPLESDEADLAKKKNLDCSRSTRSSKNEDNIMTAQNVPLKPQTSGYTCNIPTESNLDSGEHKTSVLEESGPSRLNNNYLMSGKNDVDDEEVHGSSDDSKQSKVIPKNRIHHKLVLPSNTPNVRRTKRTRLKPLEYWRGERIDYQGRPSGGFVISGVLSPDTISSKRKAKENIGKVNKKSNKKRICLDNDERKTNLMVNLGIPLGDPLQPTRVKDPETREIILMDLVRPQDTYQFFVKHGELKVYKTLDTPFFSTGKLILGPQEEKGKQHVGQDILVFYVNFGDLLCTLHETPYILSTGDSFYVPSGNYYNIKNLRNEESVLLFTQIKR

SEQ ID NO: 45745 - protein, 994 aa, Homo sapiens
MAKSHVFLSGMGGLGLEIAKNLVLAGIKAVTIHDTEKCQAWDLGTNFFLSEDDVVNKRNRAEAVLKHIAELNPYVHVTSSSVPFNETTDLSFLDKYQCVVLTEMKLPLQKKINDFCRSQCPPIKFISADVHGIWSRLFCDFGDEFEVLDTTGEEPKEIFISNITQANPGIVTCLENHPHKLETGQFLTFREINGMTGLNGSIQQITVISPFSFSIGDTTELEPYLHGGIAVQVKTPKTVFFESLERQLKHPKCLIVDFSNPEAPLEIHTAMLALDQFQEKYSRKPNVGCQQDSEELLKLATSISETLEEKPDVNADIVHWLSWTAQGFLSPLAAAVGGVASQEVLKAVTGKFSPLCQWLYLEAADIVESLGKPECEEFLPRGDRYDALRACIGDTLCQKLQNLNIFLVGCGAIGCEMLKNFALLGVGTSKEKGMITVTDPDLIEKSNLNRQFLFRPHHIQKPKSYTAADATLKINSQIKIDAHLNKVCPTTETIYNDEFYTKQDVIITALDNVEARRYVDSRCLANLRPLLDSGTMGTKGHTEVIVPHLTESYNSHRDPPEEEIPFCTLKSFPAAIEHTIQWARDKFESSFSHKPSLFNKFWQTYSSAEEVLQKIQSGHSLEGCFQVIKLLSRRPRNWSQCVELARLKFEKYFNHKALQLLHCFPLDIRLKDGSLFWQSPKRPPSPIKFDLNEPLHLSFLQNAAKLYATVYCIPFAEEDLSADALLNILSEVKIQEFKPSNKVVQTDETARKPDHVPISSEDERNAIFQLEKAILSNEATKSDLQMAVLSFEKDDDHNGHIDFITAASNLRAKMYSIEPADRFKTKRIAGKIIPAIATTTATVSGLVALEMIKVTGGYPFEAYKNCFLNLAIPIVVFTETTEVRKTKIRNGISFTIWDRWTVHGKEDFTLLDFINAVKEKYGIEPTMVVQGVKMLYVPVMPGHAKRLKLTMHKLVKPTTEKKYVDLTVSFAPDIDGDEDLPGPPVRYYFSHDTD

SEQ ID NO: 45746 - protein, 331 aa, Homo sapiens
MAKSHVFLSGMGGLGLEIAKNLVLAGIKAVTIHDTEKCQAWDLGTNFFLSEDDVVNKRNRAEAVLKHIAELNPYVHVTSSSVPFNETTDLSFLDKYQCVVLTEMKLPLQKKINDFCRSQCPPIKFISADVHGIWSRLFCDFGDEFEVLDTTGEEPKEIFISNITQANPGIVTCLENHPHKLETGQFLTFREINGMTGLNGSIQQITVISPFSFSIGDTTELEPYLHGGIAVQVKTPKTVFFESLERQLKHPKCLIVDFSNPEAPLEIHTAMLALDQFQEKYSRKPNVGCQQDSEELLKLATSISETLEEKVTIEIYGCPNICLLIHKCSVY

SEQ ID NO: 45747 - protein, 676 aa, Homo sapiens
MESTDTKRQKPSVHSRQLVSKPLSSSVSNNKRIVSTKGKSATEYKNEEYQRSERNKRLDADRKIRLSSSASREPYKNQPEKTCVRKRDPERRAKSPTPDGSERIGLEVDRRASRSSQSSKEEVNSEEYGSDHETGSSGSSDEQGNNTENEEEGVEEDVEEDEEVEEDAEEDEEVDEDGEEEEEEEEEEEEEEEEEEEEYEQDERDQKEEGNDYDTRSEASDSGSESVSFTDGSVRSGSGTDGSDEKKKERKRARGISPIVFDRSGSSASESYAGSEKKHEKLSSSVRAVRKDQTSKLKYVLQDARFFLIKSNNHENVSLAKAKGVWSTLPVNEKKLNLAFRSARSVILIFSVRESGKFQGFARLSSESHHGGSPIHWVLPAGMSAKMLGGVFKIDWICRRELPFTKSAHLTNPWNEHKPVKIGRDGQEIELECGTQLCLLFPPDESIDLYQVIHKMRHKRRMHSQPRSRGRPSRREPVRDVGRRRPEDYDIHNSRKKPRIDYPPEFHQRPGYLKDPRYQEVDRRFSGVRRDVFLNGSYNDYVREFHNMGPPPPWQGMPPYPGMEQPPHHPYYQHHAPPPQAHPPYSGHHPVPHEARYRDKRVHDYDMRVDDFLRRTQAVVSGRRSRPRERDRERERDRPRDNRRDRERDRGRDRERERERLCDRDRDRGERGRYRR

SEQ ID NO: 45748 - protein, 684 aa, Homo sapiens
MESTDTKRQKPSVHSRQLVSKPLSSSVSNNKRIVSTKGKSATEYKNEEYQRSERNKRLDADRKIRLSSSASREPYKNQPEKTCVRKRDPERRAKSPTPDGSERIGLEVDRRASRSSQSSKEEVNSEEYGSDHETGSSGSSDEQGNNTENEEEGVEEDVEEDEEVEEDAEEDEEVDEDGEEEEEEEEEEEEEEEEEEEEYEQDERDQKEEGNDYDTRSEASDSGSESVSFTDGSVRSGSGTDGSDEKKKERKRARGISPIVFDRSGSSASESYAGSEKKHEKLSSSVRAVRKDQTSKLKYVLQDARFFLIKSNNHENVSLAKAKGVWSTLPVNEKKLNLAFRSARSVILIFSVRESGKFQGFARLSSESHHGGSPIHWVLPAGMSAKMLGGVFKIDWICRRELPFTKSAHLTNPWNEHKPVKIGRDGQEIELECGTQLCLLFPPDESIDLYQVIHKMRHKRRMHSQPRSRGRPSRREPVRDVGRRRPEDYDIHNSRKKPRIDYPPEFHQRPGYLKDPRYQEVDSFTNLIPNRRFSGVRRDVFLNGSYNDYVREFHNMGPPPPWQGMPPYPGMEQPPHHPYYQHHAPPPQAHPPYSGHHPVPHEARYRDKRVHDYDMRVDDFLRRTQAVVSGRRSRPRERDRERERDRPRDNRRDRERDRGRDRERERERLCDRDRDRGERGRYRR

SEQ ID NO: 45749 - protein, 38 aa, Homo sapiens
MHSQPRSRGRPSRREPVRDVGRLETFFGLIIGTCIRIT

SEQ ID NO: 45750 - protein, 281 aa, Homo sapiens [sequence omitted]

SEQ ID NO: 45751 - protein, 102 aa, Homo sapiens
MSFLFGSRSSKTFKPKKNIPEGSHQYELLKHAEATLGSGNLRMAVMLPEGEDLNEWVAVNTVDFFNQINMLYGTITDFCTEESCPVMSAGPNCREVNICEYP

SEQ ID NO: 45752 - protein, 176 aa, Homo sapiens
MYEKPERWSFTFQTYACLSRIRAQLASLNGKLKDAEKPVLFFERSVYSDRYIFASNLYESECMNETEWTIYQDWHDWMNNQFGQSLELDGIIYLQATPETCLHRIYLRGRNEEQGIPLEYLEKLHYKHESWLLHRTLKTNFDYLQEVPILTLDVNEDFKDKYESLVEKVKEFLSTL

SEQ ID NO: 45753 - protein, 506 aa, Homo sapiens
MIVDHQIETGLLKPELKDKVTYTLLRKHRHQTKKSNLRSLADIGKTVSSASRMFTNPDNGSPAMTHRNLTSSSLNDISDKPEKDQLKNKFMKKLPRDAEASNVLVGEVDFLDTPFIAFVRLQQAVMLGALTEVPVPTRFLFILLGPKGKAKSYHEIGRAIATLMSDEVFHDIAYKAKDRHDLIAGIDEFLDEVIVLPPGEWDPAIRIEPPKSLPSSDKRKNMYSGGENVQMNGDTPHDGGHGGGGHGDCEELQRTGRFCGGLIKDIKRKAPFFASDFYDALNIQALSAILFIYLATVTNAITFGGLLGDATDNMQGVLESFLGTAVSGAIFCLFAGQPLTILSSTGPVLVFERLLFNFSKDNNFDYLEFRLWIGLWSAFLCLILVATDASFLVQYFTRFTEEGFSSLISFIFIYDAFKKMIKLADYYPINSNFKVGYNTLFSCTCVPPDPGEGITLCVYARFVFGGRCRLHACKFSTCCHGPQELVLFFSLKNSATEFDVSLPEVF

SEQ ID NO: 45754 - protein, 2550 aa, Homo sapiens
MVRVCDLLLKKKPPQQQHHKAKRNRTCRPPSSSESSSDSDNSGGGGGGGGGGGGGGGTSSNNSEEEEDDDDEEEEVSEVESFILDQDDLENPMLETASKLLLSGTADGADLRTVDPETQARLEALLEAAGIGKLSTADGKAFADPEVLRRLTSSVSCALDEAAAALTRMRAESTANAGQSDNRSLAEACSEGDVNAVRKLLIEGRSVNEHTEEGESLLCLACSAGYYELAQVLLAMHANVEDRGIKGDITPLMAAANGGHVKIVKLLLAHKADVNAQSSTGNTALTYACAGGYVDVVKVLLESGASIEDHNENGHTPLMEAGSAGHVEVARLLLENGAGINTHSNEFKESALTLACYKGHLEMVRFLLEAGADQEHKTDEMHTALMEACMDGHVEVARLLLDSGAQVNMPADSFESPLTLAACGGHVELAALLIERGASLEEVNDEGYTPLMEAAREGHEEMVALLLGQGANINAQTEETQETALTLACCGGFLEVADFLIKAGADIELGCSTPLMEAAQEGHLELVKYLLAAGANVHATTATGDTALTYACENGHTDVADVLLQAGADLEHESEGGRTPLMKAARAGHVCTVQFLISKGANVNRTTANNDHTVLSLACAGGHLAVVELLLAHGADPTHRLKDGSTMLIEAAKGGHTSVVCYLLDYPNNLLSAPPPDVTQLTPPSHDLNRAPRVPVQALPMVVPPQEPDKPPANVATTLPIRNKAASKQKSSSHLPANSQDVQGYITNQSPESIVEEAQGKLTELEQRIKEAIEKNAQLQSLELAHADQLTKEKIEELNKTREEQIQKKQKILEELQKVERELQLKTQQQLKKQYLEVKAQRIQLQQQQQQSCQHLGLLTPVGVGEQLSEGDYARLQQVDPVLLKDEPQQTAAQMGFAPIQPLAMPQALPLAAGPLPPGSIANLTELQGVIVGQPVLGQAQLAGLGQGILTETQQGLMVASPAQTLNDTLDDIMAAVSGRASAMSNTPTHSIAASISQPQTPTPSPIISPSAMLPIYPAIDIDAQTESNHDTALTLACAGGHEELVQTLLERGASIEHRDKKGFTPLILAATAGHVGVVEILLDNGADIEAQSERTKDTPLSLACSGGRQEVVELLLARGANKEHRNVSDYTPLSLAASGGYVNIIKILLNAGAEINSRTGSKLGISPLMLAAMNGHTAAVKLLLDMGSDINAQIETNRNTALTLACFQGRTEVVSLLLDRKANVEHRAKTGLTPLMEAASGGYAEVGRVLLDKGADVNAPPVPSSRDTALTIAADKGHYKFCELLIGRGAHIDVRNKKGNTPLWLAANGGHLDVVQLLVQAGADVDAADNRKITPLMAAFRKGHVKVVRYLVKEVNQFPSDSECMRYIATITDKEMLKKCHLCMESIVQAKDRQAAEANKNASILLEELDLEKLREESRRLALAAKREKRKEKRRKKKEEQRRKLEEIEAKNKENFELQAAQEKEKLKVEDEPEVLTEPPSATTTTTIGISATWTTLAGSHGKRNNTITTTSSKRKNRKNKITPENVQIIFDDPLPISYSQPEKVNGESKSSSTSESGDSDNMRISSCSDESSNSNSSRKSDNHSPAVVTTTVSSKKQPSVLVTFPKEERKSVSGKASIKLSETISEGTSNSLSTCTKSGPSPLSSPNGKLTVASPKRGQKREEGWKEVVRRSKKVSVPSTVISRVIGRGGCNINAIREFTGAHIDIDKQKDKTGDRIITIRGGTESTRQATQLINALIKDPDKEIDELIPKNRLKSSSANSKIGSSAPTTTAANTSLMGIKMTTVALSSTSQTATALTVPAISSASTHKTIKNPVNNVRPGFPVSLPLAYPPPQFAHALLAAQTFQQIRPPRLPMTHFGGTFPPAQSTWGPFPVRPLSPARATNSPKPHMVPRHSNQNSSGSQVNSAGSLTSSPTTTTSSSASTVPGTSTNGSPSSPSVRRQLFVTVVKTSNATTTTVTTTASNNNTAPTNATYPMPTAKEHYPVSSPSSPSPPAQPGGVSRNSPLDCGSASPNKVASSSEQEAGSPPVVETTNTRPPNSSSSSGSSSAHSNQQQPPGSVSQEPRPPLQQSQVPPPEVRMTVPPLATSSAPVAVPSTAPVTYPMPQTPMGCPQPTPKMETPAIRPPPHGTTAPHKNSASVQNSSVAVLSVNHIKRPHSVPSSVQLPSTLSTQSACQNSVHPANKPIAPNFSAPLPFGPFSTLFENSPTSAHAFWGGSVVSSQSTPESMLSGKSSYLPNSDPLHQSDTSKAPGFRPPLQRPAPSPSGIVNMDSPYGSVTPSSTHLGNFASNISGGQMYGPGAPLGGAPAAANFNRQHFSPLSLLTPCSSASNDSSAQSVSSGVRAPSPAPSSVPLGSEKPSNVSQDRKVPVPIGTERSARIRQTGTSAPSVIGSNLSTSVGHSGIWSFEGIGGNQDKVDWCNPGMGNPMIHRPMSDPGVFSQHQAMERDSTGIVTPSGTFHQHVPAGYMDFPKVGGMPFSVYGNAMIPPVAPIPDGAGGPIFNGPHAADPSWNSLIKMVSSSTENNGPQTVWTGPWAPHMNSVHMNQLG

SEQ ID NO: 45755 - protein, 2457 aa, Homo sapiens
MLETASKLLLSGTADGADLRTVDPETQARLEALLEAAGIGKLSTADGKAFADPEVLRRLTSSVSCALDEAAAALTRMRAESTANAGQSDNRSLAEACSEGDVNAVRKLLIEGRSVNEHTEEGESLLCLACSAGYYELAQVLLAMHANVEDRGIKGDITPLMAAANGGHVKIVKLLLAHKADVNAQSSTGNTALTYACAGGYVDVVKVLLESGASIEDHNENGHTPLMEAGSAGHVEVARLLLENGAGINTHSNEFKESALTLACYKGHLEMVRFLLEAGADQEHKTDEMHTALMEACMDGHVEVARLLLDSGAQVNMPADSFESPLTLAACGGHVELAALLIERGASLEEVNDEGYTPLMEAAREGHEEMVALLLGQGANINAQTEETQETALTLACCGGFLEVADFLIKAGADIELGCSTPLMEAAQEGHLELVKYLLAAGANVHATTATGDTALTYACENGHTDVADVLLQAGADLEHESEGGRTPLMKAARAGHVCTVQFLISKGANVNRTTANNDHTVLSLACAGGHLAVVELLLAHGADPTHRLKDGSTMLIEAAKGGHTSVVCYLLDYPNNLLSAPPPDVTQLTPPSHDLNRAPRVPVQALPMVVPPQEPDKPPANVATTLPIRNKAASKQKSSSHLPANSQDVQGYITNQSPESIVEEAQGKLTELEQRIKEAIEKNAQLQSLELAHADQLTKEKIEELNKTREEQIQKKQKILEELQKVERELQLKTQQQLKKQYLEVKAQRIQLQQQQQQSCQHLGLLTPVGVGEQLSEGDYARLQQVDPVLLKDEPQQTAAQMGFAPIQPLAMPQALPLAAGPLPPGSIANLTELQGVIVGQPVLGQAQLAGLGQGILTETQQGLMVASPAQTLNDTLDDIMAVSGRASAMSNTPTHSIAASISQPQTPTPSPIISPSAMLPIYPAIDIDAQTESNHDTALTLACAGGHEELVQTLLERGASIEHRDKKGFTPLILAATAGHVGVVEILLDNGADIEAQSERTKDTPLSLACSGGRQEVVELLLARGANKEHRNVSDYTPLSLAASGGYVNIIKILLNAGAEINSRTGSKLGISPLMLAAMNGHTAAVKLLLDMGSDINAQIETNRNTALTLACFQGRTEVVSLLLDRKANVEHRAKTGLTPLMEAASGGYAEVGRVLLDKGADVNAPPVPSSRDTALTIAADKGHYKFCELLIGRGAHIDVRNKKGNTPLWLAANGGHLDVVQLLVQAGADVDAADNRKITPLMAAFRKGHVKVVRYLVKEVNQFPSDSECMRYIATITDKEMLKKCHLCMESIVQAKDRQAAEANKNASILLEELDLEKLREESRRLALAAKREKRKEKRRKKKEEQRRKLEEIEAKNKENFELQAAQEKEKLKVEDEPEVLTEPPSATTTTTIGISATWTTLAGSHGKRNNTITTTSSKRKNRKNKITPENVQIIFDDPLPISYSQPEKVNGESKSSSTSESGDSDNMRISSCSDESSNSNSSRKSDNHSPAVVTTTVSSKKQPSVLVTFPKEERKSVSGKASIKLSETISEGTSNSLSTCTKSGPSPLSSPNGKLTVASPKRGQKREEGWKEVVRRSKKVSVPSTVISRVIGRGGCNINAIREFTGAHIDIDKQKDKTGDRIITIRGGTESTRQATQLINALIKDPDKEIDELIPKNRLKSSSANSKIGSSAPTTTAANTSLMGIKMTTVALSSTSQTATALTVPAISSASTHKTIKNPVNNVRPGFPVSLPLAYPPPQFAHALLAAQTFQQIRPPRLPMTHFGGTFPPAQSTWGPFPVRPLSPARATNSPKPHMVPRHSNQNSSGSQVNSAGSLTSSPTTTTSSSASTVPGTSTNGSPSSPSVRRQLFVTVVKTSNATTTTVTTTASNNNTAPTNATYPMPTAKEHYPVSSPSSPSPPAQPGGVSRNSPLDCGSASPNKVASSSEQEAGSPPVVETTNTRPPNSSSSSGSSSAHSNQQQPPGSVSQEPRPPLQQSQVPPPEVRMTVPPLATSSAPVAVPSTAPVTYPMPQTPMGCPQPTPKMETPAIRPPPHGTTAPHKNSASVQNSSVAVLSVNHIKRPHSVPSSVQLPSTLSTQSACQNSVHPANKPIAPNFSAPLPFGPFSTLFENSPTSAHAFWGGSVVSSQSTPESMLSGKSSYLPNSDPLHQSDTSKAPGFRPPLQRPAPSPSGIVNMDSPYGSVTPSSTHLGNFASNISGGQMYGPGAPLGGAPAAANFNRQHFSPLSLLTPCSSASNDSSAQSVSSGVRAPSPAPSSVPLGSEKPSNVSQDRKVPVPIGTERSARIRQTGTSAPSVIGSNLSTSVGHSGIWSFEGIGGNQDKVDWCNPGMGNPMIHRPMSDPGVFSQHQAMERDSTGIVTPSGTFHQHVPAGYMDFPKVGGMPFSVYGNAMIPPVAPIPDGAGGPIFNGPHAADPSWNSLIKMVSSSTENNGPQTVWTGPWAPHMNSVHMNQLG

SEQ ID NO: 45756 - protein, 247 aa, Homo sapiens
MAGQSREDYIYGFQFKAFHFYLTRALQLLRKPCEASSKTVVYRTSQGTSFTFGGLNQARFGHFTLAYSAKPQAANDQLTVLSIYTCLGVDIENFLDKESERITLIPLNEVFQVSQEGAGNNLILQSINKTCSHYECAFLGGLKTENCIENLEYFQPIYVYNPGEKNQKLEDHSEKNWKLEDHGEKNQKLEDHGVKILEPTQIPAPGPVPVPGPKSHPSASSGKLLLPQFGMVIILISVSAINLFVAL

SEQ ID NO: 45757 - protein, 225 aa, Homo sapiens [sequence omitted]

SEQ ID NO: 45758 - protein, 189 aa, Homo sapiens
MTRTELSPAQIKQLLQNPPAGVDPIIWEQAKVDNPDSEKLIPVPMVGFKELLRRLKVQDQMTKQHQTRLDVLIKQEIQRKSGYAIQADEEQLRVQLDTIQGELNAPTQFKGRLNELMSQIRMQNHFGAVRSEERYYIDADLLREIKQHLKQQQEGLSHLISIIKDDLEDIKLVEHGLNETIHIRGGVFS

SEQ ID NO: 45759 - protein, 172 aa, Homo sapiens [sequence omitted]

SEQ ID NO: 45760 - protein, 1995 aa, Homo sapiens
MRTTEDFHKPSATLNSNTATKGRYIYLEAFLEGGAPWGFTLKGGLEHGEPLIISKVEEGGKADTLSSKLQAGDEVVHINEVTLSSSRKEAVSLVKGSYKTLRLVVRRDVCTDPGHADTGASNFVSPEHLTSGPQHRKAAWSGGVKLRLKHRRSEPAGRPHSWHTTKSGEKQPDASMMQISQGMIGPPWHQSYHSSSSTSDLSNYDHAYLRRSPDQCSSQGSMESLEPSGAYPPCHLSPAKSTGSIDQLSHFHNKRDSAYSSFSTSSSILEYPHPGISGRERSGSMDNTSARGGLLEGMRQADIRYVKTVYDTRRGVSAEYEVNSSALLLQGREARASANGQGYDKWSNIPRGKGVPPPSWSQQCPSSLETATDNLPPKVGAPLPPARSDSYAAFRHRERPSSWSSLDQKRLCRPQANSLGSLKSPFIEEQLHTVLEKSPENSPPVKPKHNYTQKAQPGQPLLPTSIYPVPSLEPHFAQVPQPSVSSNGMLYPALAKESGYIAPQGACNKMATIDENGNQNGSGRPGFAFCQPLEHDLLSPVEKKPEATAKYVPSKVHFCSVPENEEDASLKRHLTPPQGNSPHSNERKSTHSNKPSSHPHSLKCPQAQAWQAGEDKRSSRLSEPWEGDFQEDHNANLWRRLEREGLGQSLSGNFGKTKSAFSSLQNIPESLRRHSSLELGRGTQEGYPGGRPTCAVNTKAEDPGRKAAPDLGSHLDRQVSYPRPEGRTGASASFNSTDPSPEEPPAPSHPHTSSLGRRGPGPGSASALQGFQYGKPHCSVLEKVSKFEQREQGSQRPSVGGSGFGHNYRPHRTVSTSSTSGNDFEETKAHIRFSESAEPLGNGEQHFKNGELKLEEASRQPCGQQLSGGASDSGRGPQRPDARLLRSQSTFQLSSEPEREPEWRDRPGSPESPLLDAPFSRAYRNSIKDAQSRVLGATSFRRRDLELGAPVASRSWRPRPSSAHVGLRSPEASASASPHTPRERHSVTPAEGDLARPVPPAARRGARRRLTPEQKKRSYSEPEKMNEVGIVEEAEPAPLGPQRNGMRFPESSVADRRRLFERDGKACSTLSLSGPELKQFQQSALADYIQRKTGKRPTSAAGCSLQEPGPLRERAQSAYLQPGPAALEGSGLASASSLSSLREPSLQPRREATLLPATVAETQQAPRDRSSSFAGGRRLGERRRGDLLSGANGGTRGTQRGDETPREPSSWGARAGKSMSAEDLLERSDVLAGPVHVRSRSSPATADKRQDVLLGQDSGFGLVKDPCYLAGPGSRSLSCSERGQEEMLPLFHHLTPRWGGSGCKAIGDSSVPSECPGTLDHQRQASRTPCPRPPLAGTQGLVTDTRAAPLTPIGTPLPSAIPSGYCSQDGQTGRQPLPPYTPAMMHRSNGHTLTQPPGPRGCEGDGPEHGVEEGTRKRVSLPQWPPPSRAKWAHAAREDSLPEESSAPDFANLKHYQKQQSLPSLCSTSDPDTPLGAPSTPGRISLRISESVLRDSPPPHEDYEDEVFVRDPHPKATSSPTFEPLPPPPPPPPSQETPVYSMDDFPPPPPHTVCEAQLDSEDPEGPRPSFNKLSKVTIARERHMPGAAHVVGSQTLASRLQTSIKGSEAESTPPSFMSVHAQLAGSLGGQPAPIQTQSLSHDPVSGTQGLEKKVSPDPQKSSEDIRTEALAKEIVHQDKSLADILDPDSRLKTTMDLMEGLFPRDVNLLKENSVKRKAIQRTVSSSGCEGKRNEDKEAVSMLVNCPAYYSVSAPKAELLNKIKEMPAEVNEEEEQADVNEKKAELIGSLTHKLETLQEAKGSLLTDIKLNNALGEEVEALISELCKPNEFDKYRMFIGDLDKVVNLLLSLSGRLARVENVLSGLGEDASNEERSSLYEKRKILAGQHEDARELKENLDRRERVVLGILANYLSEEQLQDYQHFVKMKSTLLIEQRKLDDKIKLGQEQVKCLLESLPSDFIPKAGALALPPNLTSEPIPAGGCTFSGIFPTLTSPL

SEQ ID NO: 45761 - protein, 372 aa, Homo sapiens
MDTLFNTKFESDPATHNEPGVRLKARSYELQESNVRLKLTIVDTVGFGDQINKDDSYKPIVEYIDAQFEAYLQEELKIKRSLFNYHDTRIHACLYFIAPTGHSLKSLDLVTMKKLDSKVNIIPIIAKADTIAKNELHKFKSKIMSELVSNGVQIYQFPTDEETVAEINATMSVHLPFAVVGSTEEVKIGNKMAKARQYPWGVVQVENENHCDFVKLREMLIRVNMEDLREQTHTRHYELYRRCKLEEMGFKDTDPDSKPFSLQETYEAKRNEFLGELQKKEEEMRQMFVMRVKEKEAELKEAEKELHEKFDLLKRTHQEEKKKVEDKKKELEEEVNNFQKKKAAAQLLQSQAQQSGAQQTKKDKDKKNASFT

SEQ ID NO: 45762 - protein, 352 aa, Homo sapiens [sequence omitted]

SEQ ID NO: 45763 - protein, 204 aa, Homo sapiens [sequence omitted]

SEQ ID NO: 45764 - protein, 398 aa, Homo sapiens
MLDNLAVHPEQLPPRPWITLKERDQILPSASFTVMCYNVLCDKYATRQLYGYCPSWALNWEYRKKGIMEEIVNCDADIISLQEVETEQYFTLFLPALKERGYDGFFSPKSRAKIMSEQERKHVDGCAIFFKTEKFTLVQKHTVEFNQVAMANSDGSEAMLNRVMTKDNIGVAVVLEVHKELFGAGMKPIHAADKQLLIVANAHMHWDPEYSDVKLIQTMMFVSEVKNILEKASSRPGSPTADPNSIPLVLCADLNSLPDSGVVEYLSNGGVADNHKDFKELRYNECLMNFSCNGKNGSSEGRITHGFQLKSAYENNLMPYTNYTFDFKGVIDYIFYSKTHMNVLGVLGPLDPQWLVENNITGCPHPHIPSDHFSLLTQLELHPPLLPLVNGVHLPNRR

SEQ ID NO: 45765 - protein, 3716 aa, Homo sapiens
MWKGSACEFCMCDHGQVTCQTGECAKVECARDEELIHLDGKCCPECISRNGYCVYEETGEFMSSNASEVKRIPEGEKWEDGPCKVCECRGAQVTCYEPSCPPCPVGTLALEVKGQCCPDCTSVHCHPDCLTCSQSPDHCDLCQDPTKLLQNGWCVHSCGLGFYQAGSLCLACQPQCSTCTSGLECSSCQPPLLMRHGQCVPTCGDGFYQDRHSCAVCHESCAGCWGPTEKHCLACRDPLHVLRDGGCESSCGKGFYNRQGTCSACDQSCDSCGPSSPRCLTCTEKTVLHDGKCMSECPGGYYADATGRCKVCHNSCASCSGPTPSHCTACSPPKALRQGHCLPRCGEGFYSDHGVCKACHSSCLACMGPAPSHCTGCKKPEEGLQVEQLSDVGIPSGECLAQCRAHFYLESTGICEACHQSCFRCAGKSPHNCTDCGPSHVLLDGQCLSQCPDGYFHQEGSCTECHPTCRQCHGPLESDCISCYPHISLTNGNCRTSCREEQFLNLVGYCADCHHLCQHCAADLHNTGSICLRCQNAHYLLLGDHCVPDCPSGYYAERGACKKCHSSCRTCQGRGPFSCSSCDTNLVLSHTGTCSTTCFPGHYLDDNHVCQPCNTHCGSCDSQASCTSCRDPNKVLLFGECQYESCAPQYYLDFSTNTCKECDWSCSACSGPLKTDCLQCMDGYVLQDGACVEQCLSSFYQDSGLCKNCDSYCLQCQGPHECTRCKGPFLLLEAQCVQECGKGYFADHAKHKCTACPQGCLQCSHRDRCHLCDHGFFLKSGLCVYNCVPGFSVHTSNETCSGKIHTPSLHVNGSLILPIGSIKPLDFSLLNVQDQEGRVEDLLFHVVSTPTNGQLVLSRNGKEVQLDKAGRFSWKDVNEKKVRFVHSKEKLRKGYLFLKISDQQFFSEPQLINIQAFSTQAPYVLRNEVLHISRGERATITTQMLDIRDDDNPQDVVIEIIDPPLHGQLLQTLQSPATPIYQFQLDELSRGLLHYAHDGSDSTSDVAVLQANDGHSFHNILFQVKTVPQNDRGLQLVANSMVWVPEGGMLQITNRILQAEAPGASAEEIIYKITQDYPQFGEVVLLVNMPADSPADEGQHLPDGRTATPTSTFTQQDINEGIVWYRHSGAPAQSDSFRFEVSSASNAQTRLESHMFNIAILPQTPEAPKVSLEASLHMTAREDGLTVIQPHSLSFINSEKPSGKIVYNITLPLHPNQGIIEHRDHPHSPIRYFTQEDINQGKVMYRPPPAAPHLQELMAFSFAGLPESVKFHFTVSDGEHTSPEMVLTIHLLPSDQQLPVFQVTAPRLAVSPGGSTSVGLQVVVRDAETAPKELFFELRRPPQHGVLLKHTAEFRRPMATGDTFTYEDVEKNALQYIHDGSSTREDSMEISVTDGLTVTMLEVRVEVSLSEDRGPRLAAGSSLSITVASKSTAIITRSHLAYVDDSSPDPEIWIQLNYLPSYGTLLRISGSEVEELSEVSNFTMEDINNKKIRYSAVFETDGHLVTDSFYFSVSDMDHNHLDNQIFTIMITPAENPPPVIAFADLITVDEGGRAPLSFHHFFATDDDDNLQRDAIIKLSALPKYGCIENTGTGDRFGPETASDLEASFPIQDVLENYIYYFQSVHESIEPTHDIFSFYVSDGTSRSEIHSINITIERKNDEPPRMTLQPLRVQLSSGVVISNSSLSLQDLDTPDNELIFVLTKKPDHGHVLWRQTASEPLENGRVLVQGSTFTYQDILAGLVGYVPSVPGMVVDEFQFSLTDGLHVDTGRMKIYTELPASDTPHLAINQGLQLSAGSVARITEQHLKVTDIDSDDHQVMYIMKEDPGAGRLQMMKHGNLEQISIKGPIRSFTQADISQGHVEYSHGTGEPGGSFAFKFDVVDGEGNRLIDKSFSISILEDKSPPVITTNKGLVLDENSVKKITTLQLSATDQDSGPTELIYRITRQPQLGHLEHAASPGIQISSFTQADLTSRNVQYVHSSEAEKHSDAFSFTLSDGVSEVTQTFHITLHPVDDSLPVVQNLGMRVQEGMRKTITEFELKAVDADTEAESVTFTIVQPPRHGTIERTSNGQHFHLTSTFTMKDIYQNRVSYSHDGSNSLKDRFTFTVSDGTNPFFIIEEGGKEIMTAAPQPFRVDILPVDDGTPRIVTNLGLQWLEYMDGKATNLITKKELLTMDPDTEDAQLVYEITTGPKHGFVENKLQPGRAAATFTQEDVNLGLIRYVLHKEKIREMMDSFQFLVKDSKPNVVSDNVFHIQWSLISFKYTSYNVSEKAGSVSVTVQRTGNLNQYAIVLCRTEQGTASSSSRVSSQPGQQDYVEYAGQVQFDEREDTKSCTIVINDDDVFENVESFTVELSMPAYALLGEFTQAKVIINDTEDEPTLEFDKKIYWVNESAGFLFAPIERKGDASSIVSAICYTVPKSAMGSSLYALESGSDFKSRGMSAASRVIFGPGVTMSTCDVMLIDDSEYEEEEEFEIALADASDNARIGRVATAKVLISGPNDASTVSLGNTAFTVSEDAGTVKIPVIRHGTDLSTFASVWCATRPSDPASATPGVDYVPSSRKVEFGPGVIEQYCTLTILDDTQYPVIEGLETFVVFLSSAQGAELTKPFQAVIAINDTFQDVPSMQFAKDLLLVKEKEGVLHVPITRSGDLSYESSVRCYTQSHSAQVMEDFEERQNADSSRITFLKGDKVKNCTVYIHDDSMFEPEEQFRVYLGLPLGNHWSGARIGKNNMATITISNDEDAPTIEFEEAAYQVREPAGPDAIAILNIKVIRRGDQNRTSKVRCSTRDGSAQSGVDYYPKSRVLKFSPGVDHIFFKVEILSNEDREWHESFSLVLGPDDPVEAVLGDVTTATVTILDQEAAGSLILPAPPIVVTLADYDHVEEVTKEGVKKSPSPGYPLVCVTPCDPHFPRYAVMKERCSEAGINQTSVQFSWEVAAPTDGNGARSPFETITDNTPFTSVNHMVLDSIYFSRRFHVRCVAKAVDKVGHVGTPLRSNIVTIGTDSAICHTPVVAGTSRGFQAQSFIATLKYLDVKHKEHPNRIHISVQIPHQDGMLPLISTMPLHNLHFLLSESIYRHQHVCSNLVTTYDLRGISEAGFLDDVVYDSTALGPGYDRPFQFDPSVREPKTIQLYKHLNLKSCVWTFDAYYDMTELIDVCGGSVTADFQVRDSAQSFLTVHVPLYVSYIYVTAPRGWASLEHHTEMEFSFFYDTVLWRTGIQTDSVLSARLQIIRIYIREDGRLVIEFKTHAKFRGQFVMEHHTLPEVKSFVLTPDHLGGIEFDLQLLWSAQTFDSPHQLWRATSSYNRKDYSGEYTIYLIPCTVQPTQPWVDPGEKPLACTAHAPERFLIPIAFQQTNRPVPVVYSLNTEFQLCNNEKVFLMDPNTSDMSLAEMDYKGAFSKGQILYGRVLWNPEQNLNSAYKLQLEKVYLCTGKDGYVPFFDPTGTIYNEGPQYGCIQPNKHLKHRFLLLDRNQPEVTDKYFHDVPFEAHFASELPDFHVVSNMPGVDGFTLKVDALYKVEAGHQWYLQVIYIIGPDTISGPRVQRSLTAPLRRNRRDLVEPDGQLILDDSLIYDNEGDQVKNGTNMKSLNLEMQELAVAASLSQTGASIGSALAAIMLLLLVFLVACFINRKCQKQRKKKPAEDILEEYPLNTKVEVPKRHPDRVEKNVNRHYCTVRNVNILSEPEAAYTFKGAKVKRLNLEVRVHNNLQDGTEV

SEQ ID NO: 45766 - protein, 161 aa, Homo sapiens
MSLDRKTTALKQLQGHMWRAAFTAGRMKAEFFADVVPAVRKWREAGMKVYIYSSGSVEAQKLLFGHSTEGDILELVDGHFDTKIGHKVESESYRKIADSIGCSTNNILFLTDVTREASAAEEADVHVAVVVRPGNAGLTDDEKTYYSLITSFSELYLPSST

SEQ ID NO: 45767 - protein, 176 aa, Homo sapiens
MAAFLALVVAVLRFIQLKPKVLNPWLNISGLVALCLASFGMTLLGNFQLTNDEEIHNVGTSLTFGFGTLTCWIQAALTLKVNIKNEGRRVGIPRVILSASITLCVVLYFILMAQSIHMYAARVQWGLVMCFLSYFGTFAVEFRHYRYEIVCSEYQENFLSFSESLSEASEYQTDQV

SEQ ID NO: 45768 - protein, 928 aa, Homo sapiens
MADPELLLSCGKDAKILCSNPNTGEVLYELPTNTQWCFDIQWCPRNPAVLSAASFDGRISVYSIMGGSTDGLRQKQVDKLSSSFGNLDPFGTGQPLPPLQIPQQTAQHSIVLPLKKPPKWIRRPVGASFSFGGKLVTFENVRMPSHQGAEQQQQQHHVFISQVVTEKEFLSRSDQLQQAVQSQGFINYCQKKIDASQTEFEKNVWSFLKVNFEDDSRGKYLELLGYRKEDLGKKHIKEEKEESEFLPSSGGTFNISVSGDIDGLITQALLTGNFESAVDLCLHDNRMADAIILAIAGGQELLARTQKKYFAKSQSKITRLITAVVMKNWKEIVESCDLKNWREALAAVLTYAKPDEFSALCDLLGTRLENEGDSLLQTQACLCYICAGNVEKLVACWTKAQDGSHPLSLQDLIEKVVILRKAVQLTQAMDTSTVGVLLAAKMSQYANLLAAQGSIAAALAFLPDNTNQPNIMQLRDRLCRAQGEPVAGHESPKIPYEKQQLPKGRPGPVAGHHQMPRVQTQQYYPHVRIAPTVTTWSNKTPTALPSHPPAASPSDTQGENPPPPGFIMHGNVNPNAAGQLPTSPGHMHTQVPPYPQPQPYQPAQPYPFGTGGSAMYRPQQPVAPPTSNAYPNTPYISSASSYTGQSQLYAAQHQASSPTSSPATSFPPPPSSGASFQHGGPGAPPSSSAYALPPGTTGPQNGWNDPPALNRVPKKKKMPENFMPPVPITSPIMNPLGDPQSQMLQQQPSAPVPLSSQSSFPQPHLPGGQPFHGVQQPLGQTGMPPSFSKPNIEGAPGAPIGNTFQHVQSLPTKKITKKPIPDEHLILKTTFEDLIQRCLSSATDPQTKRKLDDASKRLEFLYDKLREQTLSPTITSGLHNIARSIETRNYSEGLTMHTHIVSTSNFSETSAFMPVLKVVLTQANKLGV

SEQ ID NO: 45769 - protein, 137 aa, Homo sapiens
MLMPHQKATTADGSSILDRAVIEHNLLSASKLYNNITFEELGALLEIPAAKAEKIASQMITEGRMNGFIDQIDGIVHFETSGNHQSIFCLWIYLVWIVHINGIIQYVTCDLLADSTQHSIFRVHPCHGSTRSPANVG

SEQ ID NO: 45770 - protein, 124 aa, Homo sapiens
MASVQGSKRRKLRVYLHCTNTDNPRYKEGDLTLYAINLHNVTKYLRLPYPFSNKQVDKYLLRPLGPHGLLSKSVQLNGLTLKMVDDQTLPPLMEKPLRPGSSLGLPAFSYSFFVIRNAKVAACI

SEQ ID NO: 45771 - protein, 367 aa, Homo sapiens
MLLLLGPLGPLSPGALPRPAQAQDVVDLDFFTQEPLHLVSPSFLSVTIDANLATDPRFLILLGSPKLRTLARGLSPAYLRFGGTKTDFLIFDPKKESTFEERSYWQSQVNQDICKYGSIPPDVEEKLRLEWPYQEQLLLREHYQKKFKNSTYSRSSVDVLYTFANCSGLDLIFGLNALLRTADLQWNSSNAQLLLDYCSSKGYNISWELGNEPNSFLKKADIFINGSQLGEDFIQLHKLLRKSTFKNAKLYGPDVGQPRRKTAKMLKSFLKAGGEVIDSVTWHHYYLNGRTATKEDFLNPDVLDIFISSVQKVFQVVESTRPGKKVWLGETSSAYGGGAPLLSDTFAAGFMIIGYLFCSRNWWAPRC

SEQ ID NO: 45772 - protein, 3501 aa, Homo sapiens
MHLRRLFTELCHPPRHMTQKEQEEKLYMMLPVFNRVFGNAPPNTMTEKFSDLLQFTTQVSRLMVTEIRRRASNKSTEAASRAIVQFLEINQSEEASRGWMLLTTINLLASSGQKTVDCMTTMSVPSTLVKCLYLFFDLPHVPEAVGGAQNELPLAERRGLLQKVFVQILVKLCSFVSPAEELAQKDDLQLLFSAITSWCPPYNLPWRKSAGEVLMTISRHGLSVNVVKYIHEKECLSTCVQNMQQSDDLSPLEIVEMFAGLSCFLKDSSDVSQTLLDDFRIWQGYNFLCDLLLRLEQAKEAESKDALKDLVNLITSLTTYGVSELKPAGITTGAPFLLPGFAVPQPAGKGHSVRNVQAFAVLQNAFLKAKTSFLAQIILDAITNIYMADNANYFILESQHTLSQFAEKISKLPEVQNKYFEMLEFVVFSLNYIPCKELISVSILLKSSSSYHCSIIAMKTLLKFTRHDYIFKDVFREVGLLEVMVNLLHKYAALLKDPTQALNEQGDSRNNSSVEDQKHLALLVMETLTVLLQGSNTNAGIFREFGGARCAHNIVKYPQCRQHALMTIQQLVLSPNGDDDMGTLLGLMHSAPPTELQLKTDILRALLSVLRESHRSRTVFRKVGGFVYITSLLVAMERSLSCPPKNGWEKVNQNQVFELLHTVFCTLTAAMRYEPANSHFFKTEIQYEKLADAVRFLGCFSDLRKISAMNVFPSNTQPFQRLLEEDVISIESVSPTLRHCSKLFIYLYKVATDSFDSRAEQIPPCLTSESSLPSPWGTPALSRKRHAYHSVSTPPVYPPKNVADLKLHVTTSSLQSSDAVIIHPGAMLAMLDLLASVGSVTQPEHALDLQLAVANILQSLVHTERNQQVMCEAGLHARLLQRCSAALADEDHSLHPPLQRMFERLASQALEPMVLREFLRLASPLNCGAWDKKLLKQYRVHKPSSLSYEPEMRSSMITSLEGLGTDNVFSLHEDNHYRISKSLVKSAEGSTVPLTRVKCLVSMTTPHDIRLHGSSVTPAFVEFDTSLEGFGCLFLPSLAPHNAPTNNTVTTGLIDGAVVSGIGSGERFFPPPSGLSYSSWFCIEHFSSPPNNHPVRLLTVVRRANSSEQHYVCLAIVLSAKDRSLIVSTKEELLQNYVDDFSEESSFYEILPCCARFRCGELIIEGQWHHLVLVMSKGMLKNSTAALYIDGQLVNTVKLHYVHSTPGGSGSANPPVVSTVYAYIGTPPAQRQIASLVWRLGPTHFLEEVLPSSNVTTIYELGPNYVGSFQAVCMPCKDAKSEGVVPSPVSLVPEEKVSFGLYALSVSSLTVARIRKVYNKLDSKAIAKQLGISSHENATPVKLIHNSAGHLNGSARTIGAALIGYLGVRTFVPKPVATTLQYVGGAAAILGLVAMASDVEGLYAAVKALVCVVKSNPLASKEMERIKGYQLLAMLLKKKRSLLNSHILHLTFSLVGTVDSGHETSIIPNSTAFQDLLCDFEVWLHAPYELHLSLFEHFIELLTESSEASKNAKLMREFQLIPKLLLTLRDMSLSQPTIAAISNVLSFLLQGFPSSNDLLRFGQFISSTLPTFAVCEKFVVMEINNEEKLDTGTEEEFGGLVSANLILLRNRLLDILLKLIYTSKEKTSINLQACEELVKTLGFDWIMMFMEEHLHSTTVTAAMRILVVLLSNQSILIKFKEGLSGGGWLEQTDSVLTNKIGTVLGFNVGRSAGGRSTVREINRDACHFPGFPVLQSFLPKHTNVPALYFLLMALFLQQPVSELPENLQVSVPVISCRSKQGCQFDLDSIWTFIFGVPASSGTVVSSIHNVCTEAVFLLLGMLRSMLTSPWQSEEEGSWLREYPVTLMQFFRYLYHNVPDLASMWMSPDFLCALAATVFPFNIRPYSEMVTDLDDEVGSPAEEFKAFAADTGMNRSQSEYCNVGTKTYLTNHPAKKFVFDFMRVLIIDNLCLTPASKQTPLIDLLLEASPERSTRTQQKEFQTYILDSVMDHLLAADVLLGEDASLPITSGGSYQVLVNNVFYFTQRVVDKLWQGMFNKESKLLIDFIIQLIAQSKRRSQGLSLDAVYHCLNRTILYQFSRAHKTVPQQVALLDSLRVLTVNRNLILGPGNHDQEFISCLAHCLINLHVGSNVDGFGLEAEARMTTWHIMIPSDIEPDGSYSQDISEGRQLLIKAVNRVWTELIHSKKQVLEELFKVTLPVNERGHVDIATARPLIEEAALKCWQNHLAHEKKCISRGEALAPTTQSKLSRVSSGFGLSKLTGSRRNRKESGLNKHSLSTQEISQWMFTHIAVVRDLVDTQYKEYQERQQNALKYVTEEWCQIECELLRERGLWGPPIGSHLDKWMLEMTEGPCRMRKKMVRNDMFYNHYPYVPETEQETNVASEIPSKQPETPDDIPQKKPARYRRAVSYDSKEYYMRLASGNPAIVQDAIVESSEGEAAQQEPEHGEDTIAKVKGLVKPPLKRSRSAPDGGDEENQEQLQDQIAEGSSIEEEEKTDNATLLRLLEEGEKIQHMYRCARVQGLDTSEGLLLFGKEHFYVIDGFTMTATREIRDIETLPPNMHEPIIPRGARQGPSQLKRTCSIFAYEDIKEVHKRRYLLQPIAVEVFSGDGRNYLLAFQKGIRNKVYQRFLAVVPSLTDSSESVSGQRPNTSVEQGSGLLSTLVGEKSVTQRWERGEISNFQYLMHLNTLAGRSYNDLMQYPVFPWILADYDSEEVDLTNPKTFRNLAKPMGAQTDERLAQYKKRYKDWEDPNGETPAYHYGTHYSSAMIVASYLVRMEPFTQIFLRLQGGHFDLADRMFHSVREAWYSASKHNMADVKELIPEFFYLPEFLFNSNNFDLGCKQNGTKLGDVILPPWAKGDPREFIRVHREALECDYVSAHLHEWIDLIFGYKQQGPAAVEAVNVFHHLFYEGQVDIYNINDPLKETATIGFINNFGQIPKQLFKKPHPPKRVRSRLNGDNAGISVLPGSTSDKIFFHHLDNLRPSLTPVKELKEPVGQIVCTDKGILAVEQNKVLIPPTWNKTFAWGYADLSCRLGTYESDKAMTVYECLSEWGQILCAICPNPKLVITGGTSTVVCVWEMGTSKEKAKTVTLKQALLGHTDTVTCATASLAYHIIVSGSRDRTCIIWDLNKLSFLTQLRGHRAPVSALCINELTGDIVSCAGTYIHVWSINGNPIVSVNTFTGRSQQIICCCMSEMNEWDTQNVIVTGHSDGVVRFWRMEFLQVPETPAPEPAEVLEMQEDCPEAQIGQEAQDEDSSDSEADEQSISQDPKDTPSQPSSTSHRPRAASCRATAAWCTDSGSDDSRRWSDQLSLDEKDGFIFVNYSEGQTRAHLQGPLSHPHPNPIEVRNYSRLKPGYRWERQLVFRSKLTMHTAFDRKDNAHPAEVTALGISKDHSRILVGDSRGRVFSWSVSDQPGRSAADHWVKDEGGDSCSGCSVRFSLTERRHHCRNCGQLFCQKCSRFQSEIKRLKISSPVRVCQNCYYNLQHERGSEDGPRNC

SEQ ID NO: 45773 - protein, 770 aa, Homo sapiens
MHLRRLFTELCHPPRHMTQKEQEEKLYMMLPVFNRVFGNAPPNTMTEKFSDLLQFTTQVSRLMVTEIRRRASNKSTEAASRAIVQFLEINQSEEASRGWMLLTTINLLASSGQKTVDCMTTMSVPSTLVKCLYLFFDLPHVPEAVGGAQNELPLAERRGLLQKVFVQILVKLCSFVSPAEELAQKDDLQLLFSAITSWCPPYNLPWRKSAGEVLMTISRHGLSVNVVKYIHEKECLSTCVQNMQQSDDLSPLEIVEMFAGLSCFLKDSSDVSQTLLDDFRIWQGYNFLCDLLLRLEQAKEAESKDALKDLVNLITSLTTYGVSELKPAGITTGAPFLLPGFAVPQPAGKGHSVRNVQAFAVLQNAFLKAKTSFLAQIILDAITNIYMADNANYFILESQHTLSQFAEKISKLPEVQNKYFEMLEFVVFSLNYIPCKELISVSILLKSSSSYHCSIIAMKTLLKFTRHDYIFKDVFREVGLLEVMVNLLHKYAALLKDPTQALNEQGDSRNNSSVEDQKHLALLVMETLTVLLQGSNTNAGIFREFGGARCAHNIVKYPQCRQHALMTIQQLVLSPNGDDDMGTLLGLMHSAPPTELQLKTDILRALLSVLRESHRSRTVFRKVGGFVYITSLLVAMERSLSCPPKNGWEKVNQNQVFELLHTVFCTLTAAMRYEPANSHFFKTEIQYEKLADAVRFLGCFSDLRKISAMNVFPSNTQPFQRLLEEDVISIESVSPTLRHCSKLFIYLYKVATDSFDRYGSALSSELKGVY

SEQ ID NO: 45774 - protein, 29 aa, Homo sapiens
MVCVQTAFSRQALYFFAKRINFKLKAVDS

SEQ ID NO: 45775 - protein, 526 aa, Homo sapiens
MFLSEMAEAKQTLIEIRDFDGDAIEDLVKFVYSSRLTLTVDNVQPLLYAACILQVELVARACCEYMKLHFHPSNCLAVRAFAESHNRIDLMDMADQYACDHFTEVVECEDFVSVSPQHLHKLLSSSDLNIENEKQVYNAAIKWLLANPQHHSKWLDETLAQVRLPLLPVDFLMGVVAKEQIVKQNLKCRDLLDEARNYHLHLSSRAVPDFEYSIRTTPRKHTAGVLFCVGGRGGSGDPFRSIECYSINKNSWFFGPEMNSRRRHVGVISVEGKVYAVGGHDGNEHLGSMEMFDPLTNKWMMKASMNTKRRGIALASLGGPIYAIGGLDDNTCFNDVERYDIESDQWSTVAPMNTPRGGVGSVALVNHVYAVGGNDGMASLSSVERYDPHLDKWIEVKEMGQRRAGNGVSKLHGCLYVVGGFDDNSPLSSVERYDPRSNKWDYVAALTTPRGGVGIATVMGKIFAVGGHNGNAYLNTVEAFDPVLNRWELVGSVSHCRAGAGVAVCSCLTSQIRDVGHGSNNVVDCM

SEQ ID NO: 45776 - protein, 409 aa, Homo sapiens
MQEDEFDQGNQEQEDNSNAEMEEENASNVNKHIQETEWQSQEGKTGLEAISNHKETEEKTVSEALLMEPTDDGNTTPRNHGVDDDGDDDGDDGGTDGPRHSASDDYFIPSQAFLEAERAQSIAYHLKIEEQREKVHENENIGTTEPGEHQEAKKAENSSNEEETSSEGNMRVHAVDSCMSFQCKRGHICKADQQGKPHCVCQDPVTCPPTKPLDQVCGTDNQTYASSCHLFATKCRLEGTKKGHQLQLDYFGACKSIPTCTDFEVIQFPLRMRDWLKNILMQLYEANSEHAGYLNEKQRNKVKKIYLDEKRLLAGDHPIDLLLRDFKKNYHMYVYPVHWQFSELDQHPMDRVLTHSELAPLRASLVPMEHCITRFFEECDPNKDKHITLKEWGHCFGIKEEDIDENLLF

SEQ ID NO: 45777 - protein, 1003 aa, Homo sapiens
MKKIVAVPLNEQKDFTYQKLFGVSLQELERQGLTENGIPAVVWNIVEYLTQHGLTQEGLFRVNGNVKVVEQLRLKFESGVPVELGKDGDVCSAASLLKLFLRELPDSLITSALQPRFIQLFQDGRNDVQESSLRDLIKELPDTHYCLLKYLCQFLTKVAKHHVQNRMNVHNLATVFGPNCFHVPPGLEGMKEQDLCNKIMAKILENYNTLFEVEYTENDHLRCENLARLIIVKEVYYKNSLPILLTRGLERDMPKPPPKTKIPKSRSEGSIQAHRVLQPELSDGIPQLSLRLSYRKACLEDMNSAEGAISAKLVPSSQEDERPLSPFYLSAHVPQVSNVSATGELLERTIRSAVEQHLFDVNNSGGQSSEDSESGTLSASSATSARQRRRQSKEQDEVRHGRDKGLINKENTPSGFNHLDDCILNTQEVEKVHKNTFGCAGERSKPKRQKSSTKLSELHDNQDGLVNMESLNSTRSHERTGPDDFEWMSDERKGNEKDGGHTQHFESPTMKIQEHPSLSDTKQQRNQDAGDQEESFVSEVPQSDLTALCDEKNWEEPIPAFSSWQRENSDSDEAHLSPQAGRLIRQLLDEDSDPMLSPRFYAYGQSRQYLDDTEVPPSPPNSHSFMRRRSSSLGSYDDEQEDLTPAQLTRRIQSLKKKIRKFEDRFEEEKKYRPSHSDKAANPEVLKWTNDLAKFRRQLKESKLKISEEDLTPRMRQRSNTLPKSFGSQLEKEDEKKQELVDKAIKPSVEATLESIQRKLQEKRAESSRPEDIKDMTKDQIANEKVALQKALLYYESIHGRPVTKNERQVMKPLYDRYRLVKQILSRANTIPIIGSPSSKRRSPLLQPIIEGETASFFKEIKEEEEGSEDDSNVKPDFMVTLKTDFSARCFLDQFEDDADGFISPMDDKIPSKCSQDTGLSNLHAASIPELLEHLQEMREEKKRIRKKLRDFEDNFFRQNGRNVQKEDRTPMAEEYSEYKHIKAKLRLLEVLISKRDTDSKSM

SEQ ID NO: 45778 - protein, 508 aa, Homo sapiens
MESLNSTRSHERTGPDDFEWMSDERKGNEKDGGHTQHFESPTMKIQEHPSLSDTKQQRNQDAGDQEESFVSEVPQSDLTALCDEKNWEEPIPAFSSWQRENSDSDEAHLSPQAGRLIRQLLDEDSDPMLSPRFYAYGQSRQYLDDTEVPPSPPNSHSFMRRRSSSLGSYDDEQEDLTPAQLTRRIQSLKKKIRKFEDRFEEEKKYRPSHSDKAANPEVLKWTNDLAKFRRQLKESKLKISEEDLTPRMRQRSNTLPKSFGSQLEKEDEKKQELVDKAIKPSVEATLESIQRKLQEKRAESSRPEDIKDMTKDQIANEKVALQKALLYYESIHGRPVTKNERQVMKPLYDRYRLVKQILSRANTIPIIEEEEGSEDDSNVKPDFMVTLKTDFSARCFLDQFEDDADGFISPMDDKIPSKCSQDTGLSNLHAASIPELLEHLQEMREEKKRIRKKLRDFEDNFFRQNGRNVQKEDRTPMAEEYSEYKHIKAKLRLLEVLISKRDTDSKSM

SEQ ID NO: 45779 - protein, 257 aa, Homo sapiens
MKKIVAVPLNEQKDFTYQKLFGVSLQELERQGLTENGIPAVVWNIVEYLTQHGLTQEGLFRVNGNVKVVEQLRLKFESGVPVELGKDGDVCSAASLLKLFLRELPDSLITSALQPRFIQLFQDGRNDVQESSLRDLIKELPDTHYCLLKYLCQFLTKVAKHHVQNRMNVHNLATVFGPNCFHVPPGLEGMKEQDLCNKIMAKILENYNTLFEVEYTENDHLRCENLARLIIVKVSNLVFNFQYCYNFGQKILFNSFS

SEQ ID NO: 45780 - protein, 889 aa, Homo sapiens
MARRNDDISELEDLSELEDLKDAKLQTLKELFPQRSDNDLLKLIESTSTMDGAIAAALLMFGDAGGGPRKRKLSSSSEPYEEDEFNDDQSIKKTRLDHGEESNESAESSSNWEKQESIVLKLQKEFPNFDKQELREVLKEHEWMYTEALESLKVFAEDQDMQYVSQSEVPNGKEVSSRSQNYPKNATKTKLKQKFSMKAQNGFNKKRKKNVFNPKRVVEDSEYDSGSDVGSSLDEDYSSGEEVMEDGYKGKILHFLQDASIGELTLIPQCSQKKAQKITELRPFNSWEALFTKMSKTNGLSEDLIWHCKTLIQERDVVIRLMNKCEDISNKLTKQVTMLTGNGGGWNIEQPSILNQSLSLKPYQKVGLNWLALVHKHGLNGILADEMGLGKTIQAIAFLAYLYQEGNNGPHLIVVPASTIDNWLREVNLWCPTLKVLCYYGSQEERKQIRFNIHSRYEDYNVIVTTYNCAISSSDDRSLFRRLKLNYAIFDEGHMLKNMGSIRYQHLMTINANNRLLLTGTPVQNNLLELMSLLNFVMPHMFSSSTSEIRRMFSSKTKSADEQSIYEKERIAHAKQIIKPFILRRVKEEVLKQLPPKKDRIELCAMSEKQEQLYLGLFNRLKKSINNLEKNTEMCNVMMQLRKMANHPLLHRQYYTAEKLKEMSQLMLKEPTHCEANPDLIFEDMEVMTDFELHVLCKQYRHINNFQLDMDLILDSGKFRVLGCILSELKQKGDRVVLFSQFTMMLDILEVLLKHHQHRYLRLDGKTQISERIHLIDEFNTDMDIFVFLLSTKAGGLGINLTSANVVILHDIDCNPYNDKQAEDRCHRVGQTKEVLVIKLISQGTIEESMLKINQQKLKLEQDMTTVDEGDEGSMPADIATLLKTSMGL

SEQ ID NO: 45781 - protein, 891 aa, Homo sapiens
MARRNDDISELEDLSELEDLKDAKLQTLKELFPQRSDNDLLKLIESTSTMDGAIAAALLMFGDAGGGPRKRKLSSSSEPYEEDEFNDDQSIKKTRLDHGEESNESAESSSNWEKQESIVLKLQKEFPNFDKQELREVLKEHEWMYTEALESLKVFAEDQDMQYVSQSEVPNGKEVSSRSQNYPKNATKTKLKQKFSMKAQNGFNKKRKKNVFNPKRVVEDSEYDSGSDVGSSLDEDYSSGEEVMEDGYKGKILHFLQDASIGELTLIPQCSQKKAQKITELRPFNSWEALFTKMSKTNGLSEDLIWHCKTLIQERDVVIRLMNKCEDISNKLTKQVTMLTGNGGGWNIEQPSILNQSLSLKPYQKVGLNWLALVHKHGLNGILADEMGLGKTIQAIAFLAYLYQEGNNGPHLIVVPASTIDNWLREVNLWCPTLKVLCYYGSQEERKQIRFNIHSRYEDYNVIVTTYNCAISSSDDRSLFRRLKLNYAIFDEGHMLKNMGSIRYQHLMTINANNRLLLTGTPVQNNLLELMSLLNFVMPHMFSSSTSEIRRMFSSKTKSADEQSIYEKERIAHAKQIIKPFILRRVKEEVLKQLPPKKDRIELCAMSEKQEQLYLGLFNRLKKSINNLVTEKNTEMCNVMMQLRKMANHPLLHRQYYTAEKLKEMSQLMLKEPTHCEANPDLIFEDMEVMTDFELHVLCKQYRHINNFQLDMDLILDSGKFRVLGCILSELKQKGDRVVLFSQFTMMLDILEVLLKHHQHRYLRLDGKTQISERIHLIDEFNTDMDIFVFLLSTKAGGLGINLTSANVVILHDIDCNPYNDKQAEDRCHRVGQTKEVLVIKLISQGTIEESMLKINQQKLKLEQDMTTVDEGDEGSMPADIATLLKTSMGL

SEQ ID NO: 45782 - protein, 445 aa, Homo sapiens
MNYSNENDSLQAQLINMGVIPTLVKLLGIHCQNAALTEMCLVAFGNLAELESSKEQFASTNIAEELVKLFKKQIEHDKREMIFEVLAPLAENDAIKLQLVEAGLVECLLEIVQQKVDSDKEDDITELKTGSDLMVLLLLGDESMQKLFEGGKGSVFQRVLSWIPSNNHQLQLAGALAIANFARNDANCIHMVDNGIVEKLMDLLDRHVEDGNVTVQHAALSALRNLAIPVINKAKMLSAGVTEAVLKFLKSEMPPVQFKLLGTLRMLIDAQAEAAEQLGKNVKLVERLVEWCEAKDHAGVMGESNRLLSALIRHSKSKDVIKTIVQSGGIKHLVTMATSEHVIMQNEALVALALIAALELGTAEKDLESAKLVQILHRLLADERSAPEIKYNSMVLICALMGSECLHKEVQDLAFLDVVSKLRSHENKSVAQQASLTEQRLTVES

SEQ ID NO: 45783 - protein, 444 aa, Homo sapiens
MNYSNENDSLQAQLINMGVIPTLVKLLGIHCQNAALTEMCLVAFGNLAELESSKEQFASTNIAEELVKLFKKQIEHDKREMIFEVLAPLAENDAIKLQLVEAGLVECLLEIVQQKVDSDKEDDITELKTGSDLMVLLLLGDESMQKLFEGGKGSVFQRVLSWIPSNNHQLQLAGALAIANFARNDANCIHMVDNGIVEKLMDLLDRHVEDGNVTVQHAALSALRNLAIPVINKAKMLSAGVTEAVLKFLKSEMPPVQFKLLGTLRMLIDAQEAAEQLGKNVKLVERLVEWCEAKDHAGVMGESNRLLSALIRHSKSKDVIKTIVQSGGIKHLVTMATSEHVIMQNEALVALALIAALELGTAEKDLESAKLVQILHRLLADERSAPEIKYNSMVLICALMGSECLHKEVQDLAFLDVVSKLRSHENKSVAQQASLTEQRLTVES

SEQ ID NO: 45784 - protein, 272 aa, Homo sapiens
MSESEQALKGTSQIKLLSSEDIEGMRLVCRLAREVLDVAAGMIKPGVTTEEIDHAVHLACIARNCYPSPLNYYNFPKSCCTSVNEVICHGIPDRRPLQEGDIVNVDITLYRNGYHGDLNETFFVGEVDDGARKLVQTTYECLMQAIDAVKPGVRYRELGNIIQKHAQANGFSVVRSYCGHGIHKLFHTAPNVPHYAKNKAVGVMKSGHVFTIEPMICEGGWQDETWPDGWTAVTRDGKRSAQFEHTLLVTDTGCEILTRRLDSARPHFMSQF

SEQ ID NO: 45785 - protein, 245 aa, Homo sapiens
MPDGTSRFTCKGKTILHYMGTSTFSEYTVVADISVAKIDPLAPLDKVCLLGCGISTGYGAAVNTAKLEPGSVCAVFGLGGVGLAVIMGCKVAGASRIIGVDINKDKFARAKEFGATECINPQDFSKPIQEVLIEMTDGGVDYSFECIGNVKVMRAALEACHKGWGVSVVVGVAASGEEIATRPFQLVTGRTWKGTAFGGWKSVESVPKLVSEYMSKKIKVDEFVTHNLSFDEINKAFELMHSGKR

SEQ ID NO: 45786 - protein, 187 aa, Homo sapiens [sequence omitted]

SEQ ID NO: 45787 - protein, 110 aa, Homo sapiens
MGPNDSPYQGGVFFLTIHFPTDYPFKPPKVAFTTRIYHPNINSNGSICLDILRSQWSPALTISKVLLSICSLLCDPNPDDPLVPEIARIYKTDRDKYNRISREWTQKYAM

SEQ ID NO: 45788 - protein, 359 aa, Homo sapiens
MKSDITEGVDIPKKPRLEKPETQSSPITVQSSKDLPMADLSSFEETSADDFAMEMGLACVVCRQMMVASGNQLVECQECHNLYHRDCHKPQVTDKEANDPRLVWYCARCTRQMKRMAQKTQKPPQKPAPAVVSVTPAVKDPLVKKPETKLKQETTFLAFKRTEVKTSTVISGNSSSASVSSSVTSGLTGWAAFAAKTSSAGPSTAKLSSTTQNNTGKPATSSANQKPVGLTGLATSSKGGIGSKIGSNNSTTPTVPLKPPPPLTLGKTGLSRSVSCDNVSKVGLPSPSSLVPGSSSQLSGNGNSGTSGPSGSTTSKTTSESSSSPSASLKGPTSQESQLNAMKRLQMVKKKAAQKKLKK

SEQ ID NO: 45789 - protein, 748 aa, Homo sapiens
MNKHGIVHRALSPHNILLDRKGHIKLAKFGLYHMTAHGDDVDFPIGYPSYLAPEGRKLFQSLDISERLKFLLTLDCVDDTLIVLAEEHGCLDIIKELPETVIDLLNKCLTFHPSKRPTPDQLMKDKVFSEVSPLYTPFTKPASLFSSSLRCADLTLPEDISQLCKDINNDYLAERSIEEVYYLWCLAGGDLEKELVNKEIIRSKPPICTLPNFLFEDGESFGQGRDRSSLLDDTTVTLSLCQLRNRLKDVGGEAFYPLLEDDQSNLPHSNSNNELSAAATLPLIIREKDTEYQLNRIILFDRLLKAYPYKKNQIWKEARVDIPPLMRGLTWAALLGVEGAIHAKYDAIDKDTPIPTDRQIEVDIPRCHQYDELLSSPEGHAKFRRVLKAWVVSHPDLVYWQGLDSLCAPFLYLNFNNEALAYACMSAFIPKYLYNFFLKDNSHVIQEYLTVFSQMIAFHDPELSNHLNEIGFIPDLYAIPWFLTMFTHVFPLHKIFHLWDTLLLGNSSFPFCIGVAILQQLRDRLLANGFNECILLFSDLPEIDIERCVRESINLFCWTPKSATYRQHAQPPKPSSDSSGGRSSAPYFSAECPDPPKTDLSRESIPLNDLKSEVSPRISAEDLIDLCELTVTGHFKTPSKKTKSSKPKLLVVDIRNSEDFIRGHISGSINIPFSAAFTAEGELTQGPYTAMLQNFKGKVIVIVGHVAKHTAEFAAHLVKMKYPRICILDGGINKIKPTGLLTIPSPQI

SEQ ID NO: 45790 - protein, 787 aa, Homo sapiens
MNKHGIVHRALSPHNILLDRKGHIKLAKFGLYHMTAHGDDVDFPIGYPSYLAPEVIAQGIFKTTDHMPSKKPLPSGPKSDVWSLGIILFELCVGRKLFQSLDISERLKFLLTLDCVDDTLIVLAEEHGCLDIIKELPETVIDLLNKCLTFHPSKRPTPDQLMKDKVFSEVSPLYTPFTKPASLFSSSLRCADLTLPEDISQLCKDINNDYLAERSIEEVYYLWCLAGGDLEKELVNKEIIRSKPPICTLPNFLFEDGESFGQGRDRSSLLDDTTVTLSLCQLRNRLKDVGGEAFYPLLEDDQSNLPHSNSNNELSAAATLPLIIREKDTEYQLNRIILFDRLLKAYPYKKNQIWKEARVDIPPLMRGLTWAALLGVEGAIHAKYDAIDKDTPIPTDRQIEVDIPRCHQYDELLSSPEGHAKFRRVLKAWVVSHPDLVYWQGLDSLCAPFLYLNFNNEALAYACMSAFIPKYLYNFFLKDNSHVIQEYLTVFSQMIAFHDPELSNHLNEIGFIPDLYAIPWFLTMFTHVFPLHKIFHLWDTLLLGNSSFPFCIGVAILQQLRDRLLANGFNECILLFSDLPEIDIERCVRESINLFCWTPKSATYRQHAQPPKPSSDSSGGRSSAPYFSAECPDPPKTDLSRESIPLNDLKSEVSPRISAEDLIDLCELTVTGHFKTPSKKTKSSKPKLLVVDIRNSEDFIRGHISGSINIPFSAAFTAEGELTQGPYTAMLQNFKGKVIVIVGHVAKHTAEFAAHLVKMKYPRICILDGGINKIKPTGLLTIPSPQI

SEQ ID NO: 45791 - protein, 95 aa, Homo sapiens [sequence omitted]

SEQ ID NO: 45792 - protein, 275 aa, Homo sapiens [sequence omitted]

SEQ ID NO: 45793 - protein, 174 aa, Homo sapiens
MAAVVRCQEQAQTTDWRATLKTIRNGVHKIDTYLNAALDLLGGEDGLCQYKCSDGSKPFPRYGYKPSPPNGCGSPLFGVHLNIGIPSLTKCCNQHDRCYETCGKSKNDCDEEFQYCLSKICRDVQKTLGLTQHVQACETTVELLFDSVIHLGCKPYLDSQRAACRCHYEEKTDL

SEQ ID NO: 45794 - protein, 85 aa, Homo sapiens
MKASSFKKLQKFYIDPYKLLPLQRFLPRPPGEKGPPRGGGRGGRGGGRGGGGRGGGRGGGFRGGRGGGGGGFRGGRGGGFRGRGH

SEQ ID NO: 45795 - protein, 1188 aa, Homo sapiens
MKWPFVPEKWQYKQAVGPEDKTNLKDVIGAGLQQLLASLRASILARDCAAAAAIVFLVDRFLYGLDVSGKLLQVAKGLHKLQPATPIAPQVVIRQARISVNSGKLLKAEYILSSLISNNGATGTWLYRNESDKVLVQSVCIQIRGQILQKLGMWYEAAELIWASIVGYLALPQPDKKGLSTSLGILADIFVSMSKNDYEKFKNNPQINLSLLKEFDHHLLSAAEACKLAAAFSAYTPLFVLTAVNIRGTCLLSYSSSNDCPPELKNLHLCEAKEAFEIGLLTKRDDEPVTGKQELHSFVKAAFGLTTVHRRLHGETGTVHAASQLCKEAMGKLYNFSTSSRSQDREALSQEVMSVIAQVKEHLQVQSFSNVDDRSYVPESFECRLDKLILHGQGDFQKILDTYSQHHTSVCEVFESDCGNNKNEQKDAKTGVCITALKTEIKNIDTVSTTQEKPHCQRDTGISSSLMGKNVQRELRRGGRRNWTHSDAFRVSLDQDVETETEPSDYSNGEGAVFNKSLSGSQTSSAWSNLSGFSSSASWEEVNYHVDDRSARKEPGKEHLVDTQCSTALSEELENDREGRAMHSLHSQLHDLSLQEPNNDNLEPSQNQPQQQMPLTPFSPHNTPGIFLAPGAGLLEGAPEGIQEVRNMGPRNTSAHSRPSYRSASWSSDSGRPKNMGTHPSVQKEEAFEIIVEFPETNCDVKDRQGKEQGEEISERGAGPTFKASPSWVDPEGETAESTEDAPLDFHRVLHNSLGNISMLPCSSFTPNWPVQNPDSRKSGGPVAEQGIDPDASTVDEEGQLLDSMDVPCTNGHGSHRLCILRQPPGQRAETPNSSVSGNILFPVLSEDCTTTEEGNQPGNMLNCSQNSSSSSVWWLKSPAFSSGSSEGDSPWSYLNSSGSSWVSLPGKMRKEILEARTLQPDDFEKLLAGVRHDWLFQRLENTGVFKPSQLHRAHSALLLKYSKKSELWTAQETIVYLGDYLTVKKKGRQRNAFWVHHLHQEEILGRYVGKDYKEQKGLWHHFTDVERQMTAQHYVTEFNKRLYEQNIPTQIFYIPSTILLILEDKTIKGCISVEPYILGEFVKLSNNTKVVKTEYKATEYGLAYGHFSYEFSNHRDVVVDLQGWVTGNGKGLIYLTDPQIHSVDQKVFTTNFGKRGIFYFFNNQHVECNEICHRLSLTRPSMEKPCT

SEQ ID NO: 45796 - protein, 986 aa, Homo sapiens
MTGDGGEYLRPEDLKELGDDSLPSSQFLDGMNYLRYSLEGGRSDSLRSFSSDRSHTLSHASYLRDSAVMDDSVVIPSHQVSTLAKEAERNSYRLSWGTENLDNVALSSSPIHSGFLVSFMVDARGGAMRGCRHNGLRIIIPPRKCTAPTRVTCRLVKRHRLATMPPMVEGEGLASRLIEVGPSGAQFLGPVIVEIPHFAALRGKERELVVLRSENGDSWKEHFCDYTEDELNEILNGMDEVLDSPEDLEKKRICRIITRDFPQYFAVVSRIKQDSNLIGPEGGVLSSTVVPQVQAVFPEGALTKRIRVGLQAQPMHSELVKKILGNKATFSPIVTLEPRRRKFHKPITMTIPVPKASSDVMLNGFGGDAPTLRLLCSITGGTTPAQWEDITGTTPLTFVNECVSFTTNVSARFWLIDCRQIQESVTFASQVYREIICVPYMAKFVVFAKSHDPIEARLRCFCMTDDKVDKTLEQQENFAEVARSRDVEVLEGKPIYVDCFGNLVPLTKSGQHHIFSFFAFKENRLPLFVKVRDTTQEPCGRLSFMKEPKSTRGLVHQAICNLNITLPIYTKESESDQEQEEEIDMTSEKNPQDEQERIEERLAYIADHLGFSWTELARELDFTEEQIHQIRIENPNSLQDQSHALLKYWLERDGKHATDTNLVECLTKINRMDIVHLMETNTEPLQERISHSYAEIEQTITLDHSEGFSVLQEELCTAQHKQKEEQAVSKESETCDHPPIVSEEDISVGYSTFQDGVPKTEGDSSATALFPQTHKEQVQQDFSGKMQDLPEESSLEYQQEYFVTTPGTETSETQKAMIVPSSPSKTPEEVSTPAEEEKLYLQTPTSSERGGSPIIQEPEEPSEHREESSPRKTSLVIVESADNQPETCERLDEDAAFEKGDDMPEIPPETVTEEEYIDEHGHTVVKKVTRKIIRRYVSSEGTEKEEIMVQGMPQEPVNIEEGDGYSKVIKRVVLKSDTEQSEDNNE

SEQ ID NO: 45797 - protein, 1047 aa, Homo sapiens
MTGDGGEYLRPEDLKELGDDSLPSSQFLDGMNYLRYSLEGGRSDSLRSFSSDRSHTLSHASYLRDSAVMDDSVVIPSHQVSTLAKEAERNSYRLSWGTENLDNVALSSSPIHSGFLVSFMVDARGGAMRGCRHNGLRIIIPPRKCTAPTRVTCRLVKRHRLATMPPMVEGEGLASRLIEVGPSGAQFLGPVIVEIPHFAALRGKERELVVLRSENGDSWKEHFCDYTEDELNEILNGMDEVLDSPEDLEKKRICRIITRDFPQYFAVVSRIKQDSNLIGPEGGVLSSTVVPQVQAVFPEGALTKRIRVGLQAQPMHSELVKKILGNKATFSPIVTLEPRRRKFHKPITMTIPVPKASSDVMLNGFGGDAPTLRLLCSITGGTTPAQWEDITGTTPLTFVNECVSFTTNVSARFWLIDCRQIQESVTFASQVYREIICVPYMAKFVVFAKSHDPIEARLRCFCMTDDKVDKTLEQQENFAEVARSRDVEVLEGKPIYVDCFGNLVPLTKSGQHHIFSFFAFKENRLPLFVKVRDTTQEPCGRLSFMKEPKSTRGLVHQAICNLNITLPIYTKESESDQEQEEEIDMTSEKNPQDEQERIEERLAYIADHLGFSWTELARELDFTEEQIHQIRIENPNSLQDQSHALLKYWLERDGKHATDTNLVECLTKINRMDIVHLMETNTEPLQERISHSYAEIEQTITLDHSEGFSVLQEELCTAQHKQKEEQAVSKESETCDHPPIVSEEDISVGYSTFQDGVPKTEGDSSATALFPQTHKEQVQQDFSGKMQDLPEESSLEYQQEYFVTTPGTETSETQKAMIVPSSPSKTPEEVSTPAEEEKLYLQTPTSSERGGSPIIQEPEEPSEHREESSPRKTSLVIVESADNQPETCERLDEDAAFEKGDDMPEIPPETVTEEEYIDEHGHTVVKKVTRKIIRRYVSSEGTEKEEIMVQGMPQEPVNIEEGDGYSKVIKRVVLKSDTEQSEVTLCEPSILSSTSQFQAEPVEGRRVSKVVKTTVVLGERMEKHLGDSSLATDLPSAKDDFEEDNNE

SEQ ID NO: 45798 - protein, 940 aa, Homo sapiens
MRGCRHNGLRIIIPPRKCTAPTRVTCRLVKRHRLATMPPMVEGEGLASRLIEVGPSGAQFLGPVIVEIPHFAALRGKERELVVLRSENGDSWKEHFCDYTEDELNEILNGMDEVLDSPEDLEKKRICRIITRDFPQYFAVVSRIKQDSNLIGPEGGVLSSTVVPQVQAVFPEGALTKRIRVGLQAQPMHSELVKKILGNKATFSPIVTLEPRRRKFHKPITMTIPVPKASSDVMLNGFGGDAPTLRLLCSITGGTTPAQWEDITGTTPLTFVNECVSFTTNVSARFWLIDCRQIQESVTFASQVYREIICVPYMAKFVVFAKSHDPIEARLRCFCMTDDKVDKTLEQQENFAEVARSRDVEVLEGKPIYVDCFGNLVPLTKSGQHHIFSFFAFKENRLPLFVKVRDTTQEPCGRLSFMKEPKSTRGLVHQAICNLNITLPIYTKIDMTSEKNPQDEQERIEERLAYIADHLGFSWTELARELDFTEEQIHQIRIENPNSLQDQSHALLKYWLERDGKHATDTNLVECLTKINRMDIVHLMETNTEPLQERISHSYAEIEQTITLDHSEGFSVLQEELCTAQHKQKEEQAVSKESETCDHPPIVSEEDISVGYSTFQDGVPKTEGDSSATALFPQTHKEQVQQDFSGKMQDLPEESSLEYQQEYFVTTPGTETSETQKAMIVPSSPSKTPEEVSTPAEEEKLYLQTPTSSERGGSPIIQEPEEPSEHREESSPRKTSLVIVESADNQPETCERLDEDAAFEKELTEELGELEASSDEEAMVTTRVVRRRVIIQGDDMPEIPPETVTEEEYIDEHGHTVVKKVTRKIIRRYVSSEGTEKEEIMVQGMPQEPVNIEEGDGYSKVIKRVVLKSDTEQSEVTLCEPSILSSTSQFQAEPVEGRRVSKVVKTTVVLGERMEKHLGDSSLATDLPSAKDDFEEDNNE

SEQ ID NO: 45799 - protein, 427 aa, Homo sapiens
MVGKWHLGFYRKECMPTRRGFDTFFGSLLGSGDYYTHYKCDSPGMCGYDLYENDNAAWDYDNGIYSTQMYTQRVQQILASHNPTKPIFLYIAYQAVHSPLQAPGRYFEHYRSIININRRRYAAMLSCLDEAINNVTLALKTYGFYNNSIIIYSSDNGGQPTAGGSNWPLRGSKGTYWEGGIRAVGFVHSPLLKNKGTVCKELVHITDWYPTLISLAEGQIDEDIQLDGYDIWETISEGLRSPRVDILHNIDPIYTKAKNGSWAAGYGIWNTAIQSAIRVQHWKLLTGNPGYSDWVPPQSFSNLGPNRWHNERITLSTGKSVWLFNITADPYERVDLSNRYPGIVKKLLRRLSQFNKTAVPVRYPPKDPRSNPRLNGGVWGPWYKEETKKKKPSKNQAEKKQKKSKKKKKKQQKAVSGSTCHSGVTCG

SEQ ID NO: 45800 - protein, 44 aa, Homo sapiens
MVTAERRGGFLARWRVFTVCWVHVCARSGAGRVVLRVESHLGPE

SEQ ID NO: 45801 - protein, 24 aa, Homo sapiens
MCWRRASPPCSSGVPSIKPSLLED

SEQ ID NO: 45802 - protein, 19 aa, Homo sapiens
MRGLECSLGRRASTCSPGP

SEQ ID NO: 45803 - protein, 533 aa, Homo sapiens
MLDEVRCTGNELSIEQCPKSSWGEHNCGHKEDAGVSCTPLTDGVIRLAGGKGSHEGRLEVYYRGQWGTVCDDGWTELNTYVVCRQLGFKYGKQASANHFEESTGPIWLDDVSCSGKETRFLQCSRRQWGRHDCSHREDVSIACYPGGEGHRLSLGFPVRLMDGENKKEGRVEVFINGQWGTICDDGWTDKDAAVICRQLGYKGPARARTMAYFGEGKGPIHVDNVKCTGNERSLADCIKQDIGRHNCRHSEDAGVICDYFGKKASGNSNKESLSSVCGLRLLHRRQKRIIGGKNSLRGGWPWQVSLRLKSSHGDGRLLCGATLLSSCWVLTAAHCFKRYGNSTRSYAVRVGDYHTLVPEEFEEEIGVQQIVIHREYRPDRSDYDIALVRLQGPEEQCARFSSHVLPACLPLWRERPQKTASNCYITGWGDTGRAYSRTLQQAAIPLLPKRFCEERYKGRFTGRMLCAGNLHEHKRVDSCQGDSGGPLMCERPGESWVVYGVTSWGYGCGVKDSPGVYTKVSAFVPWIKSVTKL

SEQ ID NO: 45804 - protein, 611 aa, Homo sapiens
MLPDTTGKGALMFAKRRERMDQITAQKEEDKVGGTPSREQDAAQTDGLRTTTSYQRKEEESVRTQSSVSKSYIEVSHGLGHVPQQNGFSGTSETANIQRMVPMNRTAKPFPGSVNQPATPFSPTRNMTSPIADFPAPPPYSAVTPPPDAFSRGVSSPIAGPAQPPPWPQPAPWSQPAFYDSSERIASRDERISVPAKRTGILQEAKRRSTTKPMFTFKEPKVSPNPELLSLLQNSEGKRGTGAGGDSGPEEDYLSLGAEACNFMQSSSAKQKTPPPVAPKPAVKSSSSQPVTPVSPVWSPGVAPTQPPAFPTSNPSKGTVVSSIKIAQPSYPPARPASTLNVAGPFKGPQAAVASQNYTPKPTVSTPTVNAVQPGAVGPSNELPGMSGRGAQLFAKRQSRMEKYVVDSDTVQAHAARAQSPTPSLPASWKYSSNVRAPPPVAYNPIHSPSYPLAALKSQPSAAQPSKMGKKKGKKPLNALDVMKHQPYQLNASLFTFQPPDAKDGLPQKSSVKVNSALAMKQALPPRPVNAASPTNVQASSVYSVPAYTSPPSFFAEASSPVSASPVPVGIPTSPKQESASSSYFVAPRPKFSAKKSGVTIQVWKPSVVEE

SEQ ID NO: 45805 - protein, 957 aa, Homo sapiens
MDDAAECFENMLERIHFHIVPSRDADMCTSKSCITHQKFAMTLYEQCVCRSCGASSDPLPFTEFVRYISTTALCNEVERMLERHERFKPEMFAELLQAANTTDDYRKCPSNCGQKIKIRRVLMNCPEIVTIGLVWDSEHSDLTEAVVRNLATHLYLPGLFYRVTDENAKNSELNLVGMICYTSQHYCAFAFHTKSSKWVFFDDANVKEIGTRWKDVVSKCIRCHFQPLLLFYANPDGTAVSTEDALRQVISWSHYKSVAENMGCEKPVIHKSDNLKENGFGDQAKQRENQKFPTDNISSSNRSHSHTGVGKGPAKLSHIDQREKIKDISRECALKAIEQKNLLSSQRKDLEKGQRKDLGRHRDLVDEDLSHFQSGSPPAPNGFKQHGNPHLYHSQGKGSYKHDRVVPQSRASAQIISSSKSQILAPGEKITGKVKSDNGTGYDTDSSQDSRDRGNSCDSSSKSRNRGWKPMRETLNVDSIFSESEKRQHSPRHKPNISNKPKSSKDPSFSNWPKENPKQKGLMTIYEDEMKQEIGSRSSLESNGKGAEKNKGLVEGKVHGDNWQMQRTESGYESSDHISNGSTNLDSPVIDGNGTVMDISGVKETVCFSDQITTSNLNKERGDCTSLQSQHHLEGFRKELRNLEAGYKSHEFHPESHLQIKNHLIKRSHVHEDNGKLFPSSSLQIPKDHNAREHIHQSDEQKLEKPNECKFSEWLNIENSERTGLPFHVDNSASGKRVNSNEPSSLWSSHLRTVGLKPETAPLIQQQNIMDQCYFENSLSTECIIRSASRSDGCQMPKLFCQNLPPPLPPKKYAITSVPQSEKSESTPDVKLTEVFKATSHLPKHSLSTASEPSLEVSTHMNDERHKETFQVRECFGNTPNCPSSSSTNDFQANSGAIDAFCQPELDSISTCPNETVSLTTYFSVDSCMTDTYRLKYHQRPKLSFPESSGFCNNSLS

SEQ ID NO: 45806 - protein, 579 aa, Homo sapiens
MDYRLMWEVRGSKGEVLYILDATNPRHSNWLRFVHEAPSQEQKNLAAIQEGENIFYLAVEDIETDTELLIGYLDSDMEAEEEEQQIMTVIKEGEVENSRRQSTAGRKDRLGCKEDYACPQCESSFTSEDILAEHLQTLHQKPTEEKEFKCKNCGKKFPVKQALQRHVLQCTAKSSLKESSRSFQCSVCNSSFSSASSFEQHQETCRGDARFVCKADSCGKRLKSKDALKRHQENVHTGDPKKKLICSVCNKKCSSASSLQEHRKIHEIFDCQECMKKFISANQLKRHMITHSEKRPYNCEICNKSFKRLDQVGAHKVIHSEDKPYKCKLCGKGFAHRNVYKNHKKTHSEERPFQCEECKALFRTPFSLQRHLLIHNSERTFKCHHCDATFKRKDTLNVHVQVVHERHKKYRCELCNKAFVTPSVLRSHKKTHTGEKEKICPYCGQKFASSGTLRVHIRSHTGERPYQCPYCEKGFSKNDGLKMHIRTHTREKPYKCSECSKAFSQKRGLDEHKRTHTGEKPFQCDVCDLAFSLKKMLIRHKMTHNPNRPLAECQFCHKKFTRNDYLKVHMDNIHGVADS

SEQ ID NO: 45807 - protein, 708 aa, Homo sapiens [sequence omitted]

SEQ ID NO: 45808 - protein, 665 aa, Homo sapiens
MDYLQVGVTSQKTMKLIPASRHRATQKVVIGDHDGVVMCFGMKKGEAAAVFKTLPGPKIARLELGGVINTPQEKIFIAAASEIRGFTKRGKQFLSFETNLTESIKAMHISGSDLFLSASYIYNHYCDCKDQHYYLSGDKINDVICLPVERLSRITPVLACQDRVLRVLQGSDVMYAVEVPGPPTVLALHNGNGGDSGEDLLFGTSDGKLALIQITTSKPVRKWEIQNEKKRGGILCIDSFDIVGDGVKDLLVGRDDGMVEVYSFDNANEPVLRFDQMLSESVTSIQGGCVGKDSYDEIVVSTYSGWVTGLTTEPIHKESGPGEELKINQEMQNKISSLRNELEHLQYKVLQERENYQQSSQSSKAKSAVPSFGINDKFTLNKDDASYSLILEVQTAIDNVLIQSDVPIDLLDVDKNSAVVSFSSCDSESNDNFLLATYRCQADTTRLELKIRSIEGQYGTLQAYVTPRIQPKTCQVRQYHIKPLSLHQRTHFIDHDRPMNTLTLTGQFSFAEVHSWVVFCLPEVPEKPPAGECVTFYFQNTFLDTQLESTYRKGEGVFKSDNISTISILKDVLSKEATKRKINLNISYEINEVSVKHTLKLIHPKLEYQLLLAKKVQLIDALKELQIHEGNTNFLIPEYHCILEEADHLQEEYKKQPAHLERLYG

SEQ ID NO: 45809 - protein, 144 aa, Homo sapiens
MDYLQVGVTSQKTMKLIPASRHRATQKVVIGDHDGVVMCFGMKKGEAAAVFKTLPGPKIARLELGGVINTPQEKIFIAAASEIRGFTKRGKQFLSFETNLTESIKAMYVFCSLLYFYILIYNILDRCEATKYHILIGFLENKIN

SEQ ID NO: 45810 - protein, 4895 aa, Homo sapiens
MYNPKQKQHDPKAETRLYITVNDFEFHVYNRSDLYGRLQELFGLEPTIIPPKKDDDKTREIGRTRTQSKIERVKVKTESQDPTSSWRSLIPVIKVNVSTGRLAFGNHYQPQTLCINFDDAFLTYTTKPPSSHLDQFMHIVKGKLENVRVMLVPSPRYVGLQNDEPPRLMGEGFVVMQSNDVDIYYYMDEPGLVPEETEENIEGEMSSEDCKLQDLPPCWGLDIVCGKGTDFNYGPWADRQRDCLWKFFFPPDYQVLKVSEIAQPGRPRQILAFELRMNIIADATIDLLFTKNRETNAVHVNVGAGSYLEINIPMTVEENGYTPAIKGQLLHVDATTSMQYRTLLEAEMLAFHINASYPRIWNMPQTWQCELEVYKATYHFIFAQKNFFTDLIQDWSSDSPPDIFSFVPYTWNFKIMFHQFEMIWAANQHNWIDCSTKQQENVYLAACGETLNIDFSLPFTDFVPATCNTKFSLRGEDVDLHLFLPDCHPSKYSLFMLVKNCHPNKMIHDTGIPAECQSGQKTVKPKWRNVTQEKSGWVECWTVPSVMLTIDYTWHPIYPQKADEQLKQSLSEMEETMLSVLRPSQKTSDRVVSSPSTSSRPPIDPSELPPDKLHVEMELSPDSQITLYGPLLNAFLCIKENYFGEDDMYMDFEEVISSPVLSLSTSSSSGWTAVGMENDKKENEGSAKSIHPLALRPWDITVLVNLYKVHGRLPVHGTTDGPECPTAFLERLCFEMKKGFRETMLQLILSPLNVFVSDNYQQRPPVDEVLREGHINLSGLQLRAHAMFSAEGLPLGSDSLEYAWLIDVQAGSLTAKVTAPQLACLLEWGQTFVFHVVCREYELERPKSVIICQHGIDRRFCESKLSCIPGPCPTSDDLKYTMIRLAVDGADIYIVEHGCATNIKMGAIRVANCNLHNQSVGEGISAAIQDFQVRQYIEQLNNCRIGLQPAVLRRAYWLEAGSANLGLITVDIALAADHHSKHEAQRHFLETHDARTKRLWFLWPDDILKNKRCRNKCGCLGGCRFFGGTVTGLDFFKLEELTPSSSSAFSSTSAESDMYYGQSLLQPGEWIITKEIPKIIDGNVNGMKRKEWENKSVGIEVERKTQHLSLQVPLRSHSSSSSSEENSSSSAAQPLLAGEKESPSSVADDHLVQKEFLHGTKRDDGQASIPTEISGNSPVSPNTQDKSVGQSPLRSPLKRQASVCSTRLGSTKSLTAAFYGDKQPVTVGVQFSSDVSRSDENVLDSPKQRRSFGSFPYTPSADSNSFHQYRSMDSSMSMADSEAYFSAAEEFEPISSDEGPGTYPGRKKKKKQTQQIDYSRGSIYHSVEGPLTGHGESIQDSRTLPFKTHPSQASFVSALGGEDDVIEHLYIVEGEKTVESEQITPQQPVMNCYQTYLTQFQVINWSVKHPTNKRTSKSSLHRPLDLDTPTSEESSSSFEQLSVPTFKVIKQGLTANSLLDRGMQLSGSTSNTPYTPLEKKLADNTDDETLTEEWTLDQPVSQTRTTAIVEVKGTVDIVLTPLVAEALDRYIEAMVHCASTRHPAAIVDDLHAKVLREAVQNSKTTFSENLSSKQDIRGTKTEQSTIGTTNQGQAQTNLTMKQDNVTIKGLQTNVSIPKVNLCLLQASVEESPTTAPSRSVTHVSLVALCFDRIATQVRMNRGVVEETSNNAEPGRTSNFDRYVHATKMQPQSSGSLRSNAGAEKGKEIAAKLNIHRVHGQLRGLDTTDIGTCAITAIPFEKSKVLFTLEELDEFTFVDETDQQAVPDVTRIGPSQEKWGWIMFECGLENLTIKGGRQSGAVLYNSFGIMGKASDTERGGVLTSNNSSDSPTGSGYNTDVSDDNLPCDRTSPSSDLNGNSVSDEQDEGVESDDLKKDLPLMPPPPDSCSMKLTIKEIWFSFAAPTNVRSHTHAFSRQLNLLSTATPAVGAWLVPIDQLKSSLNKLETEGTLRICAVMGCIMTEALENKSVHFPLRSKYNRLTKVARFLQENPSCLLCNILHHYLHQANYSIIDDATMSDGLPALVTLKKGLVALARQWMKFIVVTPAFKGVSLHRPAQPLKPQIAMDHEHEDGLGLDNGGGLQSDTSADGAEFEFDAATVSEHTMLLEGTANRPPPGSSGPVTGAEIMRKLSKTHTHSDSALKIKGIHPYHSLSYTSGDTATDSPVHVGRAGMPVKDSPRKESLLSYLTGSFPSLHNLLEGTPQRSSAAVKSSSLTRTGNTVATDMLSEHPLLSEPSSVSFYNWMSNAVGNRGSVLQESPVTKSGHNSLPTGVAPNLPTIPSASDFNTVLSSDQNTLDGTHSQHSTSQDDVAGVEEANQGFPAVQLADAQVVFKPLLSHTGIQSQDTMPFCYRMYFGEHLSFSGTLDCLRADIVDSDTAKERKGKRARRQGHVNLPPLEFKPALMLGTFSISAVVMEKSVCTPQNSTSALSFHDLSKRYYNTFHCNFTISCQSISQHVDMALVRLIHQFSTMIDDIKATQTDIKLSRYTAGSASPTPTFKTRKHRDFRSSDFSRSSRGSLNGGNRVNNAKNKRTNNENNKKESRNKNSLGRSERRTSKVSRKGSKDVVDHMTIHMDDSDSITVSEQSEPSAECWQNMYKLLNFYSLISDPTGILEKSSETFGPAGVRSPTEPTCKVVFENEQDNSSLTKTQRKRSLVTSEPQHVTLIVFGIGMVNRTHLEADIGGLTMESELKRIHGSFTLKEKMKDVLHQKMTETCATAHIGGVNIVLLEGITPNIQLEDFPTSPTSTAKQEFLTVVKCSIAKSQALYSAQRGLKTNNAAVFKVGAISINIPQHPATLHSMMVRSSHQLSKQISDLIRQPSTAPQPVKEDIATPLPSEKTPTSVNQTPVETNEFPQLPEGLEKKPIVLKFSAMLDGIAIGAALLPSLKAEYKMGRMRSHGMTGAQTRFTFELPNHRLRFTSKVSATDMSTIPPSASLNLPPVTMSGKYIMEEHDSYSDQVWSIDELPSKQGYYLQGNYLRCVAEVGSFEHNLTTDLLNHLVFVQKVFMKEVNEVIQKVSGGEQPIPLWNEHDGTADGDKPKILLYSLNLQFKGIQVTATTPSMRAVRFETGLIELELSNRLQTKASPGSSSYLKLFGKCQVDLNLALGQIVKHQVYEEAGSDFHQVAYFKTRIGLRNALREEISGSSDREAVLITLNRPIVYAQPVAFDRAVLFWLNYKAAYDNWNEQRMALHKDIHMATKEVVDMLPGIQQTSAQAFGTLFLQLTVNDLGICLPITNTAQSNHTGDLDTGSALVLTIESTLITACSSESLVSKGHFKNFCIRFADGFETSWDDWKPEIHGDLVMNACVVPDGTYEVCSRTTGQAAAESSSAGTWTLNVLWKMCGIDVHMDPNIGKRLNALGNTLTTLTGEEDIDDIADLNSVNIADLSDEDEVDTMSPTIHTEATDYRRQAASASQPGELRGRKIMKRIVDIRELNEQAKVIDDLKKLGASEGTINQEIQRYQQLESVAVNDIRRDVRKKLRRSSMRAASLKDKWGLSYKPSYSRSKSISASGRPPLKRMERASSRVGETEELPEIRVDAASPGPRVTFNIQDTFPEETELDLLSVTIEGPSHYSSNSEGSCSVFSSPKTPGGFSPGIPFQTEEGRRDDSLSSTSEDSEKDEKDEDHERERFYIYRKPSHTSRKKATGFAAVHQLFTERWPTTPVNRSLSGTATERNIDFELDIRVEIDSGKCVLHPTTLLQEHDDISLRRSYDRSSRSLDQDSPSKKKKFQTNYASTTHLMTGKKVPSSLQTKPSDLETTVFYIPGVDVKLHYNSKTLKTESPNASRGSSLPRTLSKESKLYGMKDSATSPPSPPLPSTVQSKTNTLLPPQPPPIPAAKGKGSGGVKTAKLYAWVALQSLPEEMVISPCLLDFLEKALETIPITPVERNYTAVSSQDEDMGHFEIPDPMEESTTSLVSSSTSAYSSFPVDVVVYVRVQPSQIKFSCLPVSRVECMLKLPSLDLVFSSNRGELETLGTTYPAETLSPGGNATQSGTKTSASKTGIPGSSGLGSPLGRSRHSSSQSDLTSSSSSSSGLSFTACMSDFSLYVFHPYGAGKQKTAVSGLTPGSGGLGNVDEEPTSVTGRKDSLSINLEFVKVSLSRIRRSGGASFFESQSVSKSASKMDTTLINISAVCDIGSASFKYDMRRLSEILAFPRAWYRRSIARRLFLGDQTINLPTSGPGTPDSIEGVSQHLSPESSRKAYCKTWEQPSQSASFTHMPQSPNVFNEHMTNSTMSPGTVGQSLKSPASIRSRSVSDSSVPRRDSLSKTSTPFNKSNKAASQQGTPWETLVVFAINLKQLNVQMNMSNVMGNTTWTTSGLKSQGRLSVGSNRDREISMSVGLGRSQLDSKGGVVGGTIDVNALEMVAHISEHPNQQPSHKIQITMGSTEARVDYMGSSILMGIFSNADLKLQDEWKVNLYNTLDSSITDKSEIFVHGDLKWDIFQVMISRSTTPDLIKIGMKLQEFFTQQFDTSKRALSTWGPVPYLPPKTMTSNLEKSSQEQLLDAAHHRHWPGVLKVVSGCHISLFQIPLPEDGMQFGGSMSLHGNHMTLACFHGPNFRSKSWALFHLEEPNIAFWTEAQKIWEDGSSDHSTYIVQTLDFHLGHNTMVTKPCGALESPMATITKITRRRHENPPHGVASVKEWFNYVTATRNEELNLLRNVDANNTENSTTVKNSSLLSGFRGGSSYNHETETIFALPRMQLDFKSIHVQEPQEPSLQDASLKPKVECSVVTEFTDHICVTMDAELIMFLHDLVSAYLKEKEKAIFPPRILSTRPGQKSPIIIHDDNSSDKDREDSITYTTVDWRDFMCNTWHLEPTLRLISWTGRKIDPVGVDYILQKLGFHHARTTIPKWLQRGVMDPLDKVLSVLIKKLGTALQDEKEKKGKDKEEH

SEQ ID NO: 45811 - protein, 1599 aa, Homo sapiens
MDPNIGKRLNALGNTLTTLTGEEDIDDIADLNSVNIADLSDEDEVDTMSPTIHTSSDGSSISGDGHKLTFGQRLVNHLLGLTPPNQRHSVPAEYLCDPEMWGSPQSSQSHLKACRAHSWGNEATDYRRQAASASQPGELRGRKIMKRIVDIRELNEQAKVIDDLKKLGASEGTINQEIQRYQQLESVAVNDIRRDVRKKLRRSSMRAASLKDKWGLSYKPSYSRSKSISASGRPPLKRMERASSRVGETEELPEIRVDAASPGPRVTFNIQDTLKNTVWGSTPQSSCPGEGYFQFPEETELDLLSVTIEGPSHYSSNSEGSCSVFSSPKTPGGFSPGIPFQTEEGRRDDSLSSTSEDSEKDEKDEDHERERFYIYRKPSHTSRKKATGFAAVHQLFTERWPTTPVNRSLSGTATERNIDFELDIRVEIDSGKCVLHPTTLLQEHDDISLRRSYDRSSRSLDQDSPSKKKKFQTNYASTTHLMTGKKVPSSLQTKPSDLETTVFYIPGVDVKLHYNSKTLKTESPNASRGSSLPRTLSKESKLYAKGKGSGGVKTAKLYAWVALQSLPEEMVISPCLLDFLEKALETIPITPVERNYTAVSSQDEDMGHFEIPDPMEESTTSLVSSSTSAYSSFPVDVVVYVRVQPSQIKFSCLPVSRVECMLKLPSLDLVFSSNRGELETLGTTYPAETLSPGGNATQSGTKTSASKTGIPGSSGLGSPLGRSRHSSSQSDLTSSSSSSSGLSFTACMSDFSLYVFHPYGAGKQKTAVSGLTPGSGGLGNVDEEPTSVTGRKDSLSINLEFVKVSLSRIRRSGGASFFESQSVSKSASKMDTTLINISAVCDIGSASFKYDMRRLSEILAFPRAWYRRSIARRLFLGDQTINLPTSGPGTPDSIEGVSQHLSPESSRKAYCKTWEQPSQSASFTHMPQSPNVFNEHMTNSTMSPGTVGQSLKSPASIRSRSVSDSSVPRRDSLSKTSTPFNKSNKAASQQGTPWETLVVFAINLKQLNVQMNMSNVMGNTTWTTSGLKSQGRLSVGSNRDREISMSVGLGRSQLDSKGGVVGGTIDVNALEMVAHISEHPNQQPSHKIQITMGSTEARVDYMGSSILMGIFSNADLKLQDEWKVNLYNTLDSSITDKSEIFVHGDLKWDIFQVMISRSTTPDLIKIGMKLQEFFTQQFDTSKRALSTWGPVPYLPPKTMTSNLEKSSQEQLLDAAHHRHWPGVLKVVSGCHISLFQIPLPEDGMQFGGSMSLHGNHMTLACFHGPNFRSKSWALFHLEEPNIAFWTEAQKIWEDGSSDHSTYIVQTLDFHLGHNTMVTKPCGALESPMATITKITRRRHENPPHGVASVKEWFNYVTATRNEELNLLRNVDANNTENSTTVKNSSLLSGFRGGSSYNHETETIFALPRMQLDFKSIHVQEPQEPSLQDASLKPKVECSVVTEFTDHICVTMDAELIMFLHDLVSAYLKEKEKAIFPPRILSTRPGQKSPIIIHDDNSSDKDREDSITYTTVDWRDFMCNTWHLEPTLRLISWTGRKIDPVGVDYILQKLGFHHARTTIPKWLQRGVMDPLDKVLSVLIKKLGTALQDEKEKKGKDKEEH

SEQ ID NO: 45812 - protein, 105 aa, Homo sapiens
MVEYGTCMCLVKGIFYHCSNDDEGDSYSDNPCSCSQSHCCSRYLCMGAMSLFLPCLLCYPPAKGCLKLCRRCYDWIHRPGCRCKNSNTVYCKLESCPSRGQGKPS

SEQ ID NO: 45813 - protein, 170 aa, Homo sapiens [sequence omitted]

SEQ ID NO: 45814 - protein, 34 aa, Homo sapiens
MFQEFLMPFEETFPILHLPKVMLLTYYLSVSSVL

SEQ ID NO: 45815 - protein, 48 aa, Homo sapiens
MRGRARTSRLGALEKELELHSNSQASSCFCLCVKQIVTTHFETQAPGL

SEQ ID NO: 45816 - protein, 362 aa, Homo sapiens
MASLYVGDLHADVTEDLLFRKFSTVGPVLSIRICRDQVTRRSLGYAYVNFLQLADAQKALDTMNFDIIKGKSIRLMWSQRDAYLRRSGIGNVFIKNLDKSIDNKTLYEHFSAFGKILSSKVMSDDQGSKGYAFVHFQNQSAADRAIEEMNGKLLKGCKVFVGRFKNRKDREAELRSKASEFTNVYIKNFGGDMDDERLKDVFSKYGKTLSVKVMTDSSGKSKGFGFVSFDSHEAAKKAVEEMNGRDINGQLIFVGRAQKKVERQAELKQMFEQLKRERIRGCQGVKLYIKNLDDTIDDEKLRNEFSSFGSISRVKVMQEEGQSKGFGLICFSSPEDATKAMTEMNGRILGSKPLSIALAQRH

SEQ ID NO: 45817 - protein, 460 aa, Homo sapiens
MESPTCLRDSRSPVEVFVPPCVSTPEFIHAAMRPDVITETVVEVSTEESEPMDTSPIPTSPDSHEPMKKKKGNTTYLWEFLLDLLQDKNTCPRYIKWTQREKGIFKLVDSKAVSKLWGKHKNKPDMNYETMGRALRYYYQRGILAKVEGQRLVYQFKDMPKNIVVIDDDKSETCNEDLAGTTDEKSLERVSLSAESLLKAASSVRSGKNSSPINCSRAEKGVARVVNITSPGHDASSRSPTTTASVSATAAPRTVRVAMQVPVVMTSLGQKISTVAVQSVNAGAPLITSTSPTTATSPKVVIQTIPTVMPASTENGDKITMQPAKIITIPATQLAQCQLQTKSNLTGSGSINIVGTPLAVRALTPVSIAHGTPVMRLSMPTQQASGQTPPRVISAVIKGPEVKSEAVAKKQEHDVKTLQLVEEKPADGNKTVTHVVVVSAPSAIALPVTMKTEGLVTCEK

SEQ ID NO: 45818 - protein, 208 aa, Homo sapiens [sequence omitted]

SEQ ID NO: 45819 - protein, 527 aa, Homo sapiens
MDEEISIYDGRWEIEELKENQVPGDRGLVLKSRAKHHAISAVLAKPFIFADKPLIVQYEVNFQDGIDCGGAYIKLLADTDDLILENFYDKTSYIIMFGPDKCGEDYKLHFIFRHKHPKTGVFEEKHAKPPDVDLKKFFTDRKTHLYTLVMNPDDTFEVLVDQTVVNKGSLLEDVVPPIKPPKEIEDPNDKKPEEWDERAKIPDPSAVKPEDWDESEPAQIEDSSVVKPAGWLDDEPKFIPDPNAEKPDDWNEDTDGEWEAPQILNPACRIGCGEWKPPMIDNPKYKGVWRPPLVDNPNYQGIWSPRKIPNPDYFEDDHPFLLTSFSALGLELWSMTSDIYFDNFIICSEKEVADHWAADGWRWKIMIANANKPGVLKQLMAAAEGHPWLWLIYLVTAGVPIALITSFCWPRKVKKKHKDTEYKKTDICIPQTKGVLEQEEKEEKAALEKPMDLEEEKKQNDGEMLEKEEESEPEEKSEEEIEIIEGQEESNQSNKSGSEDEMKEADESTGSGDGPIKSVRKRRVRKD

SEQ ID NO: 45820 - protein, 436 aa, Homo sapiens
MSLIQACCSLALSTWLLSFCFVHLLCLDFTVAEKEEWYTAFVNITYAEPAPDPGAGAAGGGGAELHTEKTECGRYGEHSPKQDARGEVVMASSAHDRLACDPNTKFAAPTRGKNWIALIPKGNCTYRDKIRNAFLQNASAVVIFNVGSNTNETITMPHAGVEDIVAIMIPEPKGKEIVSLLERNITVTMYITIGTRNLQKYVSRTSVVFVSISFIVLMIISLAWLVFYYIQRFRYANARDRNQRRLGDAAKKAISKLQIRTIKKGDKETESDFDNCAVCIEGYKPNDVVRILPCRHLFHKSCVDPWLLDHRTCPMCKMNILKALGIPPNADCMDDLPTDFEGSLGGPPTNQITGASDTTVNESSVTLDPAVRTVGALQVVQDTDPIPQEGDVIFTTNSEQEPAVSSDSDISLIMAMEVGLSDVELSTDQDCEEVKS

SEQ ID NO: 45821 - protein, 566 aa, Homo sapiens
MGKLCIEVTPQSKIAWISETLCIGCGICIKKCPFGALSIVNLPSNLEKETTHRYCANAFKLHRLPIPRPGEVLGLVGTNGIGKSTALKILAGKQKPNLGKYDDPPDWQEILTYFRGSELQNYFTKILEDDLKAIIKPQYVDQIPKAAKGTVGSILDRKDETKTQAIVCQQLDLTHLKERNVEDLSGGELQRFACAVVCIQKADIFMFDEPSSYLDVKQRLKAAITIRSLINPDRYIIVVEHDLSVLDYLSDFICCLYGVPSAYGVVTMPFSVREGINIFLDGYVPTENLRFRDASLVFKVAETANEEEVKKMCMYKYPGMKKKMGEFELAIVAGEFTDSEIMVMLGENGTGKTTFIRMLAGRLKPDEGGEVPVLNVSYKPQKISPKSTGSVRQLLHEKIRDAYTHPQFVTDVMKPLQIENIIDQEVQTLSGGELQRVALALCLGKPADVYLIDEPSAYLDSEQRLMAARVVKRFILHAKKTAFVVEHDFIMATYLADRVIVFDGVPSKNTVANSPQTLLAGMNKFLSQLEITFRRDPNNYRPRINKLNSIKDVEQKKSGNYFFLDD

SEQ ID NO: 45822 - protein, 418 aa, Homo sapiens
MEELEKALSCPGQPSNCVTIPRSLDGRLQVSHRKGLPHVIYCRVWRWPDLQSHHELKPLECCEFPFGSKQKEVCINPYHYKRVESPVLPPVLVPRHSEYNPQHSLLAQFRNLGQNEPHMPLNATFPDSFQQPNSHPFPHSPNSSYPNSPGSSSSTYPHSPTSSDPGSPFQMPADTPPPAYLPPEDPMTQDGSQPMDTNMMAPPLPSEINRGDVQAVAYEEPKHWCSIVYYELNNRVGEAFHASSTSVLVDGFTDPSNNKNRFCLGLLSNVNRNSTIENTRRHIGKGVHLYYVGGEVYAECLSDSSIFVQSRNCNYHHGFHPTTVCKIPSGCSLKIFNNQEFAQLLAQSVNHGFETVYELTKMCTIRMSFVKGWGAEYHRQDVTSTPCWIEIHLHGPLQWLDKVLTQMGSPHNPISSVS

SEQ ID NO: 45823 - protein, 370 aa, Homo sapiens
MLLSDGLKRKLCVQTTLKDHTEGLSDKEQRFVDKLYTGLIQGQRACLAEAITLVESTHSRKKELAQVLLQKVLLYHREQEQSNKGKPLAFRVGLSGPPGAGKSTFIEYFGKMLTERGHKLSVLAVDPSSCTSGGSLLGDKTRMTELSRDMNAYIRPSPTRGTLGGVTRTTNEAILLCEGAGYDIILIETVGVGQSEFAVADMVDMFVLLLPPAGGDELQGIKRGIIEMADLVAVTKSDGDLIVPARRIQAEYVSALKLLRKRSQVWKPKVIRISARSGEGISEMWDKMKDFQDLMLASGELTAKRRKQQKVWMWNLIQESVLEHFRTHPTVREQIPLLEQKVLIGALSPGLAADFLLKALKAETNKIHPV

SEQ ID NO: 45824 - protein, 328 aa, Homo sapiens [sequence omitted]

SEQ ID NO: 45825 - protein, 346 aa, Homo sapiens
MVGIVLAIAGAKLEPSIGVNGGPLKPEITVSYIAVATIFFNSGLSLKTEELTSALVHLKLHLFIQIFTLAFFPATIWLFLQLLSITPINEWLLKGLQTVGCMPPPVSSAVILTKAVGGNEAAAIFNSAFGSFLGIVITPLLLLLFLGSSSSVPFTSIFSQLFMTVVVPLIIGQIVRRYIKDWLERKKPPFGAISSSVLLMIIYTTFCDTFSNPNIDLDKFSLVLILFIIFSIQLSFMLLTFIFSTRNNSGFTPADTVAIIFCSTHKSLTLGIPMLKIVFAGHEHLSLISVPLLIYHPAQILLGSVLVPTIKSWMVSRQKKLLQTRGPLANLNNPEGLEYLSIKFGH

SEQ ID NO: 45826 - protein, 683 aa, Homo sapiens
MALSVTETLIKPLEKFRKEQLGAVKEEKKKFDKETEKNYSLIDKHLNLSAKKKDSHLQEADIQVEQNRQHFYELSLEYVCKLQEIQERKKFEFVEPMLSFFQGMFTFYHQGHELAKDFNHYKMELQINIQNTRNRFEGTRSEVEELMNKIRQNPKDHKRASQFTAEGYLYVQEKRPAPFGSSWVKHYCMYRKAAKKFNMIPFEHRSGGKLGDGEVFFLKECTKRHTDSIDRRFCFDIEAADRPGVSLTMQAFSEEERKQWLEALGGKEALSHSFNTAIIPRPEGNAQLDKMGFTIIRKCISAVETRGINDQGLYRVVGVSSKVQRLLSMLMDVKTCNEVDLENSADWEVKTITSALKQYLRSLPEPLMTYELHGDFIVPAKSGSPESRVNAIHFLVHKLPEKNKEMLDILVKHLTNVSNHSKQNLMTVANLGVVFGPTLMRPQEETVAALMDLKFQNIVVEILIENHEKIFRTPPDTTFPEPTCLSASPPNAPPRQSKRQGQRTKRPVAVYNLCLELEDGDNPYPSKEDTPTSSLDSLSSPSPVTTAVPGPPGPDKNHLLADGGSFGDWASTIPGQTRSSMVQWLNPQSPTTTSSNSAVTPLSPGSSPFPFSPPATVADKPPESIRSRKARAVYPCEAEHSSELSFEIGAIFEDVQTSREPGWLEGTLNGKRGLIPQNYVKLL

SEQ ID NO: 45827 - protein, 304 aa, Homo sapiens
MLMDVKTCNEVDLENSADWEVKTITSALKQYLRSLPEPLMTYELHGDFIVPAKSGSPESRVNAIHFLVHKLPEKNKEMLDILVKHLTNVSNHSKQNLMTVANLGVVFGPTLMRPQEETVAALMDLKFQNIVVEILIENHEKIFRTPPDTTFPEPTCLSASPPNAPPRQSKRQGQRTKRPVAVYNLCLELEDGDNPYPSKEDTPTSSLDSLSSPSPVTTAVPGPPGPDKNHLLADGGSFGDWASTIIRSRKARAVYPCEAEHSSELSFEIGAIFEDVQTSREPGWLEGTLNGKRGLIPQNYVKLL

SEQ ID NO: 45828 - protein, 2758 aa, Homo sapiens
MVDLLEKCDITCQAEVWSMFTAILKKSIRNLQVCTEVGLVEKVLGKIEKVDNMIADLLVDMLGVLASYNLTVRELKLFFSKLQGDKGRWPPHAGKLLSVLKHMPQKYGPDAFFNFPGKSAAAIALPPIAKWPYQNGFTFHTWLRMDPVNNINVDKDKPYLYCFRTSKGLGYSAHFVGGCLIVTSIKSKGKGFQHCVKFDFKPQKWYMVTIVHIYNRWKNSELRCYVNGELASYGEITWFVNTSDTFDKCFLGSSETADANRVFCGQMTAVYLFSEALNAAQIFAIYQLGLGYKGTFKFKAESDLFLAEHHKLLLYDGKLSSAIAFTYNPRATDAQLCLESSPKDNPSIFVHSPHALMLQDVKAVLTHSIQSAMHSIGGVQVLFPLFAQLDYRQYLSDEIDLTICSTLLAFIMELLKNSIAMQEQMLACKGFLVIGYSLEKSSKSHVSRAVLELCLAFSKYLSNLQNGMPLLKQLCDHVLLNPAIWIHTPAKVQLMLYTYLSTEFIGTVNIYNTIRRVGTVLLIMHTLKYYYWAVNPQDRSGITPKGLDGPRPNQKEMLSLRAFLLMFIKQLVMKDSGVKEDELQAILNYLLTMHEDDNLMDVLQLLVALMSEHPNSMIPAFDQRNGLRVIYKLLASKSEGIRVQALKAMGYFLKHLAPKRKAEVMLGHGLFSLLAERLMLQTNLITMTTYNVLFEILIEQIGTQVIHKQHPDPDSSVKIQNPQILKVIATLLRNSPQCPESMEVRRAFLSDMIKLFNNSRENRRSLLQCSVWQEWMLSLCYFNPKNSDEQKITEMVYAIFRILLYHAVKYEWGGWRVWVDTLSITHSKVTFEIHKENLANIFREQQGKVDEEIGLCSSTSVQAASGIRRDINVSVGSQQPDTKDSPVCPHFTTNGNENSSIEKTSSLESASNIELQTTNTSYEEMKAEQENQELPDEGTLEETLTNETRNADDLEVSSDIIEAVAISSNSFITTGKDSMTVSEVTASISSPSEEDASEMPEFLDKSIVEEEEDDDYVELKVEGSPTEEANLPTELQDNSLSPAASEAGEKLDMFGNDDKLIFQEGKPVTEKQTDTETQDSKDSGIQTMTASGSSAMSPETTVSQIAVESDLGQMLEEGKKATNLTRETKLINDCHGSVSEASSEQKIAKLDVSNVATDTERLELKASPNVEAPQPHRHVLEISRQHEQPGQGIAPDAVNGQRRDSRSTVFRIPEFNWSQMHQRLLTDLLFSIETDIQMWRSHSTKTVMDFVNSSDNVIFVHNTIHLISQVMDNMVMACGGILPLLSAATSATHELENIEPTQGLSIEASVTFLQRLISLVDVLIFASSLGFTEIEAEKSMSSGGILRQCLRLVCAVAVRNCLECQQHSQLKTRGDKALKPMHSLIPLGKSAAKSPVDIVTGGISPVRDLDRLLQDMDINRLRAVVFRDIEDSKQAQFLALAVVYFISVLMVSKYRDILEPQNERHSQSCTETGSENENVSLSEITPAAFSTLTTASVEESESTSSARRRDSGIGEETATGLGSHVEVTPHTAPPGVSAGPDAISEVLSTLSLEVNKSPETKNDRGNDLDTKATPSVSVSKNVNVKDILRSLVNIPADGVTVDPALLPPACLGALGDLSVEQPVQFRSFDRSVIVAAKKSAVSPSTFNTSIPTNAVSVVSSVDSAQASDMGGESPGSRSSNAKLPSVPTVDSVSQDPVSNMSITERLEHALEKAAPLLREIFVDFAPFLSRTLLGSHGQELLIEGTSLVCMKSSSSVVELVMLLCSQEWQNSIQKNAGLAFIELVNEGRLLSQTMKDHLVRVANEAEFILSRQRAEDIHRHAEFESLCAQYSADKREDEKMCDHLIRAAKYRDHVTATQLIQKIINILTDKHGAWGNSAVSRPLEFWRLDYWEDDLRRRRRFVRNPLGSTHPEATLKTAVEHATDEDILAKGKQSIRSQALGNQNSENEILLEGDDDTLSSVDEKDLENLAGPVSLSTPAQLVAPSVVVKGTLSVTSSELYFEVDEEDPNFKKIDPKILAYTEGLHGKWLFTEIRSIFSRRYLLQNTALEIFMANRVAVMFNFPDPATVKKVVNYLPRVGVGTSFGLPQTRRISLASPRQLFKASNMTQRWQHREISNFEYLMFLNTIAGRSYNDLNQYPVFPWVITNYESEELDLTLPTNFRDLSKPIGALNPKRAAFFAERYESWEDDQVPKFHYGTHYSTASFVLAWLLRIEPFTTYFLNLQGGKFDHADRTFSSISRAWRNSQRDTSDIKELIPEFYYLPEMFVNFNNYNLGVMDDGTVVSDVELPPWAKTSEEFVHINRLALESEFVSCQLHQWIDLIFGYKQQGPEAVRALNVFYYLTYEGAVNLNSITDPVLREAVEAQIRSFGQTPSQLLIEPHPPRGSAMQVSPLMFTDKAQQDVIMVLKFPSNSPVTHVAANTQPGLATPAVITVTANRLFAVNKWHNLPAHQGAVQDQPYQLPVEIDPLIASNTGMHRRQITDLLDQSIQVHSQCFVITSDNRYILVCGFWDKSFRVYSTDTGRLIQVVFGHWDVVTCLARSESYIGGNCYILSGSRDATLLLWYWNGKCSGIGDNPGSETAAPRAILTGHDYEVTCAAVCAELGLVLSGSQEGPCLIHSMNGDLLRTLEGPENCLKPKLIQASREGHCVIFYENGLFCTFSVNGKLQATMETDDNIRAIQLSRDGQYLLTGGDRGVVVVRQVSDLKQLFAYPGCDAGIRAMALSYDQRCIISGMASGSIVLFYNDFNRWHHEYQTRY

SEQ ID NO: 45829 - protein, 787 aa, Homo sapiens
MNTEQSQNSIVSRIKVFEGQTNIETSGLPKKPEITPRSLPPKPTVSSGKPSVAPKPAANRASGEWDSGTENRLKVTSKEGLTPYPPLQEAGSIPVTKPELPKKPNPGLIRSVNPEIPGRGPLAESSDSGKKVPTPAPRPLLLKKSVSSENPTYPSAPLKPVTVPPRLAGASQAKAYKSLGEGPPANPPVPVLQSKPLVDIDLISFDDDVLPTPSGNLAEESVGSEMVLDPFQLPAKTEPIKERAVQPAPTRKPTVIRIPAKPGKCLHEDPQSPPPLPAEKPIGNTFSTVSGKLSNVERTRNLESNHPGQTGGFVRVPPRLPPRPVNGKTIPTQQPPTKVPPERPPPPKLSATRRSNKKLPFNRSSSDMDLQKKQSNLATGLSKAKSQVFKNQDPVLPPRPKPGHPLYSKYMLSVPHGIANEDIVSQNPGELSCKRGDVLVMLKQTENNYLECQKGEDTGRVHLSQMKIITPLDEHLRSRPNDPSHAQKPVDSGAPHAVVLHDFPAEQVDDLNLTSGEIVYLLEKIDTDWYRGNCRNQIGIFPANYVKVIIDIPEGGNGKRECVSSHCVKGSRCVARFEYIGEQKDELSFSEGEIIILKEYVNEEWARGEVRGRTGIFPLNFVEPVEDYPTSGANVLSTKVPLKTKKEDSGSNSQVNSLPAEWCEALHSFTAETSDDLSFKRGDRIQILERLDSDWCRGRLQDREGIFPAVFVRPCPAEAKSMLAIVPKGRKAKALYDFRGENEDELSFKAGDIITELESVDDDWMSGELMGKSGIFPKNYIQFLQIS

SEQ ID NO: 45830 - protein, 764 aa, Homo sapiens
MNTEQSQNSIVSRIKVFEGQTNIETSGLPKKPEITPRSLPPKPTVSSGKPSVAPKPAANRASGEWDSGTENRLKVTSKEGLTPYPPLQEAGSIPVTKPELPKKPNPGLIRSVNPEIPGRGPLAESSDSGKKVPTPAPRPLLLKKSVSSENPTYPSAPLKPVTVPPRLAGASQAKAYKSLGEGPPANPPVPVLQSKPLVDIDLISFDDDVLPTPSGNLAEESVGSEMVLDPFQLPAKTEPIKERAVQPAPTRKPTVIRIPAKPGKCLHEDPQSPPPLPAEKPIGNTFSTVSGKLSNVERTRNLESNHPGQTGGFVRVPPRLPPRPVNGKTIPTQQPPTKVPPERPPPPKLSATRRSNKKLPFNRSSSDMDLQKKQSNLATGLSKAKSQVFKNQDPVLPPRPKPGHPLYSKYMRGDVLVMLKQTENNYLECQKGEDTGRVHLSQMKIITPLDEHLRSRPNDPSHAQKPVDSGAPHAVVLHDFPAEQVDDLNLTSGEIVYLLEKIDTDWYRGNCRNQIGIFPANYVKVIIDIPEGGNGKRECVSSHCVKGSRCVARFEYIGEQKDELSFSEGEIIILKEYVNEEWARGEVRGRTGIFPLNFVEPVEDYPTSGANVLSTKVPLKTKKEDSGSNSQVNSLPAEWCEALHSFTAETSDDLSFKRGDRIQILERLDSDWCRGRLQDREGIFPAVFVRPCPAEAKSMLAIVPKGRKAKALYDFRGENEDELSFKAGDIITELESVDDDWMSGELMGKSGIFPKNYIQFLQIS

SEQ ID NO: 45831 - protein, 21 aa, Homo sapiens
MSSAKTKIKKQPQTNTQRFSH

SEQ ID NO: 45832 - protein, 553 aa, Homo sapiens [sequence omitted]

SEQ ID NO: 45833 - protein, 592 aa, Homo sapiens
MSTLESVTYLPEKGLYCQRLPSSRTHGGTESLKGKNTENMGFYGTLKMIFYKMKRKLDHGSEVRSFSLGKKPCKVSEYTSTTGLVPCSATPTTFGDLRAANGQGQQRRRITSVQPPTGLQEWLKMFQSWSGPEKLLALDELIDSCEPTQVKHMMQVIEPQFQRDFISLLPKELALYVLSFLEPKDLLQAAQTCRYWRILAEDNLLWREKCKEEGIDEPLHIKRRKVIKPGFIHSPWKSAYIRQHRIDTNWRRGELKSPKVLKGHDDHVITCLQFCGNRIVSGSDDNTLKVWSAVTGKCLRTLVGHTGGVWSSQMRDNIIISGSTDRTLKVWNAETGECIHTLYGHTSTVRCMHLHEKRVVSGSRDATLRVWDIETGQCLHVLMGHVAAVRCVQYDGRRVVSGAYDFMVKVWDPETETCLHTLQGHTNRVYSLQFDGIHVVSGSLDTSIRVWDVETGNCIHTLTGHQSLTSGMELKDNILVSGNADSTVKIWDIKTGQCLQTLQGPNKHQSAVTCLQFNKNFVITSSDDGTVKLWDLKTGEFIRNLVTLESGGSGGVVWRIRASNTKLVCAVGSRNGTEETKLLVLDFDVDMK

SEQ ID NO: 45834 - protein, 105 aa, Homo sapiens [sequence omitted]

SEQ ID NO: 45835 - protein, 67 aa, Homo sapiens
MRNDVSVKLKFLEENKVKVLHNQLVLFHNAIAAYFAGNQKQLEQTLKQFHIKLKTPGVDAPSWLEEQ

SEQ ID NO: 45836 - protein, 1047 aa, Homo sapiens
MRSFFWKTIPEEQVRGKTNIWTLAARQEHHYQIDTKTIEELFGQQEDTTKSSLPRRGRTLNSSFREAREEITILDAKRSMNIGIFLKQFKKSPRSIVEDIHQGKSEHYGSETLREFLKFLPESEEVKKLKAFSGDVSKLSLADSFLYGLIQVPNYSLRIEAMVLKKEFLPSCSSLYTDITVLRTAIKELMSCEELHSILHLVLQAGNIMNAGGYAGNAVGFKLSSLLKLADTKANKPGMNLLHFVAQEAQKKDTILLNFSEKLHHVQKTARLSLENTEAELHLLFVRTKSLKENIQRDGELCQQMEDFLQFAIEKLRELECWKQELQDEAYTLIDFFCEDKKTMKLDECFQIFRDFCTKFNKAVKDNHDREAQELRQLQRLKEQEQKQRSWATGELGAFGRSSSENDVELLTKKGAEGLLPFLHPRPISPSSPSYRPPNTRRSRLSLGPSADRELLTFLESSTGSPEEPNKFHSLPRSSPRQARPTIACLEPAEVRHQDSSFAHKPQASGGQEEAPNPPSAQAHQLAAAQPENHASAFPRARRQGVSVLRKRYSEPVSLGSAQSPPLSPLALGIKEHELVTGLAQFNLQGSQGMEETSQLTLSDFSPMELESVGHRGPQSLSASSSSLTPMGRDALGSLSPALEDGKAAPDEPGSAALGSVGSSDPENKDPRPLFCISDTTDCSLTLDCSEGTDSRPRGGDPEEGGEGDGSMSSGVGEMGDSQVSSNPTSSPPGEAPAPVSVDSEPSCKGGLPRDKPTKRKDVVAPKRGSLKEASPGASKPGSARRSQGAVAKSVRTLTASENESMRKVMPITKSSRGAGWRRPELSSRGPSQNPPSSTDTVWSRQNSVRRASTGAEEQRLPRGSSGSSSTRPGRDVPLQPRGSFKKPSAKPLRNLPRQKPEENKTCRAHSEGPESPKEEPKTPSVPSVPHELPRVPSFARNTVASSSRSMRTDLPPVAKAPGITRTVSQRQLRVKGDPEDAAPKDSSTLRRASSARAPKKRPESAEGPSANTEAPLKARGAGERASLRRKDSSRTTLGRILNPLRK

SEQ ID NO: 45837 - protein, 1461 aa, Homo sapiens
MGKTSFRIIFLPTEEGSIESSLFINTSSYGVLSYHVSGIGTRRISTEGSAKQLPNAYFLLPKVQSIQLSQMQAETTNTSLLQVQLECSLHNKVCQQLKGCYLESDDVLRLQMSIMVTMENFSKEFEENTQHLLDHLSIVYVATDESETSDDSAVNMYILHSGNSLIWIQDIRHFSQRDALSLQFEPVLLPTSTTNFTKIASFTCKATSCDSGIIEDVKKTTHTPTLKACLFSSVAQGYFRMDSSATQFHIETHENTSGLWSIWYRNHFDRSVVLNDVFLSKETKHMLKILNFTGPLFLPPGCWNIFSLKLAVKDIAINLFTNVFLTTNIGAIFAIPLQIYSAPTKEGSLGFEVIAHCGMHYFMGKSKAGNPNWNGSLSLDQSTWNVDSELANKLYERWKKYKNGDVCKRNVLGTTRFAHLKKSKESESFVFFLPRLIAEPGLMLNFSATALRSRMIKYFVVQNPSSWPVSLQLLPLSLYPKPEALVHLLHRWFGTDMQMINFTTGEFQLTEACPYLGTHSEESRFGILHLHLQPLEMKRVGVVFTPADYGKVTSLILIRNNLTVIDMIGVEGFGARELLKVGGRLPGAGGSLRFKVPESTLMDCRRQLKDSKQILSITKNFKVENIGPLPITVSSLKINGYNCQGYGFEVLDCHQFSLDPNTSRDISIVFTPDFTSSWVIRDLSLVTAADLEFRFTLNVTLPHHLLPLCADVVPGPSWEESFWRLTVFFVSLSLLGVILIAFQQAQYILMEFMKTRQRQNASSSSQQNNGPMDVISPHSYKSNCKNFLDTYGPSDKGRGKNCLPVNTPQSRIQNAAKRSPATYGHSQKKHKCSVYYSKHKTSTAAASSTSTTTEEKQTSPLGSSLPAAKEDICTDAMRENWISLRYASGINVNLQKNLTLPKNLLNKEENTLKNTIVFSNPSSECSMKEGIQTCMFPKETDIKTSENTAEFKERELCPLKTSKKLPENHLPRNSPQYHQPDLPEISRKNNGNNQQVPVKNEVDHCENLKKVDTKPSSEKKIHKTSREDMFSEKQDIPFVEQEDPYRKKKLQEKREGNLQNLNWSKSRTCRKNKKRGVAPVSRPPEQSDLKLVCSDFERSELSSDINVRSWCIQESTREVCKADAEIASSLPAAQREAEGYYQKPEKKCVDKFCSDSSSDCGSSSGSVRASRGSWGSWSSTSSSDGDKKPMVDAQHFLPAGDSVSQNDFPSEAPISLNLSHNICNPMTVNSLPQYAEPSCPSLPAGPTGVEEDKGLYSPGDLWPTPPVCVTSSLNCTLENGVPCVIQESAPVHNSFIDWSATCEGQFSSAYCPLELNDYNAFPEENMNYANGFPCPADVQTDFIDHNSQSTWNTPPNMPAAWGHASFISSPPYLTSTRSLSPMSGLFGSIWAPQSDVYENCCPINPTTEHSTHMENQAVVCKEYYPGFNPFRAYMNLDIWTTTANRNANFPLSRDSSYCGNV

SEQ ID NO: 45838 - protein, 44 aa, Homo sapiens
MTRVKLLICSRSKARVVESSPDISFIVKHSSVFPSIKENNYKFI

SEQ ID NO: 45839 - protein, 471 aa, Homo sapiens
MAIKLRNEYGPVLHMPTSKENLKEKGPQNATDSYVHKQYPANQGQEVEYFVAGTHPYPPGPGVALTADTKIQRMPSESAAQSLAVALPLQTKADANRTAPSGSEYRHPGASDRPQPTAMNSIVMETGNTKNSALMAKKAPTMPKPQWHPPWKLYRVISGHLGWVRCIAVEPGNQWFVTGSADRTIKIWDLASGKLKLSLTGHISTVRGVIVSTRSPYLFSCGEDKQVKCWDLEYNKVIRHYHGHLSAVYGLDLHPTIDVLVTCSRDSTARIWDVRTKASVHTLSGHTNAVATVRCQAAEPQIITGSHDTTIRLWDLVAGKTRVTLTNHKKSVRAVVLHPRHYTFASGSPDNIKQWKFPDGSFIQNLSGHNAIINTLTVNSDGVLVSGADNGTMHLWDWRTGYNFQRVHAAVQPGSLDSESGIFACAFDQSESRLLTAEADKTIKVYREDDTATEETHPVSWKPEIIKRKRF

SEQ ID NO: 45840 - protein, 365 aa, Homo sapiens
MKVEQYGPQTTPRGELVPDPEPELIDSTKLIEVQVVLILAYCSIILLGVIGNSLVIHVVIKFKSMRTVTNFFIANLAVADLLVNTLCLPFTLTYTLMGEWKMGPVLCHLVPYAQGLAVQVSTITLTVIALDRHRCIVYHLESKISKRISFLIIGLAWGISALLASPLAIFREYSLIEIIPDFEIVACTEKWPGEEKSIYGTVYSLSSLLILYVLPLGIISFSYTRIWSKLKNHVSPGAANDHYHQRRQKTTKMLVCVVVVFAVSWLPLHAFQLAVDIDSQVLDLKEYKLIFTVFHIIAMCSTFANPLLYGWMNSNYRKAFLSAFRCEQRLDAIHSEVSVTFKAKKNLEVRKNSGPNDSFTEATNV

SEQ ID NO: 45841 - protein, 575 aa, Homo sapiens
MNDFHISDDEEKNPSKLLFLKTNKSNGNITKDEPVCAIKNEEEMAPDGCEDIVVKSFSESQNKDEEFEKDKIKMKPKPRILSIKSTSSAENNSLDTDDHFKPSPRPRSMLKKKSHMEEKDGLEDKETALSEELELHSAPSSLPTPNGIQLEAEKKAFSENLDPEDSCLTSLASSSLKQILGDSFSPGSEGNASGKDPNEEITENHNSLKSDENKENSFSADHVTTAVEKSKESQVTADDLEEEKAKAELIMDDDRTVDPLLSKSQSILISTSATASSKKTIEDRNIKNKKSTNNRASSASARLMTSEFLKKSSSKRRTPSTTTSSHYLGTLKVLDQKPSQKQSIEPDRADNIRAAVYQEWLEKKNVYLHEMHRIKRIESENLRIQNEQKKAAKREEALASFEAWKAMKEKEAKKIAAKKRLEEKNKKKTEEENAARKGEALQAFEKWKEKKMEYLKEKNRKEREYERAKKQKEEETVAEKKKDNLTAVEKWNEKKEAFFKQKEKEKINEKRKEELKRAEKKDKDKQAINEYEKWLENKEKQERIERKQKKRHSFLESEALPPWSPPSRTVFAKVF

SEQ ID NO: 45842 - protein, 551 aa, Homo sapiens
MNDFHISDDEEKNPSKLLFLKTNKSNGNITKDEPVCAIKNEEEMAPDGCEDIVVKSFSESQNKDEEFEKDKIKMKPKPRILSIKSTSSAENNSLDTDDHFKPSPRPRSMLKKKSHMEEKDGLEDKETALSEELELHSAPSSLPTPNGIQLEAEKKAFSENLDPEDSCLTSLASSSLKQILGDSFSPGSEGNASGKADHVTTAVEKSKESQVTADDLEEEKAKAELIMDDDRTVDPLLSKSQSILISTSATASSKKTIEDRNIKNKKSTNNRASSASARLMTSEFLKKSSSKRRTPSTTTSSHYLGTLKVLDQKPSQKQSIEPDRADNIRAAVYQEWLEKKNVYLHEMHRIKRIESENLRIQNEQKKAAKREEALASFEAWKAMKEKEAKKIAAKKRLEEKNKKKTEEENAARKGEALQAFEKWKEKKMEYLKEKNRKEREYERAKKQKEEETVAEKKKDNLTAVEKWNEKKEAFFKQKEKEKINEKRKEELKRAEKKDKDKQAINEYEKWLENKEKQERIERKQKKRHSFLESEALPPWSPPSRTVFAKVF

SEQ ID NO: 45843 - protein, 547 aa, Homo sapiens
MFFVFCQESGYDTILRVLGSNVREFLQNLDALHDHLATIYPGMRAPSFRCTDAEKGKGLILHYYSEREGLQDIVIGIIKTVAQQIHGTEIDMKVIQQRNEECDHTQFLIEEKESKEEDFYEDLDRFEENGTQESRISPYTFCKAFPFHIIFDRDLVVTQCGNAIYRVLPQLQPGNCSLLSVFSLVRPHIDISFHGILSHINTVFVLRSKEGLLDVEKLECEDELTGTEISCLRLKGQMIYLPEADSILFLCSPSVMNLDDLTRRGLYLSDIPLHDATRDLVLLGEQFREEYKLTQELEILTDRLQLTLRALEDEKKKTDTLLYSVLPPSVANELRHKRPVPAKRYDNVTILFSGIVGFNAFCSKHASGEGAMKIVNLLNDLYTRFDTLTDSRKNPFVYKVETVGDKYMTVSGLPEPCIHHARSICHLALDMMEIAGQVQVDGESVQITIGIHTGEVVTGVIGQRMPRYCLFGNTVNLTSRTETTGEKGKINVSEYTYRCLMSPENSDPQFHLEHRGPVSMKGKKEPMQVWFLSRKNTGTEETKQDDD

SEQ ID NO: 45844 - protein, 1487 aa, Homo sapiens
MGQQEKHSLPADFTKLHLTDSLHPQVTHVSSSHSGCSITSDSGSSSLSDIYQATESEAGDMDLSGLPETAVDSEDDDDEEDIERASDPLMSRDIVRDCLEKDPIDRTDDDIEQLLEFMHQLPAFANMTMSVRRELCAVMVFAVVERAGTIVLNDGEELDSWSVILNGSVEVTYPDGKAEILCMGNSFGVSPTMDKEYMKGVMRTKVDDCQFVCIAQQDYCRILNQVEKNMQKVEEEGEIVMVKEHRELDRTGTRKGHIVIKGTSERLTMHLVEEHSVVDPTFIEDFLLTYRTFLSSPMEVGKKLLEWFNDPSLRDKVTRVVLLWVNNHFNDFEGDPAMTRFLEEFENNLEREKMGGHLRLLNIACAAKAKRRLMTLTKPSREAPLPFILLGGSEKGFGIFVDSVDSGSKATEAGLKRGDQILEVNGQNFENIQLSKAMEILRNNTHLSITVKTNLFVFKELLTRLSEEKRNGAPHLPKIGDIKKASRYSIPDLAVDVEQVIGLEKVNKKSKANTVGGRNKLKKILDKTRISILPQKPYNDIGIGQSQDDSIVGLRQTKHIPTALPVSGTLSSSNPDLLQSHHRILDFSATPDLPDQVLRVFKADQQSRYIMISKDTTAKEVVIQAIREFAVTATPDQYSLCEVSVTPEGVIKQRRLPDQLSKLADRIQLSGRYYLKNNMETETLCSDEDAQELLRESQISLLQLSTVEVATQLSMRNFELFRNIEPTEYIDDLFKLRSKTSCANLKRFEEVINQETFWVASEILRETNQLKRMKIIKHFIKIALHCRECKNFNSMFAIISGLNLAPVARLRTTWEKLPNKYEKLFQDLQDLFDPSRNMAKYRNVLNSQNLQPPIIPLFPVIKKDLTFLHEGNDSKVDGLVNFEKLRMIAKEIRHVGRMASVNMDPALMFRTRKKKWRSLGSLSQGSTNATVLDVAQTGGHKKRVRRSSFLNAKKLYEDAQMARKVKQYLSNLELEMDEESLQTLSLQCEPATNTLPKNPGDKKPVKSETSPVAPRAGSQQKAQSLPQPQQQPPPAHKINQGLQVPAVSLYPSRKKVPVKDLPPFGINSPQALKKILSLSEEGSLERHKKQAEDTISNASSQLSSPPTSPQSSPRKGYTLAPSGTVDNFSDSGHSEISSRSSIVSNSSFDSVPVSLHDERRQRHSVSIVETNLGMGRMERRTMIEPDQYSLGSYAPMSEGRGLYATATVISSPSTEELSQDQGDRASLDAADSGRGSWTSCSSGSHDNIQTIQHQRSWETLPFGHTHFDYSGDPAGLWASSSHMDQIMFSDHSTKYNRQNQSRESLEQAQSRASWASSTGYWGEDSEGDTGTIKRRGGKDVSIEAESSSLTSVTTEETKPVPMPAHIAVASSTTKGLIARKEGRYREPPPTPPGYIGIPITDFPEGHSHPARKPPDYNVALQRSRMVARSSDTAGPSSVQQPHGHPTSSRPVNKPQWHKPNESDPRLAPYQSQGFSTEEDEDEQVSAV

SEQ ID NO: 45845 - skipped

SEQ ID NO: 45846 - protein, 15 aa, Homo sapiens
MLHPVSPQQNQKPRL

SEQ ID NO: 45847 - protein, 138 aa, Homo sapiens
MVSQLHTNLLGSMLTCKAAMRTMIQQQGGSIVNVGSIVGLKGNSGQSVYSASKGGLVGFSRALAKEVARKKIRVNVVAPGFVHTDMTKDLKEEHLKKNIPLGRFGETIEVAHAVVFLLESPYITGHVLVVDGGLQLIL

SEQ ID NO: 45848 - protein, 90 aa, Homo sapiens
MVSQLHTNLLGSMLTCKAAMRTMIQQQGGSIVNVGHRREMLLHKRSIVGLKGNSGQSVYSASKGGLVGFSRALAKEVARKKIRVNVVAPG

SEQ ID NO: 45849 - protein, 648 aa, Homo sapiens
MLADKIGIFPISYVEFNSAAKQLIEWDKPPVPGVDAGECSSAAAQSSTAPKHSDTKKNTKKRHSFTSLTMANKSSQASQNRHSMEISPPVLISSSNPTAAARISELSGLSCSAPSQVHISTTGLIVTPPPSSPVTTGPSFTFPSDVPYQAALGTLNPPLPPPPLLAATVLASTPPGATAAAAAAGMGPRPMAGSTDQIAHLRPQTRPSVYVAIYPYTPRKEDELELRKGEMFLVFERCQDGWFKGTSMHTSKIGVFPGNYVAPVTRAVTNASQAKVPMSTAGQTSRGVTMVSPSTAGGPAQKLQGNGVAGSPSVVPAAVVSAAHIQTSPQAKVLLHMTGQMTVNQARNAVRTVAAHNQERPTAAVTPIQVQNAAGLSPASVGLSHHSLASPQPAPLMPGSATHTAAISISRASAPLACAAAAPLTSPSITSASLEAEPSGRIVTVLPGLPTSPDSASSACGNSSATKPDKDSKKEKKGLLKLLSGASTKRKPRVSPPASPTLEVELGSAELPLQGAVGPELPPGGGHGRAGSCPVDGDGPVTTAVAGAALAQDAFHRKASSLDSAVPIAPPPRQACSSLGPVLNESRPVVCERHRVVVSYPPQSEAELELKEGDIVFVHKKREDGWFKGTLQRNGKTGLFPGSFVENI

SEQ ID NO: 45850 - protein, 197 aa, Homo sapiens
MSSYAFFVQTCREEHKKKHPDSSVNFAEFSKKCSERWKTMSAKEKSKFEDMAKSDKARYDREMKNYVPPKGDKKGKKKDPNAPKRPPSAFFLFCSEHRPKIKSEHPGLSIGDTAKKLGEMWSEQSAKDKQPYEQKAAKLKEKYEKDIAAYRAKGKSEAGKKGPGRPTGSKKKNEPEDEEEEEEEEDEDEEEEDEDEE

SEQ ID NO: 45851 - protein, 56 aa, Homo sapiens
MSTRGFCLRAAAREAGAEARAVEQGGNRRRRRRRPGAHGARTSSPRPMGSRRPQRC

SEQ ID NO: 45852 - protein, 7 aa, Homo sapiens
MDALRPL

SEQ ID NO: 45853 - protein, 27 aa, Homo sapiens
MLVKRKEVPPPNMQLLQTAMYEPPEGL

SEQ ID NO: 45854 - protein, 108 aa, Homo sapiens
MPREVCIDVGKEFGVATNTFFKPPCVSVYRCGGCCNSEGLQCMNTSTSYLSKTLFEITVPLSQGPKPVTISFANHTSCRCMSKLDVYRQVHSIIRRSLPATLPQRNDS

SEQ ID NO: 45855 - protein, 2597 aa, Homo sapiens [sequence omitted]

SEQ ID NO: 45856 - protein, 1044 aa, Homo sapiens
MGSCACNSGYKGESCEEADCIDPGCSNHGVCIHGECHCSPGWGGSNCEILKTMCPDQCSGHGTYLQESGSCTCDPNWTGPDCSNEICSVDCGSHGVCMGGTCRCEEGWTGPACNQRACHPRCAEHGTCKDGKCECSQGWNGEHCTIEGCPGLCNSNGRCTLDQNGWHCVCQPGWRGAGCDVAMETLCTDSKDNEGDGLIDCMDPDCCLQSSCQNQPYCRGLPDPQDIISQSLQSPSQQAAKSFYDRISFLIGSDSTHVIPGESPFNKSLASVIRGQVLTADGTPLIGVNVSFFHYPEYGYTITRQDGMFDLVANGGASLTLVFERSPFLTQYHTVWIPWNVFYVMDTLVMKKEENDIPSCDLSGFVRPNPIIVSSPLSTFFRSSPEDSPIIPETQVLHEETTIPGTDLKLSYLSSRAAGYKSVLKITMTQSIIPFNLMKVHLMVAVVGRLFQKWFPASPNLAYTFIWDKTDAYNQKVYGLSEAVVSVGYEYESCLDLTLWEKRTAILQGYELDASNMGGWTLDKHHVLDVQNGILYKGNGENQFISQQPPVVSSIMGNGRRRSISCPSCNGQADGNKLLAPVALACGIDGSLYVGDFNYVRRIFPSGNVTSVLELRNKDFRHSSNPAHRYYLATDPVTGDLYVSDTNTRRIYRPKSLTGAKDLTKNAEVVAGTGEQCLPFDEARCGDGGKAVEATLMSPKGMAVDKNGLIYFVDGTMIRKVDQNGIISTLLGSNDLTSARPLTCDTSMHISQVRLEWPTDLAINPMDNSIYVLDNNVVLQITENRQVRIAAGRPMHCQVPGVEYPVGKHAVQTTLESATAIAVSYSGVLYITETDEKKINRIRQVTTDGEISLVAGIPSECDCKNDANCDCYQSGDGYAKDAKLSAPSSLAASPDGTLYIADLGNIRIRAVSKNKPLLNSMNFYEVASPTDQELYIFDINGTHQYTVSLVTGDYLYNFSYSNDNDITAVTDSNGNTLRIRRDPNRMPVRVVSPDNQVIWLTIGTNGCLKSMTAQGLELVLFTYHGNSGLLATKSDETGWTTFFE

SEQ ID NO: 45857 - protein, 1117 aa, Homo sapiens
MAFVTLTGLDVVYNAVHRAVWDAFCANRRADRVPISFKVLPGDHEYPKCRPKRTSYEWYIPKGILKTGWMNKHLNLVPALVVVFYELDWDEPQWKEKQSECATRVEIVRQSLQGRNTKVAVVLIQKKTPLPPGEDVIASERAAALCNACELSGKSLFVLPHTDHLVGYIIRLENAFYEHAQTYYYTEIRRVKSHKEFLNKTTHQLLFVRHQFKIAFFSELKQDTQNALKNYRTAYNLVHELRAHETNILEIKTMAGFINYKICRLCFQHNTPLDAIAQFRKHIDLCKKKIGSAELSFEHDAWMSKQFQAFGDLFDEAIKLGLTAIQTQNPGFYYQQAAYYAQERKQLAKTLCNHEASVMYPNPDPLETQTGVLDFYGQRSWRQGILSFDLSDPEKEKVGILAIQLKERNVVHSEIIITLLSNAVAQFKKYKCPRMKSHLMVQMGEEYYYAKDYTKALKLLDYVMCDYRSEGWWTLLTSVLTTALKCSYLMAQLKDYITYSLELLGRASTLKDDQKSRIEKNLINVLMNESPDPEPDCDILAVKTAQKLWADRISLAGSNIFTIGVQDFVPFVQCKAKFHAPSFHVDVPVQFDIYLKADCPHPIRFSKLCVSFNNQEYNQFCVIEEASKANEVLENLTQGKMCLVPGKTRKLLFKFVAKTEDVGKKIEITSVDLALGNETGRCVVLNWQGGGGDAASSQEALQAARSFKRRPKLPDNEVHWDSIIIQASTMIISRVPNISVHLLHEPPALTNEMYCLVVTVQSHEKTQIRDVKLTAGLKPGQDANLTQKTHVTLHGTELCDESYPALLTDIPVGDLHPGEQLEKMLYVRCGTVGSRMFLVYVSYLINTTVEEKEIVCKCHKDETVTIETVFPFDVAVKFVSTKFEHLERVYADIPFLLMTDLLSASPWALTIVSSELQLAPSMTTVDQLESQVDNVILQTGESASECFCLQCPSLGNIEGGVATGHYIISWKRTSAMENIPIITTVITLPHVIVENIPLHVNADLPSFGRVRESLPVKYHLQNKTDLVQDVEISVEPSDAFMFSGLKQIRLRILPGTEQEMLYNFYPLMAGYQQLPSLNINLLRFPNFTNQLLRRFIPTSIFVKPQGRLMDDTSIAAA

SEQ ID NO: 45858 - protein, 133 aa, Homo sapiens [sequence omitted]

SEQ ID NO: 45859 - protein, 369 aa, Homo sapiens
MRKKDKKLSDMHQIVNIDLMLEMSTSLAAVTPIIERESGGHHYVNMTLPVDAVISVAPEETWGKVRKLLVDAIHNQLTDMEKCILKYMKGTSIVVPEPLHFLLPGKKNLVTISYPSGIPDGQLQAYRKELHDLFNLPHDRPYFKRSNAYHFPDEPYKDGYIRNPHTYLNPPNMETGMIYVVQGIYGYHHYMQDRIDDNGWGCAYRSLQTICSWFKHQGYTERSIPTHREIQQALVDAGDKPATFVGSRQWIGSIEVQLVLNQLIGITSKILFVSQGSEIASQGRELANHFQSEGTPVMIGGGVLAHTILGVAWNEITGQIKFLILDPHYTGAEDLQVILEKGWCGWKGPDFWNKDAYYNLCLPQRPNMI

SEQ ID NO: 45860 - protein, 645 aa, Homo sapiens
MSYYQRPFSPSAYSLPASLNSSIVMQHGTSLDSTDTYPQHAQSLDGTTSSSIPLYRSSEEEKRVTVIKAPHYPGIGPVDESGIPTAIRTTVDRPKDWYKTMFKQIHMVHKPDDDTDMYNTPYTYNAGLYNPPYSAQSHPAAKTQTYRPLSKSHSDNSPNAFKDASSPVPPPHVPPPVPPLRPRDRSSTEKHDWDPPDRKVDTRKFRSEPRSIFEYEPGKSSILQHERPPPLPTTPTPVPREPGRKPLSSSRLGEVTGSPSPPPRSGAPTPSSRAPALSPTRPPKKPLDYVQDHSSGVFNEASLYQSSIDRSLERPMSSASMASDFRKRRKSEPAVGPPRGLGDQSASRTSPGRVDLPGSSTTLTKSFTSSSPSSPSRAKDRESPRSYSSTLTDMGRSAPRERRGTPEKEKLPAKAVYDFKAQTSKELSFKKGDTVYILRKIDQNWYEGEHHGRVGIFPISYVEKLTPPEKAQPARPPPPAQPGEIGEAIAKYNFNADTNVELSLRKGDRVILLKRVDQNWYEGKIPGTNRQGIFPVSYVEVVKKNTKGAEDYPDPPIPHSYSSDRIHSLSSNKPQRPVFTHENIQGGGEPFQALYNYTPRNEDELELRESDVIDVMEKCDDGWFVGTSRRTKFFGTFPGNYVKRL

SEQ ID NO: 45861 - protein, 620 aa, Homo sapiens
MSYYQRPFSPSAYSLPASLNSSIVMQHGTSLDSTDTYPQHAQSLDGTTSSSIPLYRSSEEEKRVTVIKAPHYPGIGPVDESGIPTAIRTTVDRPKDWYKTMFKQIHMVHKPDDDTDMYNTPYTYNAGLYNPPYSAQSHPAAKTQTYRPLSKSHSDNSPNAFKDASSPVPPPHVPPPVPPLRPRDRSSTEKHDWDPPDRKVDTRKFRSEPRSIFEYEPGKSSILQHERPTDRINPDDIDLENEPWYKFFSELEFGRPPPKKPLDYVQDHSSGVFNEASLYQSSIDRSLERPMSSASMASDFRKRRKSEPAVGPPRGLGDQSASRTSPGRVDLPGSSTTLTKSFTSSSPSSPSRAKDRESPRSYSSTLTDMGRSAPRERRGTPEKEKLPAKAVYDFKAQTSKELSFKKGDTVYILRKIDQNWYEGEHHGRVGIFPISYVEKLTPPEKAQPARPPPPAQPGEIGEAIAKYNFNADTNVELSLRKGDRVILLKRVDQNWYEGKIPGTNRQGIFPVSYVEVVKKNTKGAEDYPDPPIPHSYSSDRIHSLSSNKPQRPVFTHENIQGGGEPFQALYNYTPRNEDELELRESDVIDVMEKCDDGWFVGTSRRTKFFGTFPGNYVKRL

SEQ ID NO: 45862 - protein, 558 aa, Homo sapiens
MSYYQRPFSPSAYSLPASLNSSIVMQHGTSLDSTDTYPQHAQSLDGTTSSSIPLYRSSEEEKRVTVIKAPHYPGIGPVDESGIPTAIRTTVDRPKDWYKTMFKQIHMVHKPGLYNPPYSAQSHPAAKTQTYRPLSKSHSDNSPNAFKDASSPVPPPHVPPPVPPLRPRDRSSTEKHDWDPPDRKVDTRKFRSEPRSIFEYEPGKSSILQHERPASLYQSSIDRSLERPMSSASMASDFRKRRKSEPAVGPPRGLGDQSASRTSPGRVDLPGSSTTLTKSFTSSSPSSPSRAKDRESPRSYSSTLTDMGRSAPRERRGTPEKEKLPAKAVYDFKAQTSKELSFKKGDTVYILRKIDQNWYEGEHHGRVGIFPISYVEKLTPPEKAQPARPPPPAQPGEIGEAIAKYNFNADTNVELSLRKGDRVILLKRVDQNWYEGKIPGTNRQGIFPVSYVEVVKKNTKGAEDYPDPPIPHSYSSDRIHSLSSNKPQRPVFTHENIQGGGEPFQALYNYTPRNEDELELRESDVIDVMEKCDDGWFVGTSRRTKFFGTFPGNYVKRL

SEQ ID NO: 45863 - protein, 114 aa, Homo sapiens
MVHKPGLYNPPYSAQSHPAAKTQTYRPLSKSHSDNSPNAFKDASSPVPPPHVPPPVPPLRPRDRSSTEKHDWDPPDRKVDTRKFRSEPRSIFEYEPGKSSILQHERPVTKPQAS

SEQ ID NO: 45864 - protein, 129 aa, Homo sapiens
MVHKPDDDTDMYNTPYTYNAGLYNPPYSAQSHPAAKTQTYRPLSKSHSDNSPNAFKDASSPVPPPHVPPPVPPLRPRDRSSTEKHDWDPPDRKVDTRKFRSEPRSIFEYEPGKSSILQHERPVTKPQAS

SEQ ID NO: 45865 - protein, 437 aa, Homo sapiens
MDFGTMKDKIVANEYKSVTEFKADFKLMCDNAMTYNRPDTVYYKLAKKILHAGFKMMSKERLLALKRSMSFMQDMDFSQQAALLGNEDTAVEEPVPEVVPVQVETAKKSKKPSREVISCMFEPEGNACSLTDSTAEEHVLALVEHAADEARDRINRFLPGGKMGYLKRNGDGSLLYSVVNTAEPDADEEETHPVDLSSLSSKLLPGFTTLGFKDERRNKVTFLSSATTALSMQNNSVFGDLKSDEMELLYSAYGDETGVQCALSLQEFVKDAGSYSKKVVDDLLDQITGGDHSRTLFQLKQRRNVPMKPPDEAKVGDTLGDSSSSVLEFMSMKSYPDVSVDISMLSSLGKVKKELDPDDSHLNLDETTKLLQDLHEAQAERGGSRPSSNLSSLSNASERDQHHLGSPSRLSVGEQPDVTHDPYEFLQSPEPAASAKT

SEQ ID NO: 45866 - protein, 122 aa, Homo sapiens
MRTMWFAGGFHRVAVKGRQALPTEAAILTLAPHSSYFDAIPVTMTMSSIVMKAESRDIPIWGTLIQYIRPVFVSRSDQDSRRKTVEEIKRRAQSNGKWPQIMIFPEGTCTNRTCLITFKPGM

SEQ ID NO: 45867 - protein, 418 aa, Homo sapiens
MYAAAGPYAGAPNYSAFLPYAADLSLFSQMGSQYELKDNPGVHPATFAAHTAPAYYPYGQFQYGDPGRPKNATRESTSTLKAWLNEHRKNPYPTKGEKIMLAIITKMTLTQVSTWFANARRRLKKENKVTWGARSKDQEDGALFGSDTEGDPEKAEDDEEIDLESIDIDKIDEHDGDQSNEDDEDKAEAPHAPAAPSALARDQGSPLAAADVLKPQDSPLGLAKEAPEPGSTRLLSPGAAAGGLQGAPHGKPKIWSLAETATSPDGAPKASPPPPAGHPGAHGPSAGAPLQHPAFLPSHGLYTCHIGKFSNWTNSAFLAQGSLLNMRSFLGVGAPHAAPHGPHLPAPPPPQPPVAIAPGALNGDKASVRSSPTLPERDLVPRPDSPAQQLKSPFQPVRDNSLAPQEGTPRILAALPSA

SEQ ID NO: 45868 - protein, 937 aa, Homo sapiens
MRDAIIASVLTSSSHTIVLSVCLSATPGGKEHLVWQILANVIIFICGNLAGAYHKHLMELALQQTYQDTCNCIKSRIKLEFEKRQQERLLLSLLPAHIAMEMKAEIIQRLQGPKAGQMENTNNFHNLYVKRHTNVSILYADIVGFTRLASDCSPGELVHMLNELFGKFDQIAKENECMRIKILGDCYYCVSGLPISLPNHAKNCVKMGLDMCEAIKKVRDATGVDINMRVGVHSGNVLCGVIGLQKWQYDVWSHDVTLANHMEAGGVPGRVHISSVTLEHLNGAYKVEEGDGDIRDPYLKQHLVKTYFVINPKGERRSPQHLFRPRHTLDGAKMRASVRMTRYLESWGAAKPFAHLHHRDSMTTENGKISTTDVPMGQHNFQNRTLRTKSQKKRFEEELNERMIQAIDGINAQKQWLKSEDIQRISLLFYNKVLEKEYRATALPAFKYYVTCACLIFFCIFIVQILVLPKTSVLGISFGAAFLLLAFILFVCFAGQLLQCSKKASPLLMWLLKSSGIIANRPWPRISLTIITTAIILMMAVFNMFFLSDSEETIPPTANTTNTSFSASNNQVAILRAQNLFFLPYFIYSCILGLISCSVFLRVNYELKMLIMMVALVGYNTILLHTHAHVLGDYSQVLFERPGIWKDLKTMGSVSLSIFFITLLVLGRQNEYYCRLDFLWKNKFKKEREEIETMENLNRVLLENVLPAHVAEHFLARSLKNEELYHQSYDCVCVMFASIPDFKEFYTESDVNKEGLECLRLLNEIIADFDDLLSKPKFSGVEKIKTIGSTYMAATGLSAVPSQEHSQEPERQYMHIGTMVEFAFALVGKLDAINKHSFNDFKLRVGINHGPVIAGVIGAQKPQYDIWGNTVNVASRMDSTGVLDKIQVTEETSLVLQTLGYTCTCRGIINVKGKGDLKTYFVNTEMSRSLSQSNVAS

SEQ ID NO: 45869 - protein, 562 aa, Homo sapiens [sequence omitted]

SEQ ID NO: 45870 - protein, 508 aa, Homo sapiens
MFYRRLSNLTSSEEVLSFISTMETLPDTMAAGALQRICEVEKKDGDQGLPKEILENSIFQALCFQFEKEPSQLSNTSLVTALQALILLHVDPQSSLLLNLVAECQNRLRKGGMEVRNLCILGESLITLHSSGCVTLELIINQLQGEKLETFTPEDIVALYRILQACTEKVDEHQTFLNKINNFSLSIVSNLSPKLISQMLTALVVLDQSQAFPLIIKLGKYVVRHVPHFTNEELRRVLEAFIYFGHHDTFFTKALEHRVAAVCLTLDPEVVCRVMEYCSRELILSKPILNAVAETFVCQTEKFSPRQISALMEPFGKLNYLPPNASALFRKLENVLFTHFNYFPPKSLLKLLHSCSLNECHPVNFLAKIFKPLFLQRLQGKESHLDTLSRAQLTQLFLASVLECPFYKGPKLLPKYQVKSFLTPCCSLETPVDSQLYRYVKIGLTNLLGARLYFAPKVLTPYCYTIAFSPIDQCKVEGIKAKQRNEYRKIVFVRVSHEEFFLSSLTRC

SEQ ID NO: 45871 - protein, 538 aa, Homo sapiens [sequence omitted]

SEQ ID NO: 45872 - protein, 103 aa, Homo sapiens
MKYSEFRAGVSVYGIVKDSEDIYNLKNPTLFIFAENDVVIPLKDVSLLTQKLKEHCKVEYQIKTFSGQTHGFVHRKREDCSPADKPYIDEARRNLIEWLNKYM

SEQ ID NO: 45873 - protein, 4473 aa, Homo sapiens
MLDAADGGLLNSVRRLLSDIFIPALRATSHGWGELEGLQDAANIRQEFLSSLEGFVNVLSGAQESLKEKVNLRKCDILELKTLKEPTDYLTLANNPETLGKIEDCMKVWIKQTEQVLAENNQLLKEADDVGPRAELEHWKKRLSKFNYLLEQLKSPDVKAVLAVLAAAKSKLLKTWREMDIRITDATNEAKDNVKYLYTLEKCCDPLYSSDPLSMMDAIPTLINAIKMIYSISHYYNTSEKITSLFVKVTNQIISACKAYITNNGTASIWNQPQDVVEEKILSAIKLKQEYQLCFHKTKQKLKQNPNAKQFDFSEMYIFGKFETFHRRLAKIIDIFTTLKTYSVLQDSTIEGLEDMATKYQGIVATIKKKEYNFLDQRKMDFDQDYEEFCKQTNDLHNELRKFMDVTFAKIQNTNQALRMLKKFERLNIPNLGIDDKYQLILENYGADIDMISKLYTKQKYDPPLARNQPPIAGKILWARQLFHRIQQPMQLFQQHPAVLSTAEAKPIIRSYNRMAKVLLEFEVLFHRAWLRQIEEIHVGLEASLLVKAPGTGELFVNFDPQILILFRETECMAQMGLEVSPLATSLFQKRDRYKRNFSNMKMMLAEYQRVKSKIPAAIEQLIVPHLAKVDEALQPGLAALTWTSLNIEAYLENTFAKIKDLELLLDRVNDLIEFRIDAILEEMSSTPLCQLPQEEPLTCEEFLQMTKDLCVNGAQILHFKSSLVEEAVNELVNMLLDVEVLSEEESEKISNENSVNYKNESSAKREEGNFDTLTSSINARANALLLTTVTRKKKETEMLGEEARELLSHFNHQNMDALLKVTRNTLEAIRKRIHSSHTINFRDSNSASNMKQNSLPIFRASVTLAIPNIVMAPALEDVQQTLNKAVECIISVPKGVRQWSSELLSKKKIQERKMAALQSNEDSDSDVEMGENELQDTLEIASVNLPIPVQTKNYYKNVSENKEIVKLVSVLSTIINSTKKEVITSMDCFKRYNHIWQKGKEEAIKTFITQSPLLSEFESQILYFQNLEQEINAEPEYVCVGSIALYTADLKFALTAETKAWMVVIGRHCNKKYRSEMENIFMLIEEFNKKLNRPIKDLDDIRIAMAALKEIREEQISIDFQVGPIEESYALLNRYGLLIAREEIDKVDTLHYAWEKLLARAGEVQNKLVSLQPSFKKELISAVEVFLQDCHQFYLDYDLNGPMASGLKPQEASDRLIMFQNQFDNIYRKYITYTGGEELFGLPATQYPQLLEIKKQLNLLQKIYTLYNSVIETVNSYYDILWSEVNIEKINNELLEFQNRCRKLPRALKDWQAFLDLKKIIDDFSECCPLLEYMASKAMMERHWERITTLTGHSLDVGNESFKLRNIMEAPLLKYKEEIEDICISAVKERDIEQKLKQVINEWDNKTFTFGSFKTRGELLLRGDSTSEIIANMEDSLMLLGSLLSNRYNMPFKAQIQKWVQYLSNSTDIIESWMTVQNLWIYLEAVFVGGDIAKQLPKEAKRFSNIDKSWVKIMTRAHEVPSVVQCCVGDETLGQLLPHLLDQLEICQKSLTGYLEKKRLCFPRFFFVSDPALLEILGQASDSHTIQAHLLNVFDNIKSVKFHEKIYDRILSISSQEGETIELDKPVMAEGNVEVWLNSLLEESQSSLHLVIRQAAANIQETGFQLTEFLSSFPAQVGLLGIQMIWTRDSEEALRNAKFDKKIMQKTNQAFLELLNTLIDVTTRDLSSTERVKYETLITIHVHQRDIFDDLCHMHIKSPMDFEWLKQCRFYFNEDSDKMMIHITDVAFIYQNEFLGCTDRLVITPLTDRCYITLAQALGMSMGGAPAGPAGTGKTETTKDMGRCLGKYVVVFNCSDQMDFRGLGRIFKGLAQSGSWGCFDEFNRIDLPVLSVAAQQISIILTCKKEHKKSFIFTDGDNVTMNPEFGLFLTMNPGYAGRQELPENLKINFRSVAMMVPDRQIIIRVKLASCGFIDNVVLARKFFTLYKLCEEQLSKQVHYDFGLRNILSVLRTLGAAKRANPMDTESTIVMRVLRDMNLSKLIDEDEPLFLSLIEDLFPNILLDKAGYPELEAAISRQVEEAGLINHPPWKLKVIQLFETQRVRHGMMTLGPSGAGKTTCIHTLMRAMTDCGKPHREMRMNPKAITAPQMFGRLDVATNDWTDGIFSTLWRKTLRAKKGEHIWIILDGPVDAIWIENLNSVLDDNKTLTLANGDRIPMAPNCKIIFEPHNIDNASPATVSRNGMVFMSSSILDWSPILEGFLKKRSPQEAEILRQLYTESFPDLYRFCIQNLEYKMEVLEAFVITQSINMLQGLIPLKEQGGEVSQAHLGRLFVFALLWSAGAALELDGRRRLELWLRSRPTGTLELPPPAGPGDTAFDYYVAPDGTWTHWNTRTQEYLYPSDTTPEYGSILVPNVDNVRTDFLIQTIAKQGKAVLLIGEQGTAKTVIIKGFMSKYDPECHMIKSLNFSSATTPLMFQRTIESYVDKRMGTTYGPPAGKKMTVFIDDVNMPIINEWGDQVTNEIVRQLMEQNGFYNLEKPGEFTSIVDIQFLAAMIHPGGGRNDIPQRLKRQFSIFNCTLPSEASVDKIFGVIGVGHYCTQRGFSEEVRDSVTKLVPLTRRLWQMTKIKMLPTPAKFHYVFNLRDLSRVWQGMLNTTSEVIKEPNDLLKLWKHECKRVIADRFTVSSDVTWFDKALVSLVEEEFGEEKKLLVDCGIDTYFVDFLRDAPEAAGETSEEADAETPKIYEPIESFSHLKERLNMFLQLYNESIRGAGMDMVFFADAMVHLVKISRVIRTPQGNALLVGVGGSGKQSLTRLASFIAGYVSFQITLTRSYNTSNLMEDLKVLYRTAGQQGKGITFIFTDNEIKDESFLEYMNNVLSSGEVSNLFARDEIDEINSDLASVMKKEFPRCLPTNENLHDYFMSRVRQNLHIVLCFSPVGEKFRNRALKFPALISGCTIDWFSRWPKDALVAVSEHFLTSYDIDCSLEIKKEVVQCMGSFQDGVAEKCVDYFQRFRRSTHVTPKSYLSFIQGYKFIYGEKHVEVRTLANRMNTGLEKLKEASESVAALSKELEAKEKELQVANDKADMVLKEVTMKAQAAEKVKAEVQKVKDRAQAIVDSISKDKAIAEEKLEAAKPALEEAEAALQTIRPSDIATVRTLGRPPHLIMRIMDCVLLLFQRKVSAVKIDLEKSCTMPSWQESLKLMTAGNFLQNLQQFPKDTINEEVIEFLSPYFEMPDYNIETAKRVCGNVAGLCSWTKAMASFFSINKEVLPLKANLVVQENRHLLAMQDLQKAQAELDDKQAELDVVQAEYEQAMTEKQTLLEDAERCRHKMQTASTLISGLAGEKERWTEQSQEFAAQTKRLVGDVLLATAFLSYSGPFNQEFRDLLLNDWRKEMKARKIPFGKNLNLSEMLIDAPTISEWNLQGLPNDDLSIQNGIIVTKASRYPLLIDPQTQGKIWIKNKESRNELQITSLNHKYFRNHLEDSLSLGRPLLIEDVGEELDPALDNVLERNFIKTGSTFKVKVGDKEVDVLDGFRLYITTKLPNPAYTPEISARTSIIDFTVTMKGLEDQLLGRVILTEKQELEKERTHLMEDVTANKRRMKELEDNLLYRLTSTQGSLVEDESLIVVLSNTKRTAEEVTQKLEISAETEVQINSAREEYRPVATRGSILYFLITEMRLVNEMYQTSLRQFLGLFDLSLARSVKSPITSKRIANIIEHMTYEVYKYAARGLYEEHKFLFTLLLTLKIDIQRNRVKHEEFLTLIKGGASLDLKACPPKPSKWILDITWLNLVELSKLRQFSDVLDQISRNEKMWKIWFDKENPEEEPLPNAYDKSLDCFRRLLLIRSWCPDRTIAQARKYIVDSMGEKYAEGVILDLEKTWEESDPRTPLICLLSMGSDPTDSIIALGKRLKIETRYVSMGQGQEVHARKLLQQTMANGGWALLQNCHLGLDFMDELMDIIIETELVHDAFRLWMTTEAHKQFPITLLQMSIKFANDPPQGLRAGLKRTYSGVSQDLLDVSSGSQWKPMLYAVAFLHSTVQERRKFGALGWNIPYEFNQADFNATVQFIQNHLDDMDVKKGVSWTTIRYMIGEIQYGGRVTDDYDKRLLNTFAKVWFSENMFGPDFSFYQGYNIPKCSTVDNYLQYIQSLPAYDSPEVFGLHPNADITYQSKLAKDVLDTILGIQPKDTSGGGDETREAVVARLADDMLEKLPPDYVPFEVKERLQKMGPFQPMNIFLRQEIDRMQRVLSLVRSTLTELKLAIDGTIIMSENLRDALDCMFDARIPAWWKKASWISSTLGFWFTELIERNSQFTSWVFNGRPHCFWMTGFFNPQGFLTAMRQEITRANKGWALDNMVLCNEVTKWMKDDISAPPTEGVYVYGLYLEGAGWDKRNMKLIESKPKVLFELMPVIRIYAENNTLRDPRFYSCPIYKKPVRTDLNYIAAVDLRTAQTPEHWVLRGVALLCDVK

SEQ ID NO: 45874 - protein, 243 aa, Homo sapiens
MRKAYEELFWRHHIKCVRQVRRDNYDALRSVLFQIFSQGISFPSWMKEKDIVKLPEKLLFSQGCNWIQQYSFGPEKYTGSNVFGKLRKYVELLKTQWTEFNGIRDYHKRGSMCNTLFSDAILEYKLYEALKFIMLYQVTEVYEQMKTKKVIPSLFRLLFSRETSSDPLSFMMNHLNSVGDTCGLEQIDMFILGYSLEVKIKVFRLFKFNSRDFEVCYPEEPLRDWPEISLLTENDRHYHIPVF

SEQ ID NO: 45875 - protein, 434 aa, Homo sapiens
MKFFTGPMSDFKNVGLVFVNSKRDRTKAVLCMVVAGAIAAVFHTLIAYSDLGYYIINKLHHVDESVGSKTRRAFLYLAAFPFMDAMAWTHAGILLKHKYSFLVGCASISDVIAQVVFVAILLHSHLECREPLLIPILSLYMGALVRCTTLCLGYYKNIHDIIPDRSGPELGGDATIRKMLSFWWPLALILATQRISRPIVNLFVSRDLGGSSAATEAVAILTATYPVGHMPYGWLTEIRAVYPAFDKNNPSNKLVSTSNTVTAAHIKKFTFVCMALSLTLCFVMFWTPNVSEKILIDIIGVDFAFAELCVVPLRIFSFFPVPVTVRAHLTGWLMTLKKTFVLAPSSVLRIIVLIASLVVLPYLGVHGATLGVGSLLAGFVGESTMVAIAACYVYRKQKKKMENESATEGEDSAMTDMPPTEEVTDIVEMREENE

SEQ ID NO: 45876 - protein, 2002 aa, Homo sapiens [sequence omitted]

SEQ ID NO: 45877 - protein, 1290 aa, Homo sapiens
MPPSAQGPLPPCPIRPPFPNHQMRHPFPVPPCFPPMPPPMPCPNNPPVPGAPPGQGTFPFMMPPPSMPHPPPPPVMPQQVNYQYPPGYSHHNFPPPSFNSFQNNPSSFLPSANNSSSPHFRHLPPYPLPKAPSERRSPERLKHYDDHRHRDHSHGRGERHRSLDRRERGRSPDRRRQDSRYRSDYDRGRTPSRHRSYERSRERERERHRHRDNRRSPSLERSYKKEYKRSGRSYGLSVVPEPAGCTPELPGEIIKNTDSWAPPLEIVNHRSPSREKKRARWEEEKDRWSDNQSSGKDKNYTSIKEKEPEETMPDKNEEEEEELLKPVWIRCTHSENYYSSDPMDQVGDSTVVGTSRLRDLYDKFEEELGSRQEKAKAARPPWEPPKTKLDEDLESSSESECESDEDSTCSSSSDSEVFDVIAEIKRKKAHPDRLHDELWYNDPGQMNDGPLCKCSAKARRTGIRHSIYPGEEAIKPCRPMTNNAGRLFHYRITVSPPTNFLTDRPTVIEYDDHEYIFEGFSMFAHAPLTNIPLCKVIRFNIDYTIHFIEEMMPENFCVKGLELFSLFLFRDILELYDWNLKGPLFEDSPPCCPRFHFMPRFVRFLPDGGKEVLSMHQILLYLLRCSKALVPEEEIANMLQWEELEWQKYAEECKGMIVTNPGTKPSSVRIDQLDREQFNPDVITFPIIVHFGIRPAQLSYAGDPQYQKLWKSYVKLRHLLANSPKVKQTDKQKLAQREEALQKIRQKNTMRREVTVELSSQGFWKTGIRSDVCQHAMMLPVLTHHIRYHQCLMHLDKLIGYTFQDRCLLQLAMTHPSHHLNFGMNPDHARNSLSNCGIRQPKYGDRKVHHMHMRKKGINTLINIMSRLGQDDPTPSRINHNERLEFLGDAVVEFLTSVHLYYLFPSLEEGGLATYRTAIVQNQHLAMLAKKLELDRFMLYAHGPDLCRESDLRHAMANCFEALIGAVYLEGSLEEAKQLFGRLLFNDPDLREVWLNYPLHPLQLQEPNTDRQLIETSPVLQKLTEFEEAIGVIFTHVRLLARAFTLRTVGFNHLTLGHNQRMEFLGDSIMQLVATEYLFIHFPDHHEGHLTLLRSSLVNNRTQAKVAEELGMQEYAITNDKTKRPVALRTKTLADLLESFIAALYIDKDLEYVHTFMNVCFFPRLKEFILNQDWNDPKSQLQQCCLTLRTEGKEPDIPLYKTLQTVGPSHARTYTVAVYFKGERIGCGKGPSIQQAEMGAAMDALEKYNFPQMAHQKRFIERKYRQELKEMRWEREHQEREPDETEDIKK

SEQ ID NO: 45878 - protein, 1253 aa, Homo sapiens
MPPSAQGPLPPCPIRPPFPNHQMRHPFPVPPCFPPMPPPMPCPNNPPVPGAPPGQGTFPFMMPPPSMPHPPPPPVMPQQVNYQYPPGYSHHNFPPPSFNSFQNNPSSFLPSANNSSSPHFRHLPPYPLPKAPSERRSPERLKHYDDHRHRDHSHGRGERHRSLDRRERGRSPDRRRQDSRYRSDYDRGRTPSRHRSYERSRERERERHRHRDNRRSPSLERSYKKEYKRSGSRSPSREKKRARWEEEKDRWSDNQSSGKDKNYTSIKEKEPEETMPDKNEEEEEELLKPVWIRCTHSENYYSSDPMDQVGDSTVVGTSRLRDLYDKFEEELGSRQEKAKAARPPWEPPKTKLDEDLESSSESECESDEDSTCSSSSDSEVFDVIAEIKRKKAHPDRLHDELWYNDPGQMNDGPLCKCSAKARRTGIRHSIYPGEEAIKPCRPMTNNAGRLFHYRITVSPPTNFLTDRPTVIEYDDHEYIFEGFSMFAHAPLTNIPLCKVIRFNIDYTIHFIEEMMPENFCVKGLELFSLFLFRDILELYDWNLKGPLFEDSPPCCPRFHFMPRFVRFLPDGGKEVLSMHQILLYLLRCSKALVPEEEIANMLQWEELEWQKYAEECKGMIVTNPGTKPSSVRIDQLDREQFNPDVITFPIIVHFGIRPAQLSYAGDPQYQKLWKSYVKLRHLLANSPKVKQTDKQKLAQREEALQKIRQKNTMRREVTVELSSQGFWKTGIRSDVCQHAMMLPVLTHHIRYHQCLMHLDKLIGYTFQDRCLLQLAMTHPSHHLNFGMNPDHARNSLSNCGIRQPKYGDRKVHHMHMRKKGINTLINIMSRLGQDDPTPSRINHNERLEFLGDAVVEFLTSVHLYYLFPSLEEGGLATYRTAIVQNQHLAMLAKKLELDRFMLYAHGPDLCRESDLRHAMANCFEALIGAVYLEGSLEEAKQLFGRLLFNDPDLREVWLNYPLHPLQLQEPNTDRQLIETSPVLQKLTEFEEAIGVIFTHVRLLARAFTLRTVGFNHLTLGHNQRMEFLGDSIMQLVATEYLFIHFPDHHEGHLTLLRSSLVNNRTQAKVAEELGMQEYAITNDKTKRPVALRTKTLADLLESFIAALYIDKDLEYVHTFMNVCFFPRLKEFILNQDWNDPKSQLQQCCLTLRTEGKEPDIPLYKTLQTVGPSHARTYTVAVYFKGERIGCGKGPSIQQAEMGAAMDALEKYNFPQMAHQKRFIERKYRQELKEMRWEREHQEREPDETEDIKK

SEQ ID NO: 45879 - protein, 380 aa, Homo sapiens [sequence omitted]

SEQ ID NO: 45880 - protein, 24 aa, Homo sapiens
MYKRRANIYKYIYMYITDAQVYTR

SEQ ID NO: 45881 - protein, 85 aa, Homo sapiens
MLALFRHHHWSRAALVYSDDKLERNCYFTLEGVHEVFQEEGLHTSIYSFDETKDLDLEDIVRNIQASERVLGLICWNPSGRKFSS

SEQ ID NO: 45882 - protein, 1476 aa, Homo sapiens
MEKRYGNLSHVKMMASSAPLCHLSGTVLQQGTRVGTAALSACHGLTGFFQLPHGDFFIEPVKKHPLVEGGYHPHIVYRRQKVPETKEPTCGLKDSVNISQKQELWREKWERHNLPSRSLSRRSISKERWVETLVVADTKMIEYHGSENVESYILTIMNMVTGLFHNPSIGNAIHIVVVRLILLEEEEQGLKIVHHAEKTLSSFCKWQKSINPKSDLNPVHHDVAVLLTRKDICAGFNRPCETLGLSHLSGMCQPHRSCNINEDSGLPLAFTIAHELGHSFGIQHDGKENDCEPVGRHPYIMSRQLQYDPTPLTWSKCSEEYITRFLDRGWGFCLDDIPKKKGLKSKVIAPGVIYDVHHQCQLQYGPNATFCQEVENVCQTLWCSVKGFCRSKLDAAADGTQCGEKKWCMAGKCITVGKKPESIPGGWGRWSPWSHCSRTCGAGVQSAERLCNNPEPKFGGKYCTGERKRYRLCNVHPCRSEAPTFRQMQCSEFDTVPYKNELYHWFPIFNPAHPCELYCRPIDGQFSEKMLDAVIDGTPCFEGGNSRNVCINGICKMVGCDYEIDSNATEDRCGVCLGDGSSCQTVRKMFKQKEGSGYVDIGLIPKGARDIRVMEIEGAGNFLAIRSEDPEKYYLNGGFIIQWNGNYKLAGTVFQYDRKGDLEKLMATGPTNESVWIQLLFQVTNPGIKYEYTIQKDGLDNDVEQQMYFWQYGHWTECSVTCGTGIRRQTAHCIKKGRGMVKATFCDPETQPNGRQKKCHEKACPPRWWAGEWEACSATCGPHGEKKRTVLCIQTMVSDEQALPPTDCQHLLKPKTLLSCNRDILCPSDWTVGNWSECSVSCGGGVRIRSVTCAKNHDEPCDVTRKPNSRALCGLQQCPSSRRVLKPNKGTISNGKNPPTLKPVPPPTSRPRMLTTPTGPESMSTSTPAISSPSPTTASKEGDLGGKQWQDSSTQPELSSRYLISTGSTSQPILTSQSLSIQPSEENVSSSDTGPTSEGGLVATTTSGSGLSSSRNPITWPVTPFYNTLTKGPEMEIHSGSGEEREQPEDKDESNPVIWTKIRVPGNDAPVESTEMPLAPPLTPDLSRESWWPPFSTVMEGLLPSQRPTTSETGTPRVEGMVTEKPANTLLPLGGDHQPEPSGKTANRNHLKLPNNMNQTKSSEPVLTEEDATSLITEGFLLNASNYKQLTNGHGSAHWIVGNWSECSTTCGLGAYWRRVECSTQMDSDCAAIQRPDPAKRCHLRPCAGWKVGNWSKCSRNCSGGFKIREIQCVDSRDHRNLRPFHCQFLAGIPPPLSMSCNPEPCEAWQVEPWSQCSRSCGGGVQERGVFCPGGLCDWTKRPTSTMSCNEHLCCHWATGNWDLCSTSCGGGFQKRTVQCVPSEGNKTEDQDQCLCDHKPRPPEFKKCNQQACKKSADLLCTKDKLSASFCQTLKAMKKCSVPTVRAECCFSCPQTHITHTQRQRRQRLLQKSKEL

SEQ ID NO: 45883 - protein, 2128 aa, Homo sapiens
MGSKYKQFTDPIEEEDANLLFGSVQEVLKASVMADADILSETFQLLIDSAKDFSKRLWGLVPFGLYLPAPPLYCPQPAILSEEDGDDLLLKAEKNNRQKVSGILQRVLLLFRAAQCSFPVAQWYILQLRWARKVMQKIRMKGSLPSLSPFPQSLLNYCKGGIAFFRPGAAGDHKLDEVSIRAIGCFRELCALCWMLHVRDKLSYSCRQYQKARENVKGEKDLEVEFDSCMIEHCLSAVEWAYRMLPFSRFFNMEELIQDIILSLIGELPPIRKVAEIFVKAFPYPEDVRVPLRDKYHSLHQRLRHCVVKGPQTEEMMSVVMHSIQKVRVKALKRVQRNIGSFEVNIWEPIEEEKPDEAPGVDRYSLGTSLSRSTLTELGDSVVHSDADTFSEALSVEEKSRINIYQRNAPNHMELTSIHKPTDKRKMCNQKENPTKKEDHEKLSQNTLPVIGVWEFERDDDEYIKFLDLFLSYILERDLPYSRDADIPFLTSFSGKLREHELNSLLFDVHTTLKRHQSKTKSQNVFRAGSCFVVAPESYESEKSSSLNDEYGMHLENQKLSSSVLVNQGIKPFLQYPSNEVNKNEGMSGLFGLKQRSIYKIQDDTREKCLIQRSSNHIFWTPKSIKTRRCIFKAIQCNDINPQEDLPLALNTFGSIGRLLEWMIRWSNRRLLCDSGITESSSEYSPVIRVKTSTAAILTSLWLLEQPYFATYKAKNAIIKMVENRDTGCQIGPNIERESKSDAGGSVAVATPGGTEERNGQNKSCQNILNRMPTEAKNPDIKEINDDIISITHNTKKEFIDIDENLLEVEAFTEEEMDMHISDYEEDIEESVGGFRSPSLAICMMTLPQQLEEEFTEEVQCQREEPLETIMEEKSTEQKGMIEAFSHPGHTTPQSMQVDTSSEISSAQISTYKEKSSSVPLLISNGVNVASQPPAPTPQKTQRNEFTAQLPDCSESVRQMLQDEMFKLVQLQQINFMSLMQIVGSSFANLPDTQQLVQQSQSVHLGESQESNLRGCGDVEDSNKNLKERFFIKPQSMGENAREPRKNSPHCHEGTIPSGQNSTGNVQNVPHGSIPLCQLNGQPRKKGPIPSSQNLPSTSFYPAPAGNTHLYLLSTPSVVQKAPRLIPHAKTFSPGDGFPLLQFKSKQEFQPLFLHTGSIPQVPFRPLPQPREAWGLSDSFQPALPQRAAQTTPASHLNVSQYNTEARKKEVEQKTWAETVITEIPNHVNLDQYVGQENLTPQQDSSVFIKPEKLFDVKPGTLEISPHHSFGLPLLYLPLKPPNMFPSTSRASITVPSTPIQPIAEERKYPRLSLLHSHLSPENRCKKTQLIPLENLIAFKQSQQKLTHNLFEQGDAGHLQLLKVKIEPPEVRQGKDSKKRQRRRAEKELQEKRCEKLRRKPNVTFRPENSIINNDDSEIIKKPKEQQEHCGSHPLDDFDVPFEMLQDDNTSAGLHFMASVKKKAIGSQDASTNTDPEHEPLTAPQLLVPDVYLNLKLSSEMSEKPWSPSIPHTVTNLVGHTYINVIDIEANDLLQELPVREEPSNDNVIKQQSDHLAVPSSAELHYMAASVTNAVPPHNFKSQGLPKPEFRFKGQSTKSDSAEDYLLWKRLQGVSAACPAPSSAAHQLEHLSAKLQKIDEQLLAIQNIAENIEQDFPKPEMLDLHCDKIGPVDHIEFSSGPEFKKTLASKTISISEEVRFLTHMDEEDQSDKKETSEPEFSITENYSGQKTCVFPTADSAVSLSSSSDQNTTSPGMNSSDELCESVSVHPLQMTGLTDIADIIDDLIIKDGVSSEELGLTEQAMGTSRIQHYSGRHSQRTDKERREIQAWMKRKRKERMAKYLNELAEKRGQEHDPFCPRSNPLYMTSREIRLRQKMKHEKDRLLLSEHYSRRISQAYGLMNELLSESVQLPTLPQKPLPNKPSPTQSSSCQHCPSPRGENQHGHSFLINRPGKVKYMSKPSYIHKRKSFGQPQGSPWPHGTATFTIQKKAGGAKAAVRKATQSPVTFQKGSNAPCHSLQHTKKHGSAGLAPQTKQVCVEYEREETVVSPWTIPSEIHKILHESHNSLLQDLSPTEEEEPEHPFGVGGVDSVSESTGSILSKLDWNAIEDMVASVEDQGLSVHWALDL

SEQ ID NO: 45884 - protein, 1797 aa, Homo sapiens
MGSKYKQFTDPIEEEDANLLFGSVQEVLKASVMADADILSETFQLLIDSAKDFSKRLWGLVPFGLYLPAPPLYCPQPAILSEEDGDDLLLKAEKNNRQKVSGILQRVLLLFRAAQCSFPVAQWYILQLRWARKVMQKIRMKGSLPSLSPFPQSLLNYCKGGIAFFRPGAAGDHKLDEVSIRAIGCFRELCALCWMLHVRDKLSYSCRQYQKARENVKGEKDLEVEFDSCMIEHCLSAVEWAYRMLPFSRFFNMEELIQDIILSLIGELPPIRKVAEIFVKAFPYPEDVRVPLRDKYHSLHQRLRHCVVKGPQTEEMMSVVMHSIQKVRVKALKRVQRNIGSFEVNIWEPIEEEKPDEAPGVDRYSLGTSLSRSTLTELGDSVVHSDADTFSEALSVEEKSRINIYQRNAPNHMELTSIHKPTDKRKMCNQKENPTKKEDHEKLSQNTLPVIGVWEFERDDDEYIKFLDLFLSYILERDLPYSRDADIPFLTSFSGKLREHELNSLLFDVHTTLKRHQSKTKSQNVFRAGSCFVVAPESYESEKSSSLNDEYGMHLENQKLSSSVLVNQGIKPFLQYPSNEVNKNEGMSGLFGLKQRSIYKIQDDTREKCLIQRSSNHIFWTPKSIKTRRCIFKAIQCNDINPQEDLPLALNTFGSIGRLLEWMIRWSNRRLLCDSGITESSSEYSPVIRVKTSTAAILTSLWLLEQPYFATYKAKNAIIKMVENRDTGCQIGPNIERESKSDAGGSVAVATPGGTEERNGQNKSCQNILNRMPTEAKNPDIKEINDDIISITHNTKKEFIDIDENLLEVEAFTEEEMDMHISDYEDIEESVGGFRSPSLAICMMTLPQQLEEEFTEEVQCQREEPLETIMEEKSTEQKGMIEAFSHPGHTTPQSMQVDTSSEISSAQISTYKEKSSSVPLLISNGVNVASQPPAPTPQKTQRNEFTAQLPDCSESVRQMLQDEMFKLVQLQQINFMSLMQIVGSSFANLPDTQQLVQQSQSVHLGESQESNLRGCGDVEDSNKNLKERFFIKPQSMGENAREPRKNSPHCHEGTIPSGQNSTGNVQNVPHGSIPLCQLNGQPRKKGPIPSSQNLPSTSFYPAPAGNTHLYLLSTPSVVQKAPRLIPHAKTFSPGDGFPLLQFKSKQEFQPLFLHTGSIPQVPFRPLPQPREAWGLSDSFQPALPQRAAQTTPASHLNVSQYNTEARKKEVEQKTWAETVITEIPNHVNLDQYVGQENLTPQQDSSVFIKPEKLFDVKPGTLEISPHHSFGLPLLYLPLKPPNMFPSTSRASITVPSTPIQPIAEERKYPRLSLLHSHLSPENRCKKTQLIPLENLIAFKQSQQKLTHNLFEQGDAGHLQLLKVKIEPPEVRQGKDSKKRQRRRAEKELQEKRCEKLRRKPNVTFRPENSIINNDDSEIIKKPKEQQEHCGSHPLDDFDVPFEMLQDDNTSAGLHFMASVKKKAIGSQDASTNTDPEHEPLTAPQLLVPDVYLNLKLSSEMSEKPWSPSIPHTVTNLVGHTYINVIDIEANDLLQELPVREEPSNDNVIKQQSDHLAVPSSAELHYMAASVTNAVPPHNFKSQEVTPACLDGKSLRAGITEVKEPSVTSPTPSDIQQNKGLPKPEFRFKGQSTKSDSAEDYLLWKRLQGVSAACPAPSSAAHQLEHLSAKLQKIDEQLLAIQNIAENIEQDFPKPEMLDLHCDKIGPVDHIEFSSGPEFKKTLASKTISISEEVRFLTHMDEEDQSDKKETSEPEFSITENYSGQKTCVFPTADSAVSLSSSSDQNTTSPVFQYIRSR

SEQ ID NO: 45885 - protein, 1096 aa, Homo sapiens
MDIYVCLKRPSWMVDNKRMRTASNFQWLLSTFILLYLMNQVNSQKKGAPHDLKCVTNNLQVWNCSWKAPSGTGRGTDYEVCIENRSRSCYQLEKTSIKIPALSHGDYEITINSLHDFGSSTSKFTLNEQNVSLIPDTPEILNLSADFSTSTLYLKWNDRGSVFPHRSNVIWEIKVLRKESMELVKLVTHNTTLNGKDTLHHWSWASDMPLECAIHFVEIRCYIDNLHFSGLEEWSDWSPVKNISWIPDSQTKVFPQDKVILVGSDITFCCVSQEKVLSALIGHTNCPLIHLDGENVAIKIRNISVSASSGTNVVFTTEDNIFGTVIFAGYPPDTPQQLNCETHDLKEIICSWNPGRVTALVGPRATSYTLVESFSGKYVRLKRAEAPTNESYQLLFQMLPNQEIYNFTLNAHNPLGRSQSTILVNITEKVYPHTPTSFKVKDINSTAVKLSWHLPGNFAKINFLCEIEIKKSNSVQEQRNVTIKGVENSSYLVALDKLNPYTLYTFRIRCSTETFWKWSKWSNKKQHLTTEASPSKGPDTWREWSSDGKNLIIYWKPLPINEANGKILSYNVSCSSDEETQSLSEIPDPQHKAEIRLDKNDYIISVVAKNSVGSSPPSKIASMEIPNDDLKIEQVVGMGKGILLTWHYDPNMTCDYVIKWCNSSRSEPCLMDWRKVPSNSTETVIESDEFRPGIRYNFFLYGCRNQGYQLLRSMIGYIEELAPIVAPNFTVEDTSADSILVKWEDIPVEELRGFLRGYLFYFGKGERDTSKMRVLESGRSDIKVKNITDISQKTLRIADLQGKTSYHLVLRAYTDGGVGPEKSMYVVTKENSVGLIIAILIPVAVAVIVGVVTSILCYRKREWIKETFYPDIPNPENCKALQFQKSVCEGSSALKTLEMNPCTPNNVEVLETRSAFPKIEDTEIISPVAERPEDRSDAEPENHVVVSYCPPIIEEEIPNPAADEAGGTAQVIYIDVQSMYQPQAKPEEEQENDPVGGAGYKPQMHLPINSTVEDIAAEEDLDKTAGYRPQANVNTWNLVSPDSPRSIDSNSEIVSFGSPCSINSRQFLIPPKDEDSPKSNGGGWSFTNFFQNKPND

SEQ ID NO: 45886 - protein, 915 aa, Homo sapiens [sequence omitted]

SEQ ID NO: 45887 - protein, 181 aa, Homo sapiens
MARVRCADASHFWKWSEWSGQNFTTLEAAPSEAPDVWRIVSLEPGNHTVTLFWKPLSKLHANGKILFYNVVVENLDKPSSSELHSIPAPANSTKLILDRCSYQICVIANNSVGASPASVIVISADPENSVSTCFSGTVPSVWGEGDFSHGSGHFCPGDSSTYMGNYLKFIQVTATLTNSHH

SEQ ID NO: 45888 - protein, 52 aa, Homo sapiens
MVFCVLLIMVMCYLKSQWIKETCYPDIPDPYKSSILSLIKFKISSKVWLNRR

SEQ ID NO: 45889 - protein, 1556 aa, Homo sapiens
MITVNASLFPSSVTNSLIAVGNDGLQERDRMVRACIAIICELALQNPEVVALRGGLNTILKNVIDCQLSRINEALITTILHLLNHPKTRQYVRADVELERILAPYTDFHYRHSPDTAEGQLKEDREARFLASKMGIIATFRSWAGIINLCKPGNSGIQSLIGVLCIPNMEIRRGLLEVLYDIFRLPLPVVTEEFIEALLSVDPGRFQDSWRLSDGFVAAEAKTILPHRARSRPDLMDNYLALILSAFIRNGLLEGLVEVITNSDDHISVRATILLGELLHMANTILPHSHSHHLHCLPTLMNMAASFDIPKEKRLRASAALNCLKRFHEMKKRGPKPYSLHLDHIIQKAIATHQKRDQYLRVQKDIFILKDTEEALLINLRDSQVLQHKENLEWNWNLIGTILKWPNVNLRNYKDEQLHRFVRRLLYFYKPSSKLYANLDLDFAKAKQLTVVGCQFTEFLLESEEDGQGYLEDLVKDIVQWLNASSGMKPERSLQNNGLLTTLSQHYFLFIGTLSCHPHGVKMLEKCSVFQCLLNLCSLKNQDHLLKLTVSSLDYSRDGLARVILSKILTAATDACRLYATKHLRVLLRANVEFFNNWGIELLVTQLHDKNKTISSEALDILDEACEDKANLHALIQMKPALSHLGDKGLLLLLRFLSIPKGFSYLNERGYVAKQLEKWHREYNSKYVDLIEEQLNEALTTYRKPVDGDNYVRRSNQRLQRPHVYLPIHLYGQLVHHKTGCHLLEVQNIITELCRNVRTPDLDKWEEIKKLKASLWALGNIGSSNWGLNLLQEENVIPDILKLAKQCEVLSIRGTCVYVLGLIAKTKQGCDILKCHNWDAVRHSRKHLWPVVPDDVEQLCNELSSIPSTLSLNSESTSSRHNSESESVPSSMFILEDDRFGSSSTSTFFLDINEDTEPTFYDRSGPIKDKNSFPFFASSKLVKNRILNSLTLPNKKHRSSSDPKGGKLSSESKTSNRRIRTLTEPSVDFNHSDDFTPISTVQKTLQLETSFMGNKHIEDTGSTPSIGENDLKFTKNFGTENHRENTSRERLVVESSTSSHMKIRSQSFNTDTTTSGISSMSSSPSRETVGVDATTMDTDCGSMSTVVSTKTIKTSHYLTPQSNHLSLSKSNSVSLVPPGSSHTLPRRAQSLKAPSIATIKSLADCNFSYTSSRDAFGYATLKRLQQQRMHPSLSHSEALASPAKDVLFTDTITMKANSFESRLTPSRFMKALSYASLDKEDLLSPINQNTLQRSSSVRSMVSSATYGGSDDYIGLALPVDINDIFQVKDIPYFQTKNIPPHDDRGARAFAHDAGGLPSGTGGLVKNSFHLLRQQMSLTEIMNSIHSDASLFLESTEDTGLQEHTDDNCLYCVCIEILGFQPSNQLSAICSHSDFQDIPYSDWCEQTIHNPLEVVPSKFSGISGCSDGVSQEGSASSTKSTELLLGVKTIPDDTPMCRILLRKEVLRLVINLSSSVSTKCHETGLLTIKEKYPQTFDDICLYSEVSHLLSHCTFRLPCRRFIQELFQDVQFLQMHEEAEAVLATPPKQPIVDTSAES

SEQ ID NO: 45890 - protein, 703 aa, Homo sapiens [sequence omitted]

SEQ ID NO: 45891 - protein, 682 aa, Homo sapiens
MSQDSMMKLKGMAAAGRSQGQHKQRIWVNISLSGIKIIDEKTGVIEHEHPVNKISFIARDVTDNRAFGYVCGGEGQHQFFAIKTGQQAEPLVVDLKDLFQVIYNVKKKEEEKKKIEEASKAVENGSEALMILDDQTNKLKSESKDILLVDLNSEIDTNQNSLRENPFLTNGITSCSLPRPTPQASFLPENAFSANLNFFPTPNPDPFRDDPFTQPDQSTPSSFDSLKSPDQKKENSSSSSTPLSNGPLNGDVDYFGQQFDQISNRTGKQEAQAGPWPFSSSQTQPAVRTQNGVSEREQNGFSVKSSPNPFVGSPPKGLSIQNGVKQDLESSVQSSPHDSIAIIPPPQSTKPGRGRRTAKSSANDLLASDIFAPPVSEPSGQASPTGQPTALQPNPLDLFKTSAPAPVGPLVGLGGVTVTLPQAGPWNTASLVFNQSPSMAPGAMMGGQPSGFSQPVIFGTSPAVSGWNQPSPFAASTPPPVPVVWGPSASVAPNAWSTTSPLGNPFQSNIFPAPAVSTQPPSMHSSLLVTPPQPPPRAGPPKDISSDAFTALDPLGDKEIKDVKEMFKDFQLRQPPAVPARKGEQTSSGTLSAFASYFNSKVGIPQENADHDDFDANQLLNKINEPPKPAPRQVSLPVTKSTDNAFENPFFKDSFGSSQASVASSQPVSSEMYRDPFGNPFA

SEQ ID NO: 45892 - protein, 565 aa, Homo sapiens
MATAEKQKHDGRVKIGHYILGDTLGVGTFGKVKVGKHELTGHKVAVKILNRQKIRSLDVVGKIRREIQNLKLFRHPHIIKLYQVISTPSDIFMVMEYVSGGELFDYICKNGRKSDVPGVVKTGSTKELDEKESRRLFQQILSGVDYCHRHMVVHRDLKPENVLLDAHMNAKIADFGLSNMMSDGEFLRTSCGSPNYAAPEVISGRLYAGPEVDIWSSGVILYALLCGTLPFDDDHVPTLFKKICDGIFYTPQYLNPSVISLLKHMLQVDPMKRATIKDIREHEWFKQDLPKYLFPEDPSYSSTMIDDEALKEVCEKFECSEEEVLSCLYNRNHQDPLAVAYHLIIDNRRIMNEAKDFYLATSPPDSFLDDHHLTRPHPERVPFLVAETPRARHTLDELNPQKSKHQGVRKAKWHLGIRSQSRPNDIMAEVCRAIKQLDYEWKVVNPYYLRVRRKNPVTSTYSKMSLQLYQVDSRTYLLDFRSIDDEITEAKSGTATPQRSGSVSNYRSCQRSDSDAEAQGKSSEVSLTSSVTSLDSSPVDLTPRPGSHTIEFFEMCANLIKILAQ

SEQ ID NO: 45893 - protein, 640 aa, Homo sapiens
MYQCQFALPLLLPDAENNKSILMLGAMKDIVKKQSTQFSGGPTEDTEKFLTLMKMPVISFVRLGYCSFSKSRILNTLLSPAQLKLHKIFLHQDLPLLVLPRQISDGLVEITWCFPDSDDRKENPFFQKPVALANLRGNLESFWTQFGFLMEVSSAVFFFTDCLGEKEWDLLMFLGEAAIERCYFVLSSQARESEEAQIFQRILNLKPAQLLFWERGDAGDRRKNMEGLQAALQEVMFSSCLRCVSVEDMAALARELGIQVDEDFENTQRIQVSSGENMAGTAEGEGQQRHSQLKSSSKSQALMPIQEPGTQCELSQNLQNLYGTPVFRPVLENSWLFPTRIGGNFNHVSLKASWVMGRPFGSEQRPKWFHPLPFQNAGAQGRGKSFGIQSFHPQIFYSGERFMKFSRVARGCHSNGTFGRLPRPICQHVQACPERPQMMGTLERSRAVASKIGHSYSLDSQPARAVGKPWPQQACTRVTELTEATGKLIRTSHIGKPHPQSFQPAAATQKLRPASQQGVQMKTQGGASNPALQIGSHPMCKSSQFKSDQSNPSTVKHSQPKPFHSVPSQPKSSQTKSCQSQPSQTKPSPCKSTQPKPSQPWPPQSKPSQPRPPQPKSSSTNPSQAKAHHSKAGQKRGGKH

SEQ ID NO: 45894 - protein, 256 aa, Homo sapiens
MFPVGKNVVYTCNEGYSLIGNPVARCGEDLRWLVGEMHCQKIACVLPVLMDGIQSHPQKPFYTVGEKVTVSCSGGMSLEGPSAFLCGSSLKWSPEMKNARCVQKENPLTQAVPKCQRWEKLQNSRCVCKMPYECGPSLDVCAQDERSKRILPLTVCKMHVLHCQGRNYTLTGRDSCTLPASAEKACGACPLWGKCDAESSKCVCREASECEEEGFSICVEVNGKEQTMSECEAGALRCRGQSISVTSIRPCAAETQ

SEQ ID NO: 45895 - protein, 249 aa, Homo sapiens
MRKWLATQTMNFTGQLGAGIRYFDLRISTKPRDPDNELYFAHGLFSAKVNEGLEEINAFLTDHHKEVVFLDFNHFYGMQKYHHEKLVQMLKDIYGNKMCPAIFAQEVSLKYLWEKDYQVLVFYHSPVALEVPFLWPGQMMPAPWANTTDPEKLIQFLQASITERRKKGSFFISQVVLTPKASTVVKGVASGLRETITERALPAMMQWVRTQKPGESGINIVTADFVELGDFISTVIKLNYVFDEGEANT

SEQ ID NO: 45896 - protein, 133 aa, Homo sapiens [sequence omitted]

SEQ ID NO: 45897 - protein, 433 aa, Homo sapiens
MMDPILTTSVPVYSLKVDKEYEVRVRSKQRNSGNYGEFSEVLYVTLPQMSQFTCEEDFYFPWLLIIIFGIFGLTVMLFVFLFSKQQRIKMLILPPVPVPKIKGIDPDLLKEGKLEEVNTILAIHDSYKPEFHSDDSWVEFIELDIDEPDEKTEESDTDRLLSSDHEKSHSNLGVKDGDSGRTSCCEPDILETDFNANDIHEGTSEVAQPQRLKGEADLLCLDQKNQNNSPYHDACPATQQPSVIQAEKNKPQPLPTEGAESTHQAAHIQLSNPSSLSNIDFYAQVSDITPAGSVVLSPGQKNKAGMSQCDMHPEMVSLCQENFLMDNAYFCEADAKKCIPVAPHIKVESHIQPSLNQEDIYITTESLTTAAGRPGTGEHVPGSEMPVPDYTSIHIVQSPQGLILNATALPLPDKEFLSSCGYVSTDQLNKIMP

SEQ ID NO: 45898 - protein, 235 aa, Homo sapiens [sequence omitted]

SEQ ID NO: 45899 - protein, 91 aa, Homo sapiens [sequence omitted]

SEQ ID NO: 45900 - protein, 323 aa, Homo sapiens
MEDRSAQAGNCWLRQAKNGRCQVLYKTELSKEECCSTGRLSTSWTEEDVNDNTLFKWMIFNGGAPNCIPCKETCENVDCGPGKKCRMNKKNKPRCVCAPDCSNITWKGPVCGLDGKTYRNECALLKARCKEQPELEVQYQGRCKKTCRDVFCPGSSTCVVDQTNNAYCVTCNRICPEPASSEQYLCGNDGVTYSSACHLRKATCLLGRSIGLAYEGKCIKAKSCEDIQCTGGKKCLWDFKVGRGRCSLCDELCPDSKSDEPVCASDNATYASECAMKEAACSSGVLLEVKHSGSCNSISEDTEEEEEDEDQDYSFPISSILEW

SEQ ID NO: 45901 - protein, 170 aa, Homo sapiens [sequence omitted]

SEQ ID NO: 45902 - protein, 126 aa, Homo sapiens
MSVVLRQTLWRRRAVAVAALSVSRVPTRSLRTSTWRLAQDQTQDTQLITVDEKLVYLVPLCFTFCGLATPSLELATLFPASRHLEFLFTLPGCILTNPEDFIRSPSTYSSNGYHYFNWSSRRAYKN

SEQ ID NO: 45903 - protein, 1241 aa, Homo sapiens [sequence omitted]

SEQ ID NO: 45904 - protein, 127 aa, Homo sapiens
MIWNTMMGTSILSIPWGIKQAGFTTGMCVIILMGLLTLYCCYRVVKSRTMMFSLDTTSWEYPDVCRHYFGSFGQWSSLLFSLVSLIGAMIVYWVLMSNFLFNTGKFIFSKYLYHMLLTQYFQILLPL

SEQ ID NO: 45905 - protein, 864 aa, Homo sapiens [sequence omitted]

SEQ ID NO: 45906 - protein, 669 aa, Homo sapiens
MCEQALGKGCGADSKKKRPPQPPEESQPPQSQAQVPPAAPHHHHHHSHSGPEISRIIVDPTTGKRYCRGKVLGKGGFAKCYEMTDLTNNKVYAAKIIPHSRVAKPHQREKIDKEIELHRILHHKHVVQFYHYFEDKENIYILLEYCSRRSMAHILKARKVLTEPEVRYYLRQIVSGLKYLHEQEILHRDLKLGNFFINEAMELKVGDFGLAARLEPLEHRRRTICGTPNYLSPEVLNKQGHGCESDIWALGCVMYTMLLGRPPFETTNLKETYRCIREARYTMPSSLLAPAKHLIASMLSKNPEDRPSLDDIIRHDFFLQGFTPDRLSSSCCHTVPDFHLSSPAKNFFKKAAAALFGGKKDKARYIDTHNRVSKEDEDIYKLRHDLKKTSITQQPSKHRTDEELQPPTTTVARSGTPAVENKQQIGDAIRMIVRGTLGSCSSSSECLEDSTMGSVADTVARVLRGCLENMPEADCIPKEQLSTSFQWVTKWVDYSNKYGFGYQLSDHTVGVLFNNGAHMSLLPDKKTVHYYAELGQCSVFPATDAPEQFISQVTVLKYFSHYMEENLMDGGDLPSVTDIRRPRLYLLQWLKSDKALMMLFNDGTFQVNFYHDHTKIIICSQNEEYLLTYINEDRISTTFRLTTLLMSGCSSELKNRMEYALNMLLQRCN

SEQ ID NO: 45907 - protein, 28 aa, Homo sapiens
MIEAREKEQKKKQKRQENIAKAKRLKKD

SEQ ID NO: 45908 - protein, 914 aa, Homo sapiens
MNRDQLQKFVQYLITVHHTEVLPTAQKLADEILSQNSEINQVHGAPDPTAGASIDDENCWHLDEEQVQEQVKLFLSQGGYHGSGKQLNLLFAKVREMLKMRDSNGARMLTLITEQFMADPRLSLWRQQGTAMTDKYRQLWDELGALWMCIVLNPHCKLEQKASWLKQLKKWNSVDVCPWEDGNHGSELPNLTNALPQGANANQDSSNRPHRTVFTRAIEACDLHWQDSHLQHIISSDLYTNYCYHDDTENSLFDSRGWPLWHEHVPTACARVDALRSHGYPREALRLAIAIVNTLRRQQQKQLEMFRTQKKELPHKNITSITNLEGWVGHPLDPVGTLFSSLMEACRIDDENLSGFSDFTENMGQCKSLEYQHLPAHKFLEEGESYLTLAVEVALIGLGQQRIMPDGLYTQEKVCRNEEQLISKLQEIELDDTLVKIFRKQAVFLLEAGPYSGLGEIIHRESVPMHTFAKYLFTSLLPHDAELAYKIALRAMRLLVLESTAPSGDLTRPHHIASVVPNRYPRWFTLSHIESQQCELASTMLTAAKGDVRRLETVLESIQKNIHSSSHIFKLAQDAFKIATLMDSLPDITLLKVSLELGLQVMRMTLSTLNWRRREMVRWLVTCATEVGVYALDSIMQTWFTLFTPTEATSIVATTVMSNSTIVRLHLDCHQQEKLASSARTLALQCAMKDPQNCALSALTLCEKDHIAFETAYQIVLDAATTGMSYTQLFTIARYMEHRGYPMRAYKLATLAMTHLNLSYNQDTHPAINDVLWACALSHSLGKNELAAIIPLVVKSVKCATVLSDILRRCTLTTPGMVGLHGRRNSGKLMSLDKAPLRQLLDATIGAYINTTHSRLTHISPRHYSEFIEFLSKARETFLMAHDGHIQFTQFIDNLKQIYKGKKKLMMLVRERFG

SEQ ID NO: 45909 - protein, 509 aa, Homo sapiens
MCMIRDFRGSLDYRPLTTADPIDEHRICVCVRKRPLNKKETQMKDLDVITIPSKDVVMVHEPKQKVDLTRYLENQTFRFDYAFDDSAPNEMVYRFTARPLVETIFERGMATCFAYGQTGSGKTHTMGGDFSGKNQDCSKGIYALAARDVFLMLKKPNYKKLELQVYATFFEIYSGKVFDLLNRKTKLRVLEDGKQQVQVVGLQEREVKCVEDVLKLIDIGNSCRTSGQTSANAHSSRSHAVFQIILRRKGKLHGKFSLIDLAGNERGADTSSADRQTRLEGAEINKSLLALKECIRALGRNKPHTPFRASKLTQVLRDSFIGENSRTCMIATISPGMASCENTLNTLRYANRVKELTVDPTAAGDVRPIMHHPPNQIDDLETQWGVGSSPQRDDLKLLCEQNEEEVSPQLFTFHEAVSQMVEMEEQVVEDHRAVFQESIRWLEDEKALLEMTEEVDYDVDSYATQLEAILEQKIDILTELRDKVKSFRAALQEEEQASKQINPKRPRAL

SEQ ID NO: 45910 - protein, 55 aa, Homo sapiens [sequence omitted]

SEQ ID NO: 45911 - protein, 565 aa, Homo sapiens [sequence omitted]

SEQ ID NO: 45912 - protein, 28 aa, Homo sapiens
MQSCKPRSFNKISAVCTAVNLRKAADIS

SEQ ID NO: 45913 - protein, 2253 aa, Homo sapiens
MMNHVYKERFPKATAQMEERLKEIITSYSPDNVLPLADGVLSFTHHQIIELARDCLDKSHQGLITSRYFLELQHKLDKLLQEAHDRSESGELAFIKQLVRKILIVIARPARLLECLEFDPEEFYYLLEAAEGHAKEGQGIKTDIPRYIISQLGLNKDPLEEMAHLGNYDSGTAETPETDESVSSSNASLKLRRKPRESDFETIKLISNGAYGAVYFVRHKESRQRFAMKKINKQNLILRNQIQQAFVERDILTFAENPFVVSMYCSFETRRHLCMVMEYVEGGDCATLMKNMGPLPVDMARMYFAETVLALEYLHNYGIVHRDLKPDNLLVTSMGHIKLTDFGLSKVGLMSMTTNLYEGHIEKDAREFLDKQVCGTPEYIAPEVILRQGYGKPVDWWAMGIILYEFLVGCVPFFGDTPEELFGQVISDEINWPEKDEAPPPDAQDLITLLLRQNPLERLGTGGAYEVKQHRFFRSLDWNSLLRQKAEFIPQLESEDDTSYFDTRSEKYHHMETEEEDDTNDEDFNVEIRQFSSCSHRFSKVFSSIDRITQNSAEEKEDSVDKTKSTTLPSTETLSWSSEYSEMQQLSTSNSSDTESNRHKLSSGLLPKLAISTEGEQDEAASCPGDPHEEPGKPALPPEECAQEEPEVTTPASTISSSTLSVGSFSEHLDQINGRSECVDSTDNSSKPSSEPASHMARQRLESTEKKKISGKVTKSLSASALSLMIPGDMFAVSPLGSPMSPHSLSSDPSSSRDSSPSRDSSAASASPHQPIVIHSSGKNYGFTIRAIRVYVGDSDIYTVHHIVWNVEEGSPACQAGLKAGDLITHINGEPVHGLVHTEVIELLLKSGNKVSITTTPFENTSIKTGPARRNSYKSRMVRRSKKSKKKESLERRRSLFKKLAKQPSPLLHTSRSFSCLNRSLSSGESLPGSPTHSLSPRSPTPSYRSTPDFPSGTNSSQSSSPSSSAPNSPAGSGHIRPSTLHGLAPKLGGQRYRSGRRKSAGNIPLSPLARTPSPTPQPTSPQRSPSPLLGHSLGNSKIAQAFPSKMHSPPTIVRHIVRPKSAEPPRSPLLKRVQSEEKLSPSYGSDKKHLCSRKHSLEVTQEEVQREQSQREAPLQSLDENVCDVPPLSRARPVEQGCLKRPVSRKVGRQESVDDLDRDKLKAKVVVKKADGFPEKQESHQKSHGPGSDLENFALFKLEEREKKVYPKAVERSSTFENKASMQEAPPLGSLLKDALHKQASVRASEGAMSDGRVPAEHRQGGGDFRRAPAPGTLQDGLCHSLDRGISGKGEGTEKSSQAKELLRCEKLDSKLANIDYLRKKMSLEDKEDNLCPVLKPKMTAGSHECLPGNPVRPTGGQQEPPPASESRAFVSSTHAAQMSAVSFVPLKALTGRVDSGTEKPGLVAPESPVRKSPSEYKLEGRSVSCLKPIEGTLDIALLSGPQASKTELPSPESAQSPSPSGDVRASVPPVLPSSSGKKNDTTSARELSPSSLKMNKSYLLEPWFLPPSRGLQNSPAVSLPDPEFKRDRKGPHPTARSPGTVMESNPQQREGSSPKHQDHTTDPKLLTCLGQNLHSPDLARPRCPLPPEASPSREKPGLRESSERGPPTARSERSAARADTCREPSMELCFPETAKTSDNSKNLLSVGRTHPDFYTQTQAMEKAWAPGGKTNHKDGPGEARPPPRDNSSLHSAGIPCEKELGKVRRGVEPKPEALLARRSLQPPGIESEKSEKLSSFPSLQKDGAKEPERKEQPLQRHPSSIPPPPLTAKDLSSPAARQHCSSPSHASGREPGAKPSTAEPSSSPQDPPKPVAAHSESSSHKPRPGPDPGPPKTKHPDRSLSSQKPSVGATKGKEPATQSLGGSSREGKGHSKSGPDVFPATPGSQNKASDGIGQGEGGPSVPLHTDRAPLDAKPQPTSGGRPLEVLEKPVHLPRPGHPGPSEPADQKLSAVGEKQTLSPKHPKPSTVKDCPTLCKQTDNRQTDKSPSQPAANTDRRAEGKKCTEALYAPAEGDKLEAGLSFVHSENRLKGAERPAAGVGKGFPEARGKGPGPQKPPTEADKPNGMKRSPSATGQSSFRSTALPEKSLSCSSSFPETRAGVREASAASSDTSSAKAAGGMLELPAPSNRDHRKAQPAGEGRTHMTKSDSLPSFRVSTLPLESHHPDPNTMGGASHRDRALSVTATVGETKGKDPAPAQPPPARKQNVGRDVTKPSPAPNTDRPISLSNEKDFVVRQRRGKESLRSSPHKKAL

SEQ ID NO: 45914 - protein, 44 aa, Homo sapiens
MEDRWTAVWPVTSPLKPLESGPLSSAGHIIGILTHSLNSLFIKT

SEQ ID NO: 45915 - protein, 549 aa, Homo sapiens
MIDVHVLADAFKRYLLDLPNPVIPAAVYSEMISLAPEVQSSEEYIQLLKKLIRSPSIPHQYWLTLQYLLKHFFKLSQTSSKNLLNARVLSEIFSPMLFRFSAASSDNTENLIKVIEILISTEWNERQPAPALPPKPPKPTTVANNGMNNNMSLQDAEWYWGDISREEVNEKLRDTADGTFLVRDASTKMHGDYTLTLRKGGNNKLIKIFHRDGKYGFSDPLTFSSVVELINHYRNESLAQYNPKLDVKLLYPVSKYQQDQVVKEDNIEAVGKKLHEYNTQFQEKSREYDRLYEEYTRTSQEIQMKRTAIEAFNETIKIFEEQCQTQERYSKEYIEKFKREGNEKEIQRIMHNYDKLKSRISEIIDSRRRLEEDLKKQAAEYREIDKRMNSIKPDLIQLRKTRDQYLMWLTQKGVRQKKLNEWLGNENTEDQYSLVEDDEDLPHHDEKTWNVGSSNRNKAENLLRGKRDGTFLVRESSKQGCYACSVVVDGEVKHCVINKTATGYGFAEPYNLYSSLKELVLHYQHTSLVQHNDSLNVTLAYPVYAQQRR

SEQ ID NO: 45916 - protein, 594 aa, Homo sapiens
MAKMAEHPEGHHDSALTHMLYTAIAFLGVADHKGGVLLLVLALCCKVGFHTASRKLSVDVGGAKRLQALSHLVSVLLLCPWVIVLSVTTESKVESWFSLIMPFATVIFFVMILDFYVDSICSVKMEVSKCARYGSFPIFISALLFGNFWTHPITDQLRAMNKAAHQESTEHVLSGGVVVSAIFFILSANILSSPSKRGQKGTLIGYSPEGTPLYNFMGDAFQHSSQSIPRFIKESLKQILEESDSRQIFYFLCLNLLFTFVELFYGVLTNSLGLISDGFHMLFDCSALVMGLFAALMSRWKATRIFSYGYGRIEILSGFINGLFLIVIAFFVFMESVARLIDPPELDTHMLTPVSVGGLIVNLIGICAFSHAHSHAHGASQGSCHSSDHSHSHHMHGHSDHGHGHSHGSAGGGMNANMRGVFLHVLADTLGSIGVIVSTVLIEQFGWFIADPLCSLFIAILIFLSVVPLIKDACQVLLLRLPPEYEKELHIALEKIQKIEGLISYRDPHFWRHSASIVAGTIHIQVTSDVLEQRIVQQVTGILKDAGVNNLTIQVEKEAYFQHMSGLSTGFHDVLAMTKQMESMKYCKDGTYIM

SEQ ID NO: 45917 - protein, 515 aa, Homo sapiens
MKALVNQLHERVEHIKLGGGEKARALHISRGKLLPRERIDNLIDPGSPFLELSQFAGYQLYDNEEVPGGGIITGIGRVSGVECMIIANDATVKGGAYYPVTVKKQLRAQEIAMQNRLPCIYLVDSGGAYLPRQADVFPDRDHFGRTFYNQAIMSSKNIAQIAVVMGSCTAGGAYVPAMADENIIVRKQGTIFLAGPPLVKAATGEEVSAEDLGGADLHCRKSGVSDHWALDDHHALHLTRKVVRNLNYQKKLDVTIEPSEEPLFPADELYGIVGANLKRSFDVREVIARIVDGSRFTEFKAFYGDTLVTGFARIFGYPVGIVGNNGVLFSESAKKGTHFVQLCCQRNIPLLFLQNITGFMVGREYEAEGIAKDGAKMVAAVACAQVPKITLIIGGSYGAGNYGMCGRAYSPRFLYIWPNARISVMGGEQAANVLATITKDQRAREGKQFSSADEAALKEPIIKKFEEEGNPYYSSARVWDDGIIDPADTRLVLGLSFSAALNAPIEKTDFGIFRM

SEQ ID NO: 45918 - protein, 281 aa, Homo sapiens
MKALVNQLHERVEHIKLGGGEKARALHISRGKLLPRERIDNLIDPGSPFLELSQFAGYQLYDNEEVPGGGIITGIGRVSGVECMIIANDATVKGGAYYPVTVKKQLRAQEIAMQNRLPCIYLVDSGGAYLPRQADVFPDRDHFGRTFYNQAIMSSKNIAQVKAATGEEVSAEDLGGADLHCRKSGVSDHWALDDHHALHLTRKVVRNLNYQKKLDVTIEPSEEPLFPADELYGIVGANLKRSFDVREVIARIVDGSRFTEFKAFYGDTLVTGIKPLEKHKT

SEQ ID NO: 45919 - protein, 840 aa, Homo sapiens
MEYEWKPDEQGLQQILQLLKESQSPDTTIQRTVQQKLEQLNQYPDFNNYLIFVLTKLKSEGILITTIASKGELQNWPDLLPKLCSLLDSEDYNTCEGAFGALQKICEDSAEILDSDVLDRPLNIMIPKFLQFFKHSSPKIRSHAVACVNQFIISRTQALMLHIDSFIENLFALAGDEEPEVRKNVCRALVMLLEVRMDRLLPHMHNIVEYMLQRTQDQDENVALEACEFWLTLAEQPICKDVLVRHLPKLIPVLVNGMKYSDIDIILLKGDVEEDETIPDSEQDIRPRFHRSRTVAQQHDEDGIEEEDDDDDEIDDDDTISDWNLRKCSAAALDVLANVYRDELLPHILPLLKELLFHHEWVVKESGILVLGAIAEGCMQGMIPYLPELIPHLIQCLSDKKALVRSITCWTLSRYAHWVVSQPPDTYLKPLMTELLKRILDSNKRVQEAACSAFATLEEEACTELVPYLAYILDTLVFAFSKYQHKNLLILYDAIGTLADSVGHHLNKPEYIQMLMPPLIQKWNMLKDEDKDLFPLLECLSSVATALQSGFLPYCEPVYQRCVNLVQKTLAQAMLNNAQPDQYEAPDKDFMIVALDLLSGLAEGLGGNIEQLVARSNILTLMYQCMQDKMPEVRQSSFALLGDLTKACFQHVKPCIADFMPILGTNLNPEFISVCNNATWAIGEISIQMGIEMQPYIPMVLHQLVEIINRPNTPKTLLENTAITIGRLGYVCPQEVAPMLQQFIRPWCTSLRNIRDNEEKDSAFRGICTMISVNPSGVIQDFIFFCDAVASWINPKDDLRDMFCKILHGFKNQVGDENWRRFSDQFPLPLKERLAAFYGV

SEQ ID NO: 45920 - protein, 808 aa, Homo sapiens
MAYFVENFWGEKNSGFDVLYHNMKHGQISTKELADFVRERATIEEAYSRSMTKLAKSASNYSQLGTFAPVWDVFKTSTEKLANCHLDLVRKLQELIKEVQKYGEEQVKSHKKTKEEVAGTLEAVQTIQSITQALQKSKENYNAKCVEQERLKKEGATQREIEKAAVKSKKATDTYKLYVEKYALAKADFEQKMTETAQKFQDIEETHLIHIKEIIGSLSNAIKEIHLQIGQVHEEFINNMANTTVESLIQKFAESKGTGKERPGLIEFEECDTASAVEGIKPRKRKTFALPGIIKKEKDAESVECPDADSLNIPDVDEEGYSIKPETNQNDTKENHFYSSSDSDSEDEEPKKYRIEIKPMHPNNSHHTMASLDELKVSIGNITLSPAISRHSPVQMNRNLSNEELTKSKPSAPPNEKGTSDLLAWDPLFGPSLDSSSSSSLTSSSSARPTTPLSVGTIVPPPRPASRPKLTSGKLSGINEIPRPFSPPVTSNTSPPPAAPLARAESSSSISSSASLSAANTPTVGVSRGPSPVSLGNQDTLPVAVALTESVNAYFKGADPTKCIVKITGDMTMSFPSGIIKVFTSNPTPAVLCFRVKNISRLEQILPNAQLVFSDPSQCDSNTKDFWMNMQAVTVYLKKLSEQNPAASYYNVDVLKYQVSSNGIQSTPLNLATYWKCSASTTDLRVDYKYNPEAMVAPSVLSNIQVVVPVDGGVTNMQSLPPAIWNAEQMKAFWKLSSISEKSENGGSGSLRAKFDLSEGPSKPTTLAVQFLSEGSTLSGVDFELVGTGYRLSLIKKRFATGRYLADC

SEQ ID NO: 45921 - protein, 200 aa, Homo sapiens
MLISVLGIWVPGCGSNWAQEPLNETDTGDSEPRMCGFLSLQIMGPLIVLVGLCFFVVAHVKKRNTLNAGQDASEREEGQIQIMEPVQVTVGDSVIIFPPPPPPYFPESSASAVAESPGTNSLLPNENPPSYYSIFNYGTPTSEGAASERDCESIYTISGTNSSSEASHTPHLPSELPPRYEEKENAAATFLPLSSEPSPP

SEQ ID NO: 45922 - protein, 201 aa, Homo sapiens
MLISVLGIWVPGCGSNWAQEPLNETDTGDSEPRMCGFLSLQIMGPLIVLVGLCFFVVAHVKKRNTLNAGQDASEREEGQIQIMEPVQVTVGDSVIIFPPPPPPYFPESSASAVAESPGTNSLLPNENPPSYYSIFNYGRTPTSEGAASERDCESIYTISGTNSSSEASHTPHLPSELPPRYEEKENAAATFLPLSSEPSPP

SEQ ID NO: 45923 - protein, 544 aa, Homo sapiens
MLLALLLATLLAAMLALLTQVALVVQVAEAARAPSVSAKPGPALWPLPLLVKMTPNLLHLAPENFYISHSPNSTAGPSCTLLEEAFRRYHGYIFGFYKWHHEPAEFQAKTQVQQLLVSITLQSECDAFPNISSDESYTLLVKEPVAVLKANRVWGALRGLETFSQLVYQDSYGTFTINESTIIDSPRFSHRGILIDTSRHYLPVKIILKTLDAMAFNKFNVLHWHIVDDQSFPYQSITFPELSNKGSYSLSHVYTPNDVRMVIEYARLRGIRVLPEFDTPGHTLSWGKGQKDLLTPCYSRQNKLDSFGPINPTLNTTYSFLTTFFKEISEVFPDQFIHLGGDEVEFKCWESNPKIQDFMRQKGFGTDFKKLESFYIQKVLDIIATINKGSIVWQEVFDDKAKLAPGTIVEVWKDSAYPEELSRVTASGFPVILSAPWYLDLISYGQDWRKYYKVEPLDFGGTQKQKQLFIGGEACLWGEYVDATNLTPRLWPRASAVGERLWSSKDVRDMDDAYDRLTRHRCRMVERGIAAQPLYAGYCNHENM

SEQ ID NO: 45924 - protein, 492 aa, Homo sapiens [sequence omitted]

SEQ ID NO: 45925 - protein, 458 aa, Homo sapiens
MDFFSSHLLADSSSPATNSSHTDAHEILVSDFLVSDENLQKMENVLDLWSSGLKTNIISELSKWRLNFIDWHRMEMRKEKEKHAAHLKQLCNQINELKELQKTFEISIGRKDEVISSLSHAIGKQKEKIELMRTFFHWRIGHVRARQDVYEGKLADQYYQRTLLKKVWKVWRSVVQKQWKDVVERACQARAEEVCIQISNDYEAKVAMLSGALENAKAEIQRMQHEKEHFEDSMKKAFMRGVCALNLEAMTIFQNRNDAGIDSTNNKKEEYGPGVQGKEHSAHLDPSAPPMPLPVTSPLLPSPPAAVGGASATAVPSAASMTSTRAASASSVHVPVSALGAGSAATAASEEMYVPRVVTSAQQKAGRTITARITGRCDFASKNRISSSLAIMGVSPPMSSVVVEKHHPVTVQTIPQATAAKYPRTIHPESSTSASRSLGTRSAHTQSLTSVHSIKVVD

SEQ ID NO: 45926 - protein, 205 aa, Homo sapiens
MQAYERNFWDPSPQLDTQQEIKLCQKSNDISIHHFTCDEENVFAAVGRGLYVYSLQMKRVIACQKTAHDSNVLHVARLPNRQLISCSEDGSVRIWELREKQQLAAEPVPTGFFNMWGFGRVSKQASQPVKKQQENATSCSLELIGDLIGHSSSVEMFLYFEDHGLVTCSADHLIILWKNGERESGLRSLRLFQKLEENGDLYLAV

SEQ ID NO: 45927 - protein, 83 aa, Homo sapiens
MQAYERNFWDPSPQLDTQQEIKLCQKSNDISIHHFTCDEENVFAAVGRGLYVYSLQMKRVIACQKTAHDSNVLHVARLPNRFF

SEQ ID NO: 45928 - protein, 4 aa, Homo sapiens
MGYS

SEQ ID NO: 45929 - protein, 392 aa, Homo sapiens
MVGKWHLGMYRKECLPTRRGFDTYFGYLLGSEDYYSHERCTLIDALNVTRCALDFRDGEEVATGYKNMYSTNIFTKRAIALITNHPPEKPLFLYLALQSVHEPLQVPEEYLKPYDFIQDKNRHHYAGMVSLMDEAVGNVTAALKSSGLWNNTVFIFSTDNGGQTLAGGNNWPLRGRKWSLWEGGVRGVGFVASPLLKQKGVKNRELIHISDWLPTLVKLARGHTNGTKPLDGFDVWKTISEGSPSPRIELLHNIDPNFVDSSPCPRNSMAPAKDDSSLPEYSAFNTSVHAAIRHGNWKLLTGYPGCGYWFPPPSQYNVSEIPSSDPPTKTLWLFDIDRDPEERHDLSREYPHIVTKLLSRLQFYHKHSVPVYFPAQDPRCDPKATGVWGPWM

SEQ ID NO: 45930 - protein, 272 aa, Homo sapiens
MVGKWHLGMYRKECLPTRRGFDTYFGYLLGSEDYYSHERCTLIDALNVTRCALDFRDGEEVATGYKNMYSTNIFTKRAIALITNHPPEKPLFLYLALQSVHEPLQVPEEYLKPYDFIQDKNRHHYAGMVSLMDEAVGNVTAALKSSGLWNNTVFIFSTDNGGQTLAGGNNWPLRGRKWSLWEGGVRGVGFVASPLLKQKGVKNRELIHISDWLPTLVKLARGHTNGTKPLDGFDVWKTISEGSPSPRIELLHNIDPNFVDSSPYWPECSLLL

SEQ ID NO: 45931 - protein, 791 aa, Homo sapiens
MVKEDEAPLALSDAEQPPPATELESPAEECSWAGLFSFQDLRAVHQQLCSVNSQLEPCLPVFPEEPSGMWTVLFGGAPEMTEQEIDTLCYQLQVYLGHGLDTCGWKILSQVLFTETDDPEEYYESLSELRQKGYEEVLQRARKRIQELLDKHKNTESMVELLDLYQMEDEAYSSLAEATTELYQYLLQPFRDMRELAMLRRQQIKISMENDYLGPRRIESLQKEDADWQRKAHMAVLSIQDLTVKYFEITAKAQKAVYDRMRADQKKFGKASWAAAAERMEKLQYAVSKETLQMMRAKEICLEQRKHALKEEMQSLRGGTEAIARLDQLEADYYDLQLQLYEVQFEILKCEELLLTAQLESIKRLISEKRDEVVYYDTYESMEAMLEKEEMAASAYLQREELQKLQQKARQLEARRGRVSAKKSYLRNKKEICIAKHNEKIQQRTRIEDEYRTHHTVQLKREKLHDEEERKSAWVSQERQRTLDRLRTFKQRYPGQVILKSTRLRLAHARRKGAASPVLQEDHCDSLPSVLQVEEKTEEVGEGRVKRGPSQTTEPQSLVQLEDTSLTQLEATSLPLSGVTSELPPTISLPLLNNNLEPCSVTINPLPSPLPPTPPPPPPPPPPPPPPPLPVAKDSGPETLEKDLPRKEGNEKRIPKSASAPSAHLFDSSQLVSARKKLRKTAEGLQRRRVSSPMDEVLASLKRGSFHLKKVEQRTLPPFPDEDDSNNILAQIRKGVKLKKVQKDVLRESFTLLPDTDPLTRSIHEALRRIKEASPESEDEEEALPCTDWEN

SEQ ID NO: 45932 - protein, 368 aa, Homo sapiens
MPPLFHTHYVPDIVRCVPPFREIAFLEPREITLPEAKDKLSQQILELFETCQQQISDLKKKELCRTQLQREIQLLFPQSRLFLVGSSLNGFGTRSSDGDLCLVVKEEPCFFQVNQKTEARHILTLVHKHFCTRLSGYIERPQLIRAKVPIVKFRDKVSCVEFDLNVNNIVGIRNTFLLRTYAYLENRVRPLVLVIKKWASHHQINDASRGTLSSYSLVLMVLHYLQTLPEPILPSLQKIYPESFSPAIQLHLVHQAPCNVPPYLSKNESNLGDLLLGFLKYYATEFDWNSQMISVREAKAIPRPDGIEWRNKYICVEEPFDGTNTARAVHEKQKFDMIKDQFLKSWHRLKNKRDLNSILPVRAAVLKR

SEQ ID NO: 45933 - protein, 3997 aa, Homo sapiens
MVTVQREDSGITWETNSSRSSTPWASEESQTSGVCSREGSTVNSPPGNVSFIVDEVKKVRKRTHKSKHGSPSLRRKGNRKRNSFESQDVPTNKKGSPLTSASQVLTTEKEKSYTGIYDKARKKKTTSNTPPITGAIYKEHKPLVLRPVYIGTVQYKIKMFNSVKEELIPLQFYGTLPKGYVIKEIHYRKGKDASISLEPDLDNSGSNTVSKTRKLVAQSIEDKVKEVFPPWRGALSKGSESLTLMFSHEDQKKIYADSPLNATSALEHTVPSYSSSGRAEQGIQLRHSQSVPQQPEDEAKPHEVEPPSVTPDTPATMFLRTTKEECELASPGTAASENDSSVSPSFANEVKKEDVYSAHHSISLEAASPGLAASTQDGLDPDQEQPDLTSIERAEPVSAKLTPTHPSVKGEKEENMLEPSISLSEPLMLEEPEKEEIETSLPIAITPEPEDSNLVEEEIVELDYPESPLVSEKPFPPHMSPEVEHKEEELILPLLAASSPEHVALSEEEREEIASVSTGSAFVSEYSVPQDLNHELQEQEGEPVPPSNVEAIAEHAVLSEEENEEFEAYSPAAAPTSESSLSPSTTEKTSENQSPLFSTVTPEYMVLSGDEASESGCYTPDSTSASEYSVPSLATKESLKKTIDRKSPLILKGVSEYMIPSEEKEDTGSFTPAVAPASEPSLSPSTTEKTSECQSPLPSTATSEHVVPSEGEDLGSERFTPDSKLISKYAAPLNATQESQKKIINEASQFKPKGISEHTVLSVDGKEVIGPSSPDLVVASEHSFPPHTTEMTSECQAPPLSATPSEYVVLSDEEAVELERYTPSSTSASEFSVPPYATPEAQEEEIVHRSLNLKGASSPMNLSEEDQEDIGPFSPDSAFVSEFSFPPYATQEAEKREFECDSPICLTSPSEHTILSDEDTEEAELFSPDSASQVSIPPFRISETEKNELEPDSLLTAVSASGYSCFSEADEEDIGSTAATPVSEQFSSSQKQKAETFPLMSPLEDLSLPPSTDKSEKAEIKPEIPTTSTSVSEYLILAQKQKTQAYLEPESEDLIPSHLTSEVEKGEREASSSVAAIPAALPAQSSIVKEETKPASPHSVLPDSVPAIKKEQEPTAALTLKAADEQMALSKVRKEEIVPDSQEATAHVSQDQKMEPQPPNVPESEMKYSVLPDMVDEPKKGVKPKLVLNVTSELEQRKLSKNEPEVIKPYSPLKETSLSGPEALSAVKMEMKHDSKITTTPIVLHSASSGVEKQVEHGPPALAFSALSEEIKKEIEPSSSTTTASVTKLDSNLTRAVKEEIPTDSSLITPVDRPVLTKVGKGELGSGLPPLVTSADEHSVLAEEDKVAIKGASPIETSSKHLAWSEAEKEIKFDSLPSVSSIAEHSVLSEVEAKEVKAGLPVIKTSSSQHSDKSEEARVEDKQDLLFSTVCDSERLVSSQKKSLMSTSEVLEPEHELPLSLWGEIKKKETELPSSQNVSPASKHIIPKGKDEETASSSPELENLASGLAPTLLLLSDDKNKPAVEVSSTAQGDFPSEKQDVALAELSLEPEKKDKPHQPLELPNAGSEFSSDLGRQSGSIGTKQAKSPITETEDSVLEKGPAELRSREGKEENRELCASSTMPAISELSSLLREESQNEEIKPFSPKIISLESKEPPASVAEGGNPEEFQPFTFSLKGLSEEVSHPADFKKGGNQEIGPLPPTGNLKAQVMGDILDKLSEETGHPNSSQVLQSITEPSKIAPSDLLVEQKKTEKALHSDQTVKLPDVSTSSEDKQDLGIKQFSLMRENLPLEQSKSFMTTKPADVKETKMEEFFISPKDENWMLGKPENVASQHEQRIAGSVQLDSSSSNELRPGQLKAAVSSKDHTCEVRKQVLPHSAEESHLSSQEAVSALDTSSGNTETLSSKSYSSEEVKLAEEPKSLVLAGNVERNIAEGKEIHSLMESESLLLEKANTELSWPSKEDSQEKIKLPPERFFQKPVSGLSVEQVKSETISSSVKTAHFPAEGVEPALGNEKEAHRSTPPFPEEKPLEESKMVQSKVIDDADEGKKPSPEVKIPTQRKPISSIHAREPQSPESPEVTQNPPTQPKVAKPDLPEEKGKKGISSFKSWMSSLFFGSSTPDNKVAEQEDLETQPSPSVEKAVTVIDPEGTIPTNFNVAEKPADHSLSEVKLKTADEPRGTLVKSGDGQNVKEKSMILSNVEDLQQPKFISEVSREDYGKKEISGDSEEMNINSVVTSADGENLEIQSYSLIGEKLVMEEAKTIVPPHVTDSKRVQKPAIAPPSKWNISIFKEEPRSDQKQKSLLSFDVVDKVPQQPKSASSNFASKNITKESEKPESIILPVEESKGSLIDFSEDRLKKEMQNPTSLKISEEETKLRSVSPTEKKDNLENRSYTLAEKKVLAEKQNSVAPLELRDSNEIGKTQITLGSRSTELKESKADAMPQHFYQNEDYNERPKIIVGSEKEKGEEKENQVYVLSEGKKQQEHQPYSVNVAESMSRESDISLGHSLGETQSFSLVKATSVTEKSEAMLAEAHPEIREAKAVGTQPHPLEESKVLVEKTKTFLPVALSCRDEIENHSLSQEGNLVLEKSSRDMPDHSEEKEQFRESELSKGGSVDITKETVKQGFQEKAVGTQPRPLEESKVLVEKTKTFLPVVLSCHDEIENHSLSQEGNLVLEKSSRDMPDHSEEKEQFKESELWKGGSVDITKESMKEGFPSKESERTLARPFDETKSSETPPYLLSPVKPQTLASGASPEINAVKKKEMPRSELTPERHTVHTIQTSKDDTSDVPKQSVLVSKHHLEAAEDTRVKEPLSSAKSNYAQFISNTSASNADKMVSNKEMPKEPEDTYAKGEDFTVTSKPAGLSEDQKTAFSIISEGCEILNIHAPAFISSIDQEESEQMQDKLEYLEEKASFKTIPLPDDSETVACHKTLKSRLEDEKVTPLKENKQKETHKTKEEISTDSETDLSFIQPTIPSEEDYFEKYTLIDYNISPDPEKQKAPQKLNVEEKLSKEVTEETISFPVSSVESALEHEYDLVKLDESFYGPEKGHNILSHPETQSQNSADRNVSKDTKRDVDSKSPGMPLFEAEEGVLSRTQIFPTTIKVIDPEFLEEPPALAFLYKDLYEEAVGEKKKEEETASEGDSVNSEASFPSRNSDTDDGTGIYFEKYILKDDILHDTSLTQKDQGQGLEEKRVGKDDSYQPIAAEGEIWGKFGTICREKSLEEQKGVYGEGESVDHVETVGNVAMQKKAPITEDVRVATQKISYAVPFEDTHHVLERADEAGSHGNEVGNASPEVNLNVPVQVSFPEEEFASGATHVQETSLEEPKILVPPEPSEERLRNSPVQDEYEFTESLHNEVVPQDILSEELSSESTPEDVLSQGKESFEHISENEFASEAEQSTPAEQKELGSERKEEDQLSSEVVTEKAQKELKKSQIDTYCYTCKCPISATDKVFGTHKDHEVSTLDTAISAVKVQLAEFLENLQEKSLRIEAFVSEIESFFNTIEENCSKNEKRLEEQNEEMMKKVLAQYDEKAQSFEEVKKKKMEFLHEQMVHFLQSMDTAKDTLETIVREAEELDEAVFLTSFEEINERLLSAMESTASLEKMPAAFSLFEHYDDSSARSDQMLKQVAVPQPPRLEPQEPNSATSTTIAVYWSMNKEDVIDSFQVYCMEEPQDDQEVNELVEEYRLTVKESYCIFEDLEPDRCYQVWVMAVNFTGCSLPSERAIFRTAPSTPVIRAEDCTVCWNTATIRWRPTTPEATETYTLEYCRQHSPEGEGLRSFSGIKGLQLKVNLQPNDNYFFYVRAINAFGTSEQSEAALISTRGTRFLLLRETAHPALHISSSGTVISFGERRRLTEIPSVLGEELPSCGQHYWETTVTDCPAYRLGICSSSAVQAGALGQGETSWYMHCSEPQRYTFFYSGIVSDVHVTERPARVGILLDYNNQRLIFINAESEQLLFIIRHRFNEGVHPAFALEKPGKCTLHLGIEPPDSVRHK

SEQ ID NO: 45934 - protein, 346 aa, Homo sapiens
MCKGIKAGDTCEKLVGYSAVYRVCFGMACFFFIFCLLTLKINNSKSCRAHIHNGFWFFKLLLLGAMCSGAFFIPDQDTFLNAWRYVGAVGGFLFIGIQLLLLVEFAHKWNKNWTAGTASNKLWYASLALVTLIMYSIATGGLVLMAVFYTQKDSCMENKILLGVNGGLCLLISLVAISPWVQNRQPHSGLLQSGVISCYVTYLTFSALSSKPAEVVLDEHGKNVTICVPDFGQDLYRDENLVTILGTSLLIGCILYSCLTSTTRSSSDALQGRYAAPELEIARCCFCFSPGGEDTEEQQPGKEGPRVIYDEKKGTVYIYSYFHFVFFLASLYVMMTVTNWFKNYQC

SEQ ID NO: 45935 - protein, 390 aa, Homo sapiens [sequence omitted]

SEQ ID NO: 45936 - protein, 1407 aa, Homo sapiens
MGNLVHATNSEEDIKKLLPDDFKSNADSLIGLDLSSVSDTPCVSSTDHDSDTVREQQNDISSELQNREIGGIKELGIKVDTTLSDSYNYSGTENLKDKKIFNQLESIVDFNMSSALTRQSSKMFHAKDKLQHKSQPCGLLKDVGLVKEEVDVAVITAAECLKEEGKTSALTCSLPKNEDLCLNDSNSRDENFKLPDFSFQEDKTVIKQSAQEDSKSLDLKDNDVIQDSSSALHVSSKDVPSSLSCLPASGSMCGSLIESKARGDFLPQHEHKDNIQDAVTIHEEIQNSVVLGGEPFKENDLLKQEKCKSILLQSLIEGMEDRKIDPDQTVIRAESLDGGDTSSTVVESQEGLSGTHVPESSDCCEGFINTFSSNDMDGQDLDYFNIDEGAKSGPLISDAELDAFLTEQYLQTTNIKSFEENVNDSKSQMNQIDMKGLDDGNINNIYFNAEAGAIGESHGINIICEIVDKQNTIENGLSLGEKSTIPVQQGLPTSKSEITNQLSVSDINSQSVGGARPKQLFSLPSRTRSSKDLNKPDVPDTIESEPSTADTVVPITCAIDSTADPQVSFNSNYIDIESNSEGGSSFVTANEDSVPENTCKEGLVLGQKQPTWVPDSEAPNCMNCQVKFTFTKRRHHCRACGKVFCGVCCNRKCKLQYLEKEARVCVVCYETISKAQAFERMMSPTGSNLKSNHSDECTTVQPPQENQTSSIPSPATLPVSALKQPGVEGLCSKEQKRVWFADGILPNGEVADTTKLSSGSKRCSEDFSPLSPDVPMTVNTVDHSHSTTVEKPNNETGDITRNEIIQSPISQVPSVEKLSMNTGNEGLPTSGSFTLDDDVFAETEEPSSPTGVLVNSNLPIASISDYRLLCDINKYVCNKISLLPNDEDSLPPLLVASGEKGSVPVVEEHPSHEQIILLLEGESFHPVTFVLNANLLVNVKFIFYSSDKYWYFSTNGLHGLGQAEIIILLLCLPNEDTIPKDIFRLFITIYKDALKGKYIENLDNITFTESFLSSKDHGGFLFITPTFQKLDDLSLPSNPFLCGILIQKLEIPWAKVFPMRLMLRLGAEYKAYPAPLTSIRGRKPLFGEIGHTIMNLLVDLRNYQYTLHNIDQLLIHMEMGKSCIKIPRKKYSDVMKVLNSSNEHVISIGASFSTEADSHLVCIQNDGIYETQANSATGHPRKVTGASFVVFNGALKTSSGFLAKSSIVEDGLMVQITPETMNGLRLALREQKDFKITCGKVDAVDLREYVDICWVDAEEKGNKGVISSVDGISLQGFPSEKIKLEADFETDEKIVKCTEVFYFLKDQDLSILSTSYQFAKEIAMACSAALCPHLKTLKSNGMNKIGLRVSIDTDMVEFQAGSEGQLLPQHYLNDLDSALIPVIHGGTSNSSLPLEIELVFFIIEHLF

SEQ ID NO: 45937 - protein, 399 aa, Homo sapiens
MGTSVLTTGYLLNRQKVCAEVREQPRLFPPSADYPDLRKHNNCMAECLTPAIYAKLRNKVTPNGYTLDQCIQTGVDNPGHPFIKTVGMVAGDEESYEVFADLFDPVIKLRHNGYDPRVMKHTTDLDASKITQGQFDEHYVLSSRVRTGRSIRGLSLPPACTRAERREVENVAITALEGLKGDLAGRYYKLSEMTEQDQQRLIDDHFLFDKPVSPLLTCAGMARDWPDARGIWHNYDKTFLIWINEEDHTRVISMEKGGNMKRVFERFCRGLKEVERLIQERGWEFMWNERLGYILTCPSNLGTGLRAGVHVRIPKLSKDPRFSKILENLRLQKRGTGGVDTAAVADVYDISNIDRIGRSEVELVQIVIDGVNYLVDCEKKLERGQDIKVPPPLPQFGKK

SEQ ID NO: 45938 - protein, 3386 aa, Homo sapiens
MCSTLIVTHALHKVKVGKSPPVRGSLSGKVSLPCHFSTMPTLPPSYNTSEFLRIKWSKIEVDKNGKDLKETTVLVAQNGNIKIGQDYKGRVSVPTHPEAVGDASLTVVKLLASDAGLYRCDVMYGIEDTQDTVSLTVDGVVFHYRAATSRYTLNFEAAQKACLDVGAVIATPEQLFAAYEDGFEQCDAGWLADQTVRYPIRAPRVGCYGDKMGKAGVRTYGFRSPQETYDVYCYVDHLDGDVFHLTVPSKFTFEEAAKECENQDARLATVGELQAAWRNGFDQCDYGWLSDASVRHPVTVARAQCGGGLLGVRTLYRFENQTGFPPPDSRFDAYCFKPKEATTIDLSILAETASPSLSKEPQMVSDRTTPIIPLVDELPVIPTEFPPVGNIVSFEQKATVQPQAITDSLATKLPTPTGSTKKPWDMDDYSPSASGPLGKLDISEIKEEVLQSTTGVSHYATDSWDGVVEDKQTQESVTQIEQIEVGPLVTSMEILKHIPSKEFPVTETPLVTARMILESKTEKKMVSTVSELVTTGHYGFTLGEEDDEDRTLTVGSDESTLIFDQIPEVITVSKTSEDTIHTHLEDLESVSASTTVSPLIMPDNNGSSMDDWEERQTSGRITEEFLGKYLSTTPFPSQHRTEIELFPYSGDKILVEGISTVIYPSLQTEMTHRRERTETLIPEMRTDTYTDEIQEEITKSPFMGKTEEEVFSGMKLSTSLSEPIHVTESSVEMTKSFDFPTLITKLSAEPTEVRDMEEDFTATPGTTKYDENITTVLLAHGTLSVEAATVSKWSWDEDNTTSKPLESTEPSASSKLPPALLTTVGMNGKDKDIPSFTEDGADEFTLIPDSTQKQLEEVTDEDIAAHGKFTIRFQPTTSTGIAEKSTLRDSTTEEKVPPITSTEGQVYATMEGSALGEVEDVDLSKPVSTVPQFAHTSEVEGLAFVSYSSTQEPTTYVDSSHTIPLSVIPKTDWGVLVPSVPSEDEVLGEPSQDILVIDQTRLEATISPETMRTTKITEGTTQEEFPWKEQTAEKPVPALSSTAWTPKEAVTPLDEQEGDGSAYTVSEDELLTGSERVPVLETTPVGKIDHSVSYPPGAVTEHKVKTDEVVTLTPRIGPKVSLSPGPEQKYETEGSSTTGFTSSLSPFSTHITQLMEETTTEKTSLEDIDLGSGLFEKPKATELIEFSTIKVTVPSDITTAFSSVDRLHTTSAFKPSSAITKKPPLIDREPGEETTSDMVIIGESTSHVPPTTLEDIVAKETETDIDREYFTTSSPPATQPTRPPTVEDKEAFGPQALSTPQPPASTKFHPDINVYIIEVRENKTGRMSDLSVIGHPIDSESKEDEPCSEETDPVHDLMAEILPEFPDIIEIDLYHSEENEEEEEECANATDVTTTPSVQYINGKHLVTTVPKDPEAAEARRGQFESVAPSQNFSDSSESDTHPFVIAKTELSTAVQPNESTETTESLEVTWKPETYPETSEHFSGGEPDVFPTVPFHEEFESGTAKKGAESVTERDTEVGHQAHEHTEPVSLFPEESSGEIAIDQESQKIAFARATEVTFGEEVEKSTSVTYTPTIVPSSASAYVSEEEAVTLIGNPWPDDLLSTKESWVEATPRQVVELSGSSSIPITEGSGEAEEDEDTMFTMVTDLSQRNTTDTLITLDTSRIITESFFEVPATTIYPVSEQPSAKVVPTKFVSETDTSEWISSTTVEEKKRKEEEGTTGTASTFEVYSSTQRSDQLILPFELESPNVATSSDSGTRKSFMSLTTPTQSEREMTDSTPVFTETNTLENLGAQTTEHSSIHQPGVQEGLTTLPRSPASVFMEQGSGEAAADPETTTVSSFSLNVEYAIQAEKEVAGTLSPHVETTFSTEPTGLVLSTVMDRVVAENITQTSREIVISERLGEPNYGAEIRGFSTGFPLEEDFSGDFREYSTVSHPIAKEETVMMEGSGDAAFRDTQTSPSTVPTSVHISHISDSEGPSSTMVSTSAFPWEEFTSSAEGSGEQLVTVSSSVVPVLPSAVQKFSGTASSIIDEGLGEVGTVNEIDRRSTILPTAEVEGTKAPVEKEEVKVSGTVSTNFPQTIEPAKLWSRQEVNPVRQEIESETTSEEQIQEEKSFESPQNSPATEQTIFDSQTFTETELKTTDYSVLTTKKTYSDDKEMKEEDTSLVNMSTPDPDANGLESYTTLPEATEKSHFFLATALVTESIPAEHVVTDSPIKKEESTKHFPKGMRPTIQESDTELLFSGLGSGEEVLPTLPTESVNFTEVEQINNTLYPHTSQVESTSSDKIEDFNRMENVAKEVGPLVSQTDIFEGSGSVTSTTLIEILSDTGAEGPTVAPLPFSTDIGHPQNQTVRWAEEIQTSRPQTITEQDSNKNSSTAEINETTTSSTDFLARAYGFEMAKEFVTSAPKPSDLYYEPSGEGSGEVDIVDSFHTSATTQATRQESSTTFVSDGSLEKHPEVPSAKAVTADGFPTVSVMLPLHSEQNKSSPDPTSTLSNTVSYERSTDGSFQDRFREFEDSTLKPNRKKPTENIIIDLDKEDKDLILTITESTILEILPELTSDKNTIIDIDHTKPVYEDILGMQTDIDTEVPSEPHDSNDESNDDSTQVQEIYEAAVNLSLTEETFEGSADVLASYTQATHDESMTYEDRSQLDHMGFHFTTGIPAPSTETELDVLLPTATSLPIPRKSATVIPEIEGIKAEAKALDDMFESSTLSDGQAIADQSEIIPTLGQFERTQEEYEDKKHAGPSFQPEFSSGAEEALVDHTPYLSIATTHLMDQSVTEVPDVMEGSNPPYYTDTTLAVSTFAKLSSQTPSSPLTIYSGSEASGHTEIPQPSALPGIDVGSSVMSPQDSFKEIHVNIEATFKPSSEEYLHITEPPSLSPDTKLEPSEDDGKPELLEEMEASPTELIAVEGTEILQDFQNKTDGQVSGEAIKMFPTIKTPEAGTVITTADEIELEGATQWPHSTSASATYGVEAGVVPWLSPQTSERPTLSSSPEINPETQAALIRGQDSTIAASEQQVAARILDSNDQATVNPVEFNTEVATPPFSLLETSNETDFLIGINEESVEGTAIYLPGPDRCKMNPCLNGGTCYPTETSYVCTCVPGYSGDQCELDFDECHSNPCRNGATCVDGFNTFRCLCLPSYVGALCEQDTETCDYGWHKFQGQCYKYFAHRRTWDAAERECRLQGAHLTSILSHEEQMFVNRVGHDYQWIGLNDKMFEHDFRWTDGSTLQYENWRPNQPDSFFSAGEDCVVIIWHENGQWNDVPCNYHLTYTCKKGTVACGQPPVVENAKTFGKMKPRYEINSLIRYHCKDGFIQRHLPTIRCLGNGRWAIPKITCMNPSAYQRTYSMKYFKNSSSAKDNSINTSKHDHRWSRRWQESRR

SEQ ID NO: 45939 - protein, 2399 aa, Homo sapiens [sequence omitted]

SEQ ID NO: 45940 - protein, 139 aa, Homo sapiens
MFEHDFRWTDGSTLQYENWRPNQPDSFFSAGEDCVVIIWHENGQWNDVPCNYHLTYTCKKGTVACGQPPVVENAKTFGKMKPRYEINSLIRYHCKDGFIQRHLPTIRCLGNGRWAIPKITCMNRKWSFRKNGLPCYNNY

SEQ ID NO: 45941 - protein, 257 aa, Homo sapiens [sequence omitted]

SEQ ID NO: 45942 - protein, 331 aa, Homo sapiens
MGRNCQYKCSGPLGIEGGIISNQQITASSTHRALFGLQKWYPYYARLNKKGLINAWTAAENDRWPWIQINLQRKMRVTGVITQGAKRIGSPEYIKSYKIAYSNDGKTWAMYKVKGTNEDMVFRGNIDNNTPYANSFTPPIKAQYVRLYPQVCRRHCTLRMELLGCELSGCSEPLGMKSGHIQDYQITASSIFRTLNMDMFTWEPRKARLDKQGKVNAWTSGHNDQSQWLQVDLLVPTKVTGIITQGAKDFGHVQFVGSYKLAYSNDGEHWTVYQDEKQRKDKVFQGNFDNDTHRKNVIDPPIYARHIRILPWSWYGRITLRSELLGCTEEE

SEQ ID NO: 45943 - protein, 824 aa, Homo sapiens
MNVVNHFRIIAMCGDYYIGGRRFSSLSDLIGYYSHVSCLLKGEKLLYPVAPPEPVEDRRRVRAILPYTKVPDTDEISFLKGDMFIVHNELEDGWMWVTNLRTDEQGLIVEDLVEEVGREEDPHEGKIWFHGKISKQEAYNLLMTVGQVCSFLVRPSDNTPGDYSLYFRTNENIQRFKICPTPNNQFMMGGRYYNSIGDIIDHYRKEQIVEGYYLKEPVPMQDQEQVLNDTVDGKEIYNTIRRKTKDAFYKNIVKKGYLLKKGKGKRWKNLYFILEGSDAQLIYFESEKRATKPKGLIDLSVCSVYVVHDSLFGRPNCFQIVVQHFSEEHYIFYFAGETPEQAEDWMKGLQAFCNLRKSSPGTSNKRLRQVSSLVLHIEEAHKLPVKHFTNPYCNIYLNSVQVAKTHAREGQNPVWSEEFVFDDLPPDINRFEITLSNKTKKSKDPDILFMRCQLSRLQKGHATDEWFLLSSHIPLKGIEPGSLRVRARYSMEKIMPEEEYSEFKELILQKELHVVYALSHVCGQDRTLLASILLRIFLHEKLESLLLCTLNDREISMEDEATTLFRATTLASTLMEQYMKATATQFVHHALKDSILKIMESKQSCELSPSKLEKNEDVNTNLTHLLNILSELVEKIFMASEILPPTLRYIYGCLQKSVQHKWPTNTTMRTRVVSGFVFLRLICPAILNPRMFNIISDSPSPIAARTLILVAKSVQNLANLVEFGAKEPYMEGVNPFIKSNKHRMIMFLDELGNVPELPDTTEHSRTDLSRDLAALHEICVAHSDELRTLSNERGAQQHVLKKLLAITELLQQKQNQYTKTNDVR

SEQ ID NO: 45944 - protein, 270 aa, Homo sapiens
MTLCKYYEKRLLEFCSVFKPAMPRSVVGTACMYFKRFYLNNSVMEYHPRIIMLTCAFLACKVDEFNVSSPQFVGNLRESPLGQEKALEQILEYELLLIQQLNFHLIVHNPYRPFEGFLIDLKTRYPILENPEILRKTADDFLNRIALTDAYLLYTPSQIALTAILSSASRAGITMESYLSESLMLKENRTCLSQLLDIMKSMRNLVKKYEPPRSEEVAVLKQKLERCHSAELALNVITKKRKGYEDDDYVSKKSKHEEEEWTDDDLVESL

SEQ ID NO: 45945 - protein, 76 aa, Homo sapiens
MCSKTPSGCLKLRIVLDPVYTVFFLSLLRTFMFSLKGRTLQLLFRISKLPASPLLHSKPLLSKVKNTNTVILLHLI

SEQ ID NO: 45946 - protein, 472 aa, Homo sapiens
MDERNRQVTFTKRKFGLMKKAYELSVLCDCEIALIIFNSTNKLFQYASTDMDKVLLKYTEYNEPHESRTNSDIVETLRKKGLNGCDSPDPDADDSALNKKENKGCESPDPDSSYALTPRTEEKYKKINEEFDNMIKSHKIPAVPPPNFEMPVSIPVSSHNSLVYSNPVSSLGNPNLLPLAHPSLQRNSMSPGVTHRPPSAGNTGGLMGGDLTSGAGTSAGNGYGNPRNSPGLLVSPGNLNKNMQAKSPPPMNLGMNNRKPDLRVLIPPGSKNTMPSVNQRINNSQSAQSLATPVVSVATPTLPGQGMGGYPSAISTTYGTEYSLSSADLSSLSGFNTASALHLGSVTGWQQQHLHNMPPSALSQLGACTSTHLSQSSNLSLPSTQSLNIKSEPVSPPRDRTTTPSRYPQHTRHEAGRSPVDSLSSCSSSYDGSDREDHRNEFHSPIGLTRPSPDERESPSVKRMRLSEGWAT

SEQ ID NO: 45947 - protein, 454 aa, Homo sapiens
MDERNRQVTFTKRKFGLMKKAYELSVLCDCEIALIIFNSTNKLFQYASTDMDKVLLKYTEYNEPHESRTNSDIVETLRKKGLNGCDSPDPDADDSVGHSPESEDKYRKINEDIDLMISRQRLCAVPPPNFEMPVSIPVSSHNSLVYSNPVSSLGNPNLLPLAHPSLQRNSMSPGVTHRPPSAGNTGGLMGGDLTSGAGTSAGNGYGNPRNSPGLLVSPGNLNKNMQAKSPPPMNLGMNNRKPDLRVLIPPGSKNTMPSVNQRINNSQSAQSLATPVVSVATPTLPGQGMGGYPSAISTTYGTEYSLSSADLSSLSGFNTASALHLGSVTGWQQQHLHNMPPSALSQLGACTSTHLSQSSNLSLPSTQSLNIKSEPVSPPRDRTTTPSRYPQHTRHEAGRSPVDSLSSCSSSYDGSDREDHRNEFHSPIGLTRPSPDERESPSVKRMRLSEGWAT

SEQ ID NO: 45948 - protein, 421 aa, Homo sapiens
MVVSSWRDPQDDVAGGNPGGPNPAAQAARGGGGGAGEQQQQAGSGAPHTPQTPGQPGAPATPGTAGDKGQGPPGSGQSQQHIECVVCGDKSSGKHYGQFTCEGCKSFFKRSVRRNLTYTCRANRNCPIDQHHRNQCQYCRLKKCLKVGMRREAVQRGRMPPTQPNPGQYALTNGDPLNGHCYLSGYISLLLRAEPYPTSRYGSQCMQPNNIMGIENICELAARLLFSAVEWARNIPFFPDLQITDQVSLLRLTWSELFVLNAAQCSMPLHVAPLLAAAGLHASPMSADRVVAFMDHIRIFQEQVEKLKALHVDSAEYSCLKAIVLFTSDACGLSDAAHIESLQEKSQCALEEYVRSQYPNQPSRFGKLLLRLPSLRTVSSSVIEQLFFVRLVGKTPIETLIRDMLLSGSSFNWPYMSIQCS

SEQ ID NO: 45949 - protein, 278 aa, Homo sapiens [sequence omitted]

SEQ ID NO: 45950 - protein, 287 aa, Homo sapiens
MKIITKYVYELLEKDCNLKKVSIPVDATESEPKSFIFMSEDALTNPQKLMVLIHGSGVVRAGQWARRLIINEDLDSGTQIPFIKRAVAEGYGVIVLNPNENYIEVEKPKIHVQSSSDSSDEPAEKRERKDKVSKETKKRRDFYEKYRNPQREKEMMQLYIRENGSPEEHAIYVWDHFIAQAAAENVFFVAHSYGGLAFVELMIQREADVKNKVTAVALTDSVHNVWHQEAGKTIREWMRENCCNWVSSSEPLDTSVESMLPDCPRVSAGFSCCQMQSHEDLLLCFLL

SEQ ID NO: 45951 - protein, 1163 aa, Homo sapiens
MTLDLLWDLSCHSSVSFPSTLSGTSFHFLSRTSLHSVEDNSSMDVKSMWDDIRLHLRRFLVSKLQSHNEINNSQQKILLKKQCLQQLLFLYPESEVIIKYQNIQNKLLANLLWNCFPSYNRDSNLDVIAHGYQSTMLKLYSVIKEDFNTLCEILAPSSMVKFIKETYLDTVTEEMAKFLENFCELQFRENAVRVVKTSKSSSKHRGAVHALVTTECPQKGRNFSLPLDKVEFLSQLIKSFMKLEKGVQELFDEILLSLKITRDTSGILEKSDREVVMEKPRANETNIPSEQSLPGKEATLLDFGWRSAFKEVSLPMAHCVVTAIEGFSTKILQQEQNERSSAVSYAMNLVNVQQVWQDSHMFPEEEQPKKIGKFCSDIMEKLDTMLPLALACRDDSFQEIRANLVEACCKVATAVLQRLQERAKEVPSKAPLKNLHTYLSTAVYVFQHFKRYDNLMKEMTKKPIFLVLVQRYQEFINTLQFQVTNYCVRVCATSILQDAESHHWDDYKAFYEGERCSFSIQMWHYFCWSLHYDLWTILPPKLAQEILVEVLEKSLSLLASRYARAHPSRKRTPQLRLDVTTILICTENMLWSVCTSVQKLLNPHQHTDDKIFKIHTHCNNLFTTLVILTSPLTELYKTFQHGLDESASDSLKSFFKQPLYWVSCISHFYPSLLRTPSAGGLKAEGQLKLLLSQPRCNWNLLLETLLHHDGLLLRILLKSSKQVSDTENNLNQGPSLMEAIFKILYHCSFSPQTFANVFVSYMEEEQLWDFLYNIPVSTCVEYELEVIRCLRLALTDAIKDTVQQIVSVMSSRRNCETNLNKHIVPDCLLESMPKEWNYSPKETNRKESCKSFTRLTAQAVSIVISKLPTVIACLPPPVKYFFFLSERKMSKKFVELKKAGLLVWNLIVIICRIFEDGNTVELLTGASLDRWSKEKLGLICMCLKSIMGDQTSIHNQMIQKVIQSIEQQKPNWIERQLLKARKLSTECAFMTIEKSTALQEGDVALELTEQKINTMVLDLCHKPGGREYLRQIYHIMQLNEEYLKEQLFSMNSSEEKPLPIRPLKTTLRSIEDQPSAFNPFHVYKAFSENMLDQSAITKWNWNWAKLLPNYLRLDKMTFSVLLKNRWEMKKDETLEEEEKAILEHLKQICTPQNSSASDNIEEQ

SEQ ID NO: 45952 - protein, 605 aa, Homo sapiens
MRKSWKRSSKELSENEVVGSYFSVKSLFWRTCGRPALPVLGFCRAELQNPYCKNVQFQTQSLRLSDLHRKSHLWRGIVSITLIEGRDLKAMDSNGLSDPYVKFRLGHQKYKSKIMPKTLNPQWREQFDFHLYEERGGVIDITAWDKDAGKRDDFIGRCQVDLSALSREQTHKLELQLEEGEGHLVLLVTLTASATVSISDLSVNSLEDQKEREEILKRYSPLRIFHNLKDVGFLQVKVIRAEGLMAADVTGKSDPFCVVELNNDRLLTHTVYKNLNPEWNKVFTFNIKDIHSVLEVTVYDEDRDRSADFLGKVAIPLLSIQNGEQKAYVLKNKQLTGPTKGVIYLEIDVIFNAVKASLRTLIPKEQKYIEEENRLSKQLLLRNFIRMKRCVMVLVNAAYYVNSCFDWDSPPRSLAAFVLFLFVVWNFELYMIPLVLLLLLTWNYFLIISGKDNRQRDTVVEDMLEDEEEEDDKDDKDSEKKGFINKIYAIQEVCVSVQNILDEVASFGERIKNTFNWTVPFLSWLAIVALCVFTAILYCIPLRYIVLVWGINKFTKKLRSPYAIDNNELLDFLSRVPSDVQVVQYQELKPDPSHSPYKRKKNNLG

SEQ ID NO: 45953 - protein, 1336 aa, Homo sapiens [sequence omitted]

SEQ ID NO: 45954 - protein, 27 aa, Homo sapiens
MDGCHGEAWLPNTEIWETGLYFRTSLH

SEQ ID NO: 45955 - protein, 421 aa, Homo sapiens
MERHGYRTQKFGKLDYTSGHHSISNRVEAWTRDVAFLLRQEGRPMVNLIRNRTKVRVMERDWQNTDKAVNWLRKEAINYTEPFVIYLGLNLPHPYPSPSSGENFGSSTFHTSLYWLEKVSHDAIKIPKWSPLSEMHPVDYYSSYTKNCTGRFTKKEIKNIRAFYYAMCAETDAMLGEIILALHQLDLLQKTIVIYSSDHGELAMEHRQFYKMSMYEASAHVPLLMMGPGIKAGLQVSNVVSLVDIYPTMLDIAGIPLPQNLSGYSLLPLSSETFKNEHKVKNLHPPWILSEFHGCNVNASTYMLRTNHWKYIAYSDGASILPQLFDLSSDPDELTNVAVKFPEITYSLDQKLHSIINYPKVSASVHQYNKEQFIKWKQSIGQNYSNVIANLRWHQDWQKEPRKYENAIDQWLKTHMNPRAV

SEQ ID NO: 45956 - protein, 503 aa, Homo sapiens [sequence omitted]

SEQ ID NO: 45957 - protein, 1463 aa, Homo sapiens
MKTDSDDLLEVCGEDVPQPEEEEFETIERFMDCRIGRKGATGATTTIYAVEADGDPNAGFEKNKEPGEIQYLIKWKGWSHIHNTWETEETLKQQNVRGMKKLDNYKKKDQETKRWLKNASPEDVEYYNCQQELTDDLHKQYQIVERIIAHSNQKSAAGYPDYYCKWQGLPYSECSWEDGALISKKFQACIDEYFSRNQSKTTPFKDCKVLKQRPRFVALKKQPSYIGGHEGLELRDYQLNGLNWLAHSWCKGNSCILADEMGLGKTIQTISFLNYLFHEHQLYGPFLLVVPLSTLTSWQREIQTWASQMNAVVYLGDINSRNMIRTHEWTHHQTKRLKFNILLTTYEILLKDKAFLGGLNWAFIGVDEAHRLKNDDSLLYKTLIDFKSNHRLLITGTPLQNSLKELWSLLHFIMPEKFSSWEDFEEEHGKGREYGYASLHKELEPFLLRRVKKDVEKSLPAKVEQILRMEMSALQKQYYKWILTRNYKALSKGSKGSTSGFLNIMMELKKCCNHCYLIKPPDNNEFYNKQEALQHLIRSSGKLILLDKLLIRLRERGNRVLIFSQMVRMLDILAEYLKYRQFPFQRLDGSIKGELRKQALDHFNAEGSEDFCFLLSTRAGGLGINLASADTVVIFDSDWNPQNDLQAQARAHRIGQKKQVNIYRLVTKGSVEEDILERAKKKMVLDHLVIQRMDTTGKTVLHTGSAPSSSTPFNKEELSAILKFGAEELFKEPEGEEQEPQEMDIDEILKRAETHENEPGPLTVGDELLSQFKVANFSNMDEDDIELEPERNSKNWEEIIPEDQRRRLEEEERQKELEEIYMLPRMRNCAKQISFNGSEGRRSRSRRYSGSDSDSISEGKRPKKRGRPRTIPRENIKGFSDAEIRRFIKSYKKFGGPLERLDAIARDAELVDKSETDLRRLGELVHNGCIKALKDSSSGTERTGGRLGKVKGPTFRISGVQVNAKLVISHEEELIPLHKSIPSDPEERKQYTIPCHTKAAHFDIDWGKEDDSNLLIGIYEYGYGSWEMIKMDPDLSLTHKILPDDPDKKPQAKQLQTRADYLIKLLSRDLAKKEALSGAGSSKRRKARAKKNKAMKSIKVKEEIKSDSSPLPSEKSDEDDDKLSESKSDGRERSKKSSVSDAPVHITASGEPVPISEESEELDQKTFSICKERMRPVKAALKQLDRPEKGLSEREQLEHTRQCLIKIGDHITECLKEYTNPEQIKQWRKNLWIFVSKFTEFDARKLHKLYKHAIKKRQESQQNSDQNSNLNPHVIRNPDVERLKENTNHDDSSRDSYSSDRHLTQYHDHHKDRHQGDSYKKSDSRKRPYSSFSNGKDHRDWDHYKQDSRYYSDREKHRKLDDHRSRDHRSNLEGSLKDRSHSDHRSHSDHRLHSDHRSSSEYTHHKSSRDYRYHSDWQMDHRASSSGPRSPLDQRSPYGSRSPFEHSVEHKSTPEHTWSSRKT

SEQ ID NO: 45958 - protein, 213 aa, Homo sapiens
MNFSNGEIIDIFKPVRKHFDMPHDIVASEDGTVYIGDAHTNTVWKFTLTEKLEHRSVKKAGIEVQEIKAEAVVETKMENKPTSSELQKMQEKQKLIKEPGSGVPVVLITTLLVIPVVVLLAIAIFIRWKKSRAFGADSEHKLETSSGRVLGRFRGKGSGGLNLGNFFASRKGYSRKGFDRLSTEGSDQEKEDDGSESEEEYSAPLPALAPSSS

SEQ ID NO: 45959 - protein, 271 aa, Homo sapiens [sequence omitted]

SEQ ID NO: 45960 - protein, 148 aa, Homo sapiens
MVNFDGYSACDHTSKGFKRWECNRPHSPNGPLKFSEKFQLFTPFSLGFEFRPGREYFYISSAIPDNGRRSCLKLKVFVRPTNSCMKTIGVHDRVFDVNDKVENSLEPADDTVHESAEPSRGENAAQTPRIPSRLLAILLFLLAMLLTL

SEQ ID NO: 45961 - protein, 121 aa, Homo sapiens
MVNFDGYSACDHTSKGFKRWECNRPHSPNGPLKFSEKFQLFTPFSLGFEFRPGREYFYISSAIPDNGRRSCLKLKVFVRPTNDTVHESAEPSRGENAAQTPRIPSRLLAILLFLLAMLLTL

SEQ ID NO: 45962 - protein, 78 aa, Homo sapiens
MYSREWNRDVQYRGRVRVQLKQEDGSLCLVQFPSRKSVMLYAAEMIPKLKTRTQKTGGADQSLQQGEGSKKGKGKKKK

SEQ ID NO: 45963 - protein, 951 aa, Homo sapiens
MEESVAEIMNQLGADENGKISFQDFTRCRMQLVREIRKEEVDLSAKSDNSCTKKLRDRIASWPTSSDNSLGALSAARESWEYDSGARDLQSPDVQSQSALQKLLEYGGSSLHQQAALHKLLTQSPHIGNSVGGSYLELANTLHSAALASLKGDIVELNKRLQQTERERDLLEKKLAKAQCEQSHLMREHEDVQERTTLRYEERITELHSVIAELNKKIDRLQGTTIREEDEYSELRSELSQSQHEVNEDSRSMDQDQTSVSIPENQSTMVTADMDNCSDLNSELQRVLTGLENVVCGRKKSSCSLSVAEVDKHIEQLTTASEHCDLAIKTVEEIEGVLGRDLYPNLAEERSRWEKELAGLREENESLTAMLCSKEEELNRTKATMNAIREERDRLRRRVRELQTRLQSVQATGPSSPGRLTSTNRPINPSTGELSTSSSSNDIPIAKIAERVKLSKTRSESSSSDRPVLGSEISSIGVSSSVAEHLAHSLQDCSNIQEIFQTLYSHGSAISESKIREFEVETERLNSRIEHLKSQNDLLTITLEECKSNAERMSMLVGKYESNATALRLALQYSEQCIEAYELLLALAESEQSLILGQFRAAGVGSSPGDQSGDENITQMLKRAHDCRKTAENAAKALLMKLDGSCGGAFAVAGCSVQPWESLSSNSHTSTTSSTASSCDTEFTKEDEQRLKDYIQQLKNDRAAVKLTMLELESIHIDPLSYDVKPRGDSQRLDLENAVLMQELMAMKEEMAELKAQLYLLEKEKKALELKLSTREAQEQAYLVHIEHLKSEVEEQKEQRMRSLSSTSSGSKDKPGKECADAASPALSLAELRTTCSENELAAEFTNAIRREKKLKARVQELVSALERLTKSSEIRHQQSAEFVNDLKRANSNLVAAYEKAKKKHQNKLKKLESQMMAMVERHETQVRMLKQRIALLEEENSRPHTNETSL

SEQ ID NO: 45964 - protein, 571 aa, Homo sapiens [sequence omitted]

SEQ ID NO: 45965 - protein, 258 aa, Homo sapiens
MESACVSIHEALKSVIDYQTHFRLREAQGRSRAEDLNTRVAYWHSVDTSPGYHESDSKKSEDLSLCNVAEHSNTTEGPTGKQEGAQSVEEMFEEEAEEEVFLKFVILHAEDDTDEALRVQNLLQDDFGIKPGIIFAEMPCGRQHLQNLDDAVNGSAWTILLLTENFLRDTWCNFQFYTSLMNSVNRQHKYNSVIPMRPLNNPLPRERTPFALQTINALEEESRGFPTQVERIFQESVYKTQQTIWKETRNMVQRQFIA

SEQ ID NO: 45966 - protein, 78 aa, Homo sapiens
MESACVSIHEALKSVIDYQTHFRLREAQGRSRAEDLNTRVAYWSVGEALILLVVSIGQVFLLKSFFSDKRTTTTRVGS

SEQ ID NO: 45967 - protein, 164 aa, Homo sapiens [sequence omitted]

SEQ ID NO: 45968 - protein, 61 aa, Homo sapiens
MAEEPQSVLQLPTSIAAGGEGLTDVSPETTTPEPPSSAAVSPGTEEPAGDTKKKIGCEFTP

SEQ ID NO: 45969 - protein, 66 aa, Homo sapiens
MESDPLSHTAKVHNILAEMVMGGMVLETNMNEIVTQIDAQNKLEKSEVRMENAVVKKVLSMMTDYA

SEQ ID NO: 45970 - protein, 71 aa, Homo sapiens
MVMGGMVLETNMNEIVTQIDAQNKLEKSEAGLAGAPARAVSAVKNMNLPEIPRNINIGDISIKVPNLPSFK

SEQ ID NO: 45971 - protein, 27 aa, Homo sapiens
MARNNLSNSTFEFFWRGSPVRAYSLAL

SEQ ID NO: 45972 - protein, 47 aa, Homo sapiens
MVGHLKIISQVIPPKRVCLQVLQFFATKLYWNLQTLLSNPNTIWHCL

SEQ ID NO: 45973 - protein, 52 aa, Homo sapiens
MAAPLCGRPAERGAQPLAAAQGAPKMWGDRGGSGRSSARDGGTQQPPLARLS

SEQ ID NO: 45974 - protein, 1237 aa, Homo sapiens
MGNSMLVKKEEEEEESHRRIKKLKTEKVDPLFTVPAPPPPISSSLTPQILPSYFSPSSSNIAAPVEQLLVRTRSVGVNTCEVGVVTEPECLGPCEPGTSVNLEGIVWHETEEGVLVVNVTWRNKTYVGTLLDCTKHDWAPPRFCESPTSDLEMRGGRGRGKRARSAAAAPGSEASFTESRGLQNKNRGGANGKGRRGSLNASGRRTPPNCAAEDIKASPSSTNKRKNKPPMELDLNSSSEDNKPGKRVRTNSRSTPTTPQGKPETTFLDQGCSSPVLIDCPHPNCNKKYKHINGLRYHQAHAHLDPENKLEFEPDSEDKISDCEEGLSNVALECSEPSTSVSAYDQLKAPASPGAGNPPGTPKGKRELMSNGPGSIIGAKAGKNSGKKKGLNNELNNLPVISNMTAALDSCSAADGSLAAEMPKLEAEGLIDKKNLGDKEKGKKATNCKTDKNLSKLKSARPIAPAPAPTPPQLIAIPTATFTTTTTGTIPGLPSLTTTVVQATPKSPPLKPIQPKPTIMGEPITVNPALVSLKDKKKKEKRKLKDKEGKETGSPKMDAKLGKLEDSKGASKDLPGHFLKDHLNKNEGLANGLSESQESRMASIKAEADKVYTFTDNAPSPSIGSASRLECSTLVNGQAPMAPLHVLTQNGAESSAAKTSSPAYSDISDAADDGGSDSRSEGMRSKASSPSDIISSKDSVVKGHSSTTAQSSQLKESHSPYYHSYDPYYSPSYMHPGQVGAPAAGNSGSTQGMKIKKESEEDAEKKDKAEQLDSKKVDHNSASLQPQHQSVITQRHPALAQSLYYGQYAYGLYMDQKSLMATSPAYRQQYEKYYEDQRLAEQKMAQTGRGDCERKSELPLKELGKEETKQKNMPSATISKAPSTPEPNKNHSKLGPSVPNKTEETGKSQLLSNHQQQLQADSFKAKQMENHQLIKEAVEMKSVMDSMKQTGVDPTSRFKQDPDSRTWHHYVYQPKYLDQQKSEELDREKKLKEDSPRKTPNKESGVPSLPVSLTSIKEEPKEAKHPDSQSMEESKLKNDDRKTPVNWKDSRGTRVAVSSPMSQHQSYIQYLHAYPYPQMYDPSHPAYRAVSPVLMHSYPGAYLSPGFHYPVYGKMSGREETEKVNTSPSVNTKTTTESKALDLLQQHANQYRSKSPAPVEKATAEREREAERERDRHSPFGQRHLHTHHHTHVGMGYPLIPGQYDPFQGLTSAALVASQQVAAQASASGMFPGQRRE

SEQ ID NO: 45975 - protein, 377 aa, Homo sapiens [sequence omitted]

SEQ ID NO: 45976 - protein, 375 aa, Homo sapiens [sequence omitted]

SEQ ID NO: 45977 - protein, 576 aa, Homo sapiens
MGSRAGGPTTPLSPTRLSRLQEKEELRELNDRLAVYIDKVRSLETENSALQLQVTEREEVRGRELTGLKALYETELADARRALDDTARERAKLQIELGKCKAEHDQLLLNYAKKESDLNGAQIKLREYEAALNSKDAALATALGDKKSLEGDLEDLKDQIAQLEASLAAAKKQLADETLLKVDLENRCQSLTEDLEFRKSMYEEEINETRRKHETRLVEVDSGRQIEYEYKLAQALHEMREQHDAQVRLYKEELEQTYHAKLENARLSSEMNTSTVNSAREELMESRMRIESLSSQLSNLQKESRACLERIQELEDLLAKEKDNSRRMLTDKEREMAEIRDQMQQQLNDYEQLLDVKLALDMEISAYRKLLEGEEERLKLSPSPSSRVTVSRASSSRSVRTTRGKRKRVDVEESEASSSVSISHSASATGNVCIEEIDVDGKFIRLKNTSEQDQPMGGWEMIRKIGDTSVSYKYTSRYVLKAGQTVTIWAANAGVTASPPTDLIWKNQNSWGTGEDVKVILKNSQGEEVAQRSTVFKTTIPEEEEEEEEAAGVVVEEELFHQQGTPRASNRSCAIM

SEQ ID NO: 45978 - protein, 212 aa, Homo sapiens
MQVSAKDGQLLSTVVRTLATQSPFNDRPMCRICHEGSSQEDLLSPCECTGTLGTIHRSCLEHWLSSSNTSYCELCHFRFAVERKPRPLVEWLRNPGPQHEKRTLFGDMVCFLFITPLATISGWLCLRGAVDHLHFSSRLEAVGLIALTVALFTIYLFWTLVSFRYHCRLYNEWRRTNQRVILLIPKSVNVPSNQPSLLGLHSVKRNSKETVV

SEQ ID NO: 45979 - protein, 873 aa, Homo sapiens
MSVALGLVLGFTAASWLIAPRVAELSERKRRGSSLCSYYGRSAAGPRAGAQQPLPQPQSRPRQEQSPPPARQDLQGPPLPEAAPGITSFRSSPWQQPPPLQQRRRGREPEGATGLPGAPAAEGEPEEEDGGAAGQRRDGRPGSSHNGSGDGGAAAPSARPRDFLYVGVMTAQKYLGSRALAAQRTWARFIPGRVEFFSSQQPPNAGQPPPPLPVIALPGVDDSYPPQKKSFMMIKYMHDHYLDKYEWFMRADDDVYIKGDKLEEFLRSLNSSKPLYLGQTGLGNIEELGKLGLEPGENFCMGGPGMIFSREVLRRMVPHIGECLREMYTTHEDVEVGRCVRRFGGTQCVWSYEMQQLFHENYEHNRKGYIQDLHNSKIHAAITLHPNKRPAYQYRLHNYMLSRKISELRYRTIQLHRESALMSKLSNTEVSKEDQQLGVIPSFNHFQPRERNEVIEWEFLTGKLLYSAAENQPPRQSLSSILRTALDDTVLQVMEMINENAKSRGRLIDFKEIQYGYRRVNPMHGVEYILDLLLLYKRHKGRKLTVPVRRHAYLQQLFSKPFFRETEELDVNSLVESINSETQSFSFISNSLKILSSFQGAKEMGGHNEKKVHILVPLIGRYDIFLRFMENFENMCLIPKQNVKLVIILFSRDSGQDSSKHIELIKGYQNKYPKAEMTLIPMKGEFSRGLGLEMASAQFDNDTLLLFCDVDLIFREDFLQRCRDNTIQGQQVYYPIIFSQYDPKVTNGGNPPTDDYFIFSKKTGFWRDYGYGITCIYKSDLLGAGGFDTSIQGWGLEDVDLYNKVILSGLRPFRSQEVGVVHIFHPVHCDPNLDPKQYKMCLGSKASTFASTMQLAELWLEKHLGVRYNRTLS

SEQ ID NO: 45980 - protein, 17 aa, Homo sapiens
MALSERYVTLNTKTQYI

SEQ ID NO: 45981 - protein, 672 aa, Homo sapiens
MCYKQAVSVDEMRGTITVHKTDSSNEPPKTFTFDTVFGPESKQLDVYNLTARPIIDSVLEGYNGTIFAYGQTGTGKTFTMEGVRAIPELRGIIPNSFAHIFGHIAKAEGDTRFLVRVSYLEIYNEEVRDLLGKDQTQRLEVKERPDVGVYIKDLSAYVVNNADDMDRIMTLGHKNRSVGATNMNEHSSRSHAIFTITIECSEKGIDGNMHVRMGKLHLVDLAGSERQAKTGATGQRLKEATKINLSLSTLGNVISALVDGKSTHVPYRNSKLTRLLQDSLGGNSKTMMCANIGPADYNYDETISTLRYANRAKNIKNKARINEDPKDALLRQFQKEIEELKKKLEEGEEISGSDISGSEEDDDEEGEVGEDGEKRKKRRDQAGKKKVSPDKMIEMQAKIDEERKALETKLDMEEEERNKARAELEKREKDLLKAQQEHQSLLEKLSALEKKVIVGGVDLLAKAEEQEKLLEESNMELEERRKRAEQLRRELEEKEQERLDIEEKYTSLQEEAQGKTKKLKKVWTMLMAAKSEMADLQQEHQREIEGLLENIRQLSRELRLQMLIIDNFIPRDYQEMIENYVHWNEDIGEWQLKCVAYTGNNMRKQTPVPDKKEKDPFEVDLSHVYLAYTEESLRQSLMKLERPRTSKGKARPKTGRRKRSAKPETVIDSLLQ

SEQ ID NO: 45982 - protein, 669 aa, Homo sapiens
MCYKQAVSVDEMRGTITVHKTDSSNEPPKTFTFDTVFGPESKQLDVYNLTARPIIDSVLEGYNGTIFAYGQTGTGKTFTMEGVRAIPELRGIIPNSFAHIFGHIAKAEGDTRFLVRVSYLEIYNEEVRDLLGKDQTQRLEVKERPDVGVYIKDLSAYVVNNADDMDRIMTLGHKNRSVGATNMNEHSSRSHAIFTITIECSEKGIDGNMHVRMGKLHLVDLAGSERQAKTGATGQRLKEATKINLSLSTLGNVISALVDGKSTHVPYRNSKLTRLLQDSLGGNSKTMMCANIGPADYNYDETISTLRYANRAKNIKNKARINEDPKDALLRQFQKEIEELKKKLEEGEEISGSDISGSEEDDDEEGEVGEDGEKRKKRRGKKKVSPDKMIEMQAKIDEERKALETKLDMEEEERNKARAELEKREKDLLKAQQEHQSLLEKLSALEKKVIVGGVDLLAKAEEQEKLLEESNMELEERRKRAEQLRRELEEKEQERLDIEEKYTSLQEEAQGKTKKLKKVWTMLMAAKSEMADLQQEHQREIEGLLENIRQLSRELRLQMLIIDNFIPRDYQEMIENYVHWNEDIGEWQLKCVAYTGNNMRKQTPVPDKKEKDPFEVDLSHVYLAYTEESLRQSLMKLERPRTSKGKARPKTGRRKRSAKPETVIDSLLQ

SEQ ID NO: 45983 - protein, 143 aa, Homo sapiens
MRDFKRLQEDPPVGVSGAPSENNIMQWNAVIFGPEGTPFEDGTFKLVIEFSEEYPNKPPTVRFLSKMFHPNVYADGSICLDILQNRWSPTYDVSSILTSIQSLLDEPNPNSPANSQAAQLYQENKREYEKRVSAIVEQSWNDS

SEQ ID NO: 45984 - protein, 731 aa, Homo sapiens [sequence omitted]

SEQ ID NO: 45985 - protein, 259 aa, Homo sapiens [sequence omitted]

SEQ ID NO: 45986 - protein, 872 aa, Homo sapiens
MRKRKERVEKWREEQRKKAMENIGELKKEIEEMKQGKKWSLEDDDDDEDDPAEAEKEGNEMEGEELDPLDAYMEEVKEEVKKFNMRSVKGGGGNEKKSGPTVTKVVTVVTTKKAVVDSDKKKGELMENDQDAMEYSSEEEEVDLQTALTGYQTKQRKLLEPVDHGKIEYEPFRKNFYVEVPELAKMSQEEVNVFRLEMEGITVKGKGCPKPIKSWVQCGISMKILNSLKKHGYEKPTPIQTQAIPAIMSGRDLIGIAKTGSGKTIAFLLPMFRHIMDQRSLEEGEGPIAVIMTPTRELALQITKECKKFSKTLGLRVVCVYGGTGISEQIAELKRGAEIIVCTPGRMIDMLAANSGRVTNLRRVTYVVLDEADRMFDMGFEPQVMRIVDNVRPDRQTVMFSATFPRAMEALARRILSKPIEVQVGGRSVVCSDVEQQVIVIEEEKKFLKLLELLGHYQESGSVIIFVDKQEHADGLLKDLMRASYPCMSLHGGIDQYDRDSIINDFKNGTCKLLVATSVAARGLDVKHLILVVNYSCPNHYEDYVHRAGRTGRAGNKGYAYTFITEDQARYAGDIIKALELSGTAVPPDLEKLWSDFKDQQKAEGKIIKKSSGFSGKGFKFDETEQALANERKKLQKAALGLQDSDDEDAAVDIDEQIESMFNSKKRVKDMAAPGTSSVPAPTAGNAEKLEIAKRLALRINAQKNLGIESQDVMQQATNAILRGGTILAPTVSAKTIAEQLAEKINAKLNYVPLEKQEEERQDGGQNESFKRYEEELEINDFPQTARWKVTSKEALQRISEYSEAAITIRGTYFPPGKEPKEGERKIYLAIESANELAVQKAKAEITRLIKEELIRLQNSYQPTNKGRYKVL

SEQ ID NO: 45987 - protein, 873 aa, Homo sapiens
MRKRKERVEKWREEQRKKAMENIGELKKEIEEMKQGKKWSLEDDDDDEDDPAEAEKEGNEMEGEELDPLDAYMEEVKEEVKKFNMRSVKGGGGNEKKSGPTVTKVVTVVTTKKAVVDSDKKKGELMENDQDAMEYSSEEEEVDLQTALTGYQTKQRKLLEPVDHGKIEYEPFRKNFYVEVPELAKMSQEEVNVFRLEMEGITVKGKGCPKPIKSWVQCGISMKILNSLKKHGYEKPTPIQTQAIPAIMSGRDLIGIAKTGSGKTIAFLLPMFRHIMDQRSLEEGEGPIAVIMTPTRELALQITKECKKFSKTLGLRVVCVYGGTGISEQIAELKRGAEIIVCTPGRMIDMLAANSGRVTNLRRVTYVVLDEADRMFDMGFEPQVMRIVDNVRPDRQTVMFSATFPRAMEALARRILSKPIEVQVGGRSVVCSDVEQQVIVIEEEKKFLKLLELLGHYQESGSVIIFVDKQEHADGLLKDLMRASYPCMSLHGGIDQYDRDSIINDFKNGTCKLLVATSVAARGLDVKHLILVVNYSCPNHYEDYVHRAGRTGRAGNKGYAYTFITEDQARYAGDIIKALELSGTAVPPDLEKLWSDFKDQQKAEGKIIKKSSGFSGKGFKFDETEQALANERKKLQKAALGLQDSDDEDAAVDIDEQIESMFNSKKRVKDMAAPGTSSVPAPTAGNAEKLEIAKRLALRINAQKNLGIESQVDVMQQATNAILRGGTILAPTVSAKTIAEQLAEKINAKLNYVPLEKQEEERQDGGQNESFKRYEEELEINDFPQTARWKVTSKEALQRISEYSEAAITIRGTYFPPGKEPKEGERKIYLAIESANELAVQKAKAEITRLIKEELIRLQNSYQPTNKGRYKVL

SEQ ID NO: 45988 - protein, 161 aa, Homo sapiens [sequence omitted]

SEQ ID NO: 45989 - protein, 725 aa, Homo sapiens
MKEQEIVSRIMAGLLENYYEFFENEEEDFSSNDLSSITEQVNELSEEEEEDEKLEHIEELPEEGAEKSNDMPEVVQLRMTENILESNSVTATSTHISPISILPASTDILERTIRAAVEQHLFDLQSSIDHDLKNLQQQSVVCNNEAESIHCDGEGSNNQIDIADDIINASESNRDCSKPVASTNLDNEAMQQDCVFENEENTQSVGILLEPCSDRGDSEDGCLEREEYLLFDSDKLSHLILDSSSKICDLNANTESEVPGGQSVGVQGEAACVSIPHLDLKNVSDGDKWEEPFPAFKSWQEDSESGEAQLSPQAGRMNHHPLEEDCPPVLSHRSLDFGQSQRFLHDPEKLDSSSKALSFTRIRRSSFSSKDEKREDRTPYQLVKKLQKKIRQFEEQFERERNSKPSYSDIAANPKVLKWMTELTKLRKQIKDAKHKNSDGEFVPQTRPRSNTLPKSFGSSLDHEDEENEDEPKVIQKEKKPSKEATLELILKRLKEKRIERCLPEDIKKMTKDHLVEEKASLQKSLLYYESQHGRPVTKEERHIVKPLYDRYRLVKQMLTRASITPVLGSPSTKRRGQMLQPIIEGETAHFFEEIKEEEEDGVNLSSELGDMLKTAVQVQSSLENSESDVEENQEKLALDLRLSSSRAASMPELLEQLWKARAEKKKLRKTLREFEEAFYQQNGRNAQKEDRVPVLEEYREYKKIKAKLRLLEVLISKQDSSKSI

SEQ ID NO: 45990 - protein, 719 aa, Homo sapiens
MKEQEIVSRIMAGLLENYYEFFENEEEDFSSNDLSSITEQVNELSEEEEEDEKLEHIEELPEEGAEKSNDMPEVVQLRMTENILESNSVTATSTHISPISILPASTDILERTIRAAVEQHLFDLQSSIDHDLKNLQQQSVVCNNEAESIHCDGEGSNNQIDIADDIINASESNRDCSKPVASTNLDNEAMQQDCVFENEENTQSVGILLEPCSDRGDSEDGCLEREEYLLFDSDKLSHLILDSSSKICDLNANTESEVPGGQSVGVQGEAACVSIPHLDLKNVSDGDKWEASCPITFPLIDFKTMHLQRDGEEPFPAFKSWQEDSESGEAQLSPQAGRMNHHPLEEDCPPVLSHRSLDFGQSQRFLHDPEKLDSSSKALSFTRIRRSSFSSKDEKREDRTPYQLVKKLQKKIRQFEEQFERERNSKPSYSDIAANPKVLKWMTELTKLRKQIKDAKHKNSDGEFVPQTRPRSNTLPKSFGSSLDHEDEENEDEPKVIQKEKKPSKEATLELILKRLKEKRIERCLPEDIKVTKEERHIVKPLYDRYRLVKQMLTRASITPVLGSPSTKRRGQMLQPIIEGETAHFFEEIKEEEEDGVNLSSELGDMLKTAVQVQSSLENSESDVEENQEKLALDLRLSSSRAASMPELLEQLWKARAEKKKLRKTLREFEEAFYQQNGRNAQKEDRVPVLEEYREYKKIKAKLRLLEVLISKQDSSKSI

SEQ ID NO: 45991 - protein, 208 aa, Homo sapiens [sequence omitted]

SEQ ID NO: 45992 - protein, 44 aa, Homo sapiens [sequence omitted]

SEQ ID NO: 45993 - protein, 31 aa, Homo sapiens
MDQIQDQFNDLVISDGSSLEDLVVKSYFSSF

SEQ ID NO: 45994 - protein, 227 aa, Homo sapiens
MMGGESADKATAAAAAASLLANGHDLAAAMAVDKSNPTSKHKSGAVASLLSKAERATELAAEGQLTLQQFAQSTEMLKRVVQEHLPLMSEAGAGLPDMEAVAGAEALNGQSDFPYLGAFPINPGLFIMTPAGVFLAESALHMAGLAEYPMQGELASAISSGKKKRKRCGMCAPCRRRINCEQCSSCRNRKTGHQICKFRKCEELKKKPSAALEKVMLPTGAAFRWFQ

SEQ ID NO: 45995 - protein, 1169 aa, Homo sapiens
MRYIATITDKELLKKCHQCVETIVKAKDQQAAEANKNASILLKELDLEKSREESRKQALAAKREKRKEKRKKKKEEQKRKQEEDEENKPKENSELPEDEDEEENDEDVEQEVPIEPPSATTTTTIGISATSATFTNVFGKKRANVVTTPSTNRKNKKNKTKETPPTAHLILPEQHMSLAQQKADKNKINGEPRGGGAGGNSDSDNLDSTDCNSESSSGGKSQELNFVMDVNSSKYPSLLLHSQEEKTSTATSKTQTRLEGEVTPNSLSTSYKTVSLPLSSPNIKLNLTSPKRGQKREEGWKEVVRRSKKLSVPASVVSRIMGRGGCNITAIQDVTGAHIDVDKQKDKNGERMITIRGGTESTRYAVQLINALIQDPAKELEDLIPKNHIRTPASTKSIHANFSSGVGTTAASSKNAFPLGAPTLVTSQATTLSTFQPANKLNKNVPTNVRSSFPVSLPLAYPHPHFALLAAQTMQQIRHPRLPMAQFGGTFSPSPNTWGPFPVRPVNPGNTNSSPKHNNTSRLPNQNGTVLPSESAGLATASCPITVSSVVAASQQLCVTNTRTPSSVRKQLFACVPKTSPPATVISSVTSTCSSLPSVSSAPITSGQAPTTFLPASTSQAQLSSQKMESFSAVPPTKEKVSTQDQPMANLCTPSSTANSCSSSASNTPGAPETHPSSSPTPTSSNTQEEAQPSSVSDLSPMSMPFASNSEPAPLTLTSPRMVAADNQDTSNLPQLAVPAPRVSHRMQPRGSFYSMVPNATIHQDPQSIFVTNPVTLTPPQGPPAAVQLSSAVNIMNGSQMHINPANKSLPPTFGPATLFNHFSSLFDSSQVPANQGWGDGPLSSRVATDASFTVQSAFLGNSVLGHLENMHPDNSKAPGFRPPSQRVSTSPVGLPSIDPSGSSPSSSSAPLASFSGIPGTRVFLQGPAPVGTPSFNRQHFSPHPWTSASNSCDSPIPSVSSGSSSPLSATSAPPTLGQPKGVSASQDRKIPPPIGTERLARIRQGGSVAQAPAGTSFVAPVGHSGIWSFGVNAVSEGLSGWSQSVMGNHPMHQQLSDPSTFSQHQPMERDDSGMVAPSNIFHQPMASGFVDFSKGLPISMYGGTIIPSHPQLADVPGGPLFNGLHNPDPAWNPMIKVIQNSTECTDAQQIWPGTWAPHIGNMHLKYVN

SEQ ID NO: 45996 - protein, 480 aa, Homo sapiens
MLAIILVNCDDDLWGDHSLEVEAGLPPGWRKIHDAAGTYYWHVPSGSTQWQRPTWELGDAEDPGTGTEGIWGLRPPKGRSFSSLESSLDRSNSLSWYGGESYIQSMEPGAKCFAVRSLGWVEVPEEDLAPGKSSIAVNNCIQQLAQTRSRSQPPDGAWGEGQNMLMILKKDAMSLVNPLDHSLIHCQPLVHIRVWGVGSSKGRDRDFAFVASDKDSCMLKCHVFCCDVPAKAIASALHGLCAQILSERVEVSGDASCCSPDPISPEDLPRQVELLDAVSQAAQKYEALYMGTLPVTKAMGMDVLNEAIGTLTARGDRNAWVPTMLSVSDSLMTAHPIQAEASTEEEPLWQCPVRLVTFIGVGRDPHTFGLIADLGRQSFQCAAFWCQPHAGGLSEAVQAACMVQYQKCLVASAARGKAWGAQARARLRLKRTSSMDSPGGPLPLPLLKGGVGGAGATPRKRGVFSFLDAFRLKPSLLHMP

SEQ ID NO: 45997 - protein, 212 aa, Homo sapiens
MLQPGPKLNPGVAVEFAWCLHYIICSQVSNPLLIGHGALSTLGLLLLDLAGAVQKTEDAGLELLACPVLRCLSNLLTEAAVETVGGQMQLRDERVVAALFILLQFFFQKQPSLLPEGLWLLNNLTANSPSFCTSLLSLDLIEPLLQLLPVSNVVSVLTVLCNVAEKGPAYCQRLWPGPLLPALLHTLAFSDTEVVGQSLELLHLLFLYQPEV

SEQ ID NO: 45998 - protein, 420 aa, Homo sapiens
MAVREKVFDVIIRCFKRHGAEVIDTPVFELKETLMGKYGEDSKLIYDLKDQGGELLSLRYDLTVPFARYLAMNKLTNIKRYHIAKDFDIAGNFDPMIPDAECLKIMCEILSSLQIGDFLVKVNDRRILDGMFAICGVSDSKFRTICSSVDKLDKVSWEEVKNEMVGEKGLAPEVADRIGDYVQQHGGVSLVEQLLQDPKLSQNKQALEGLGDLKLLFEYLTLFGIDDKISFDLSLARGLDYYTGVIYEAVLLQTPAQAGEEPLGVGSVAAGGRYDGLVGMFDPKGRKVPCVGLSIGVERIFSIVEQRLEALEEKIRTTETQVLVASAQKKLLEERLKLVSELWDAGIKAELLYKKNPKLLNQLQYCEEAGIPLVAIIGEQELKDGVIKLRSVTSREEVDVRREDLVEEIKRRTGQPLCIC

SEQ ID NO: 45999 - protein, 123 aa, Homo sapiens
MGGYYCNVCDCVVKDSINFLDHINGKKHQRNLGMSMRVERSTLDQVKKRFEVNKKKMEEKQKDYDFEERMKELREEEEKAKAYKKEKQKEKKRRAEEDLTFEEDDEMAAVMGFSGFGSTKKSY

SEQ ID NO: 46000 - protein, 816 aa, Homo sapiens
MAVKNLFISESRQPGSRFSLEGASDADIGTNSLLTYSLDSTEYFTLDVKRNDEEIKSLGLVLKKNLNREDTPKHYLLITAIDGGKPELTGTTQLKITVLDVNDNAPAFERTIYKVRLLENAPNGTLVVTVNATDLDEGVNKDIAYSFNTDMSADILSKFHLDPVNGQISVKGNIDFEESKSYEIQVEATDKGNPPMSDHCTVLLEIVDINDNVPELVIQSLSLPVLEDSPLSTVIALISVSDRDSGVNGQVTCSLTPHVPFKLVSTFKNYYSLVLDSPLDRESVSAYELVVTARDGGSPSLWATASVSVEVADVNDNAPAFSQSEYTVFVKENNPPGCHIFTVSARDADAQENALVSYSLVERRVGERALSSYVSVHAESGKVYALQPLDHEELELLQFQVSARDAGVPPLGSNVTLQVFVLDENDNAPALLMPRVGGIGGAVSELVPRSVGAGHVVAKVRAVDADSGYNAWLSYELQPGTGGARIPFRVGLYTGEISTTRALDEVDAPRHRLLVLVKDHGEPSLTATATVLVSLVESGQAPKASSQASAGATGPEAALVDVNVYLIVAICAVSSLLVLTLLLYTALRCSAPPTEGDCGPGKPTLVCSSAVGSWSYSQQRQQRVCSGEGLPKTDLMAFSPSLPPCPISRDREEKQDVDVDLSAKPRQPNPDWRYSASLRAGMHSSVHLEEAGILRAGPGGPDQQWPTVSSATPEPEAGEVSPPVGAGVNSNSWTFKYGPGNPKQSGPGELPDKFIIPGSPAIISIRQEPTNSQIDKSDFITFGKKEETKKKKKKKKGNKTQEKKEKGNSTTDNSDQ

SEQ ID NO: 46001 - protein, 630 aa, Homo sapiens
MDFEESRAHKIPVEAVDKGFPPLAGHCTVLVEVVDVNDNAPQLTLTSLSLPIPEDAQPGTVITLISVFDRDFGVNGQVTCSLTPRVPFKLVSTFKNYYSLVLDSALDRESVSAYELVVTARDGGSPSLWATASVSVEVADVNDNAPAFAQPEYTVFVKENNPPGCHIFTVSAGDADAQKNALVSYSLVELRVGERALSSYVSVHAESGKVYALQPLDHEELELLQFQVSARDAGVPPLGSNVTLQVFVLDENDNAPALLAPRVGGTGGAVRELVPRSVGAGHVVAKVRAVDADSGYNAWLSYELQPVAAGASIPFRVGLYTGEISTTRALDETDAPRHRLLVLVKDHGEPSLTATATVLVSLVESGQAPKASSRASLGIAGPETELVDVNVYLIIAICAVSSLLVLTLLLYTALRCSAPSSEGACSLVKPTLVCSSAVGSWSFSQQRRQRVCSGEGPPKTDLMAFSPSLPQGPSSTDNPRQPNPDWRYSASLRAGMHSSVHLEEAGILRAGPGGPDQQWPTVSSATPEPEAGEVSPPVGAGVNSNSWTFKYGPGNPKQSGPGELPDKFIIPGSPAIISIRQEPTNSQIDKSDFITFGKKEETKKKKKKKKGNKTQEKKEKGNSTTDNSDQ

SEQ ID NO: 46002 - protein, 775 aa, Homo sapiens
MLWGEVGSESIQYSVLEETESGTFVANLTKDLGLRVGELASRGARVVFKGNRQHLQFDPQTHDLLLNEKLDREELCGSTEPCVLPFQVLLENPLQFFQASLRVRDINDHAPEFPAREMLLKISEITMPGKIFPLKMAHDLDTGSNGLQRYTISSNPHFHVLTRNRSEGRKFPELVLDKPLDREEQPQLRLTLIALDGGSPPRSGTSEIQIQVLDINDNVPEFAQELYEAQVPENNPLGSLVITVSARDLDAGSFGKVSYALFQVDDVNQPFEINAITGEIRLRKALDFEEIQSYDVDVEATDGGGLSGKCSLVVRVLDVNDNAPELTMSFFISLIPENLPEITVAVFSVSDADSGHNQQVICSIENNLPFLLRPSVENFYTLVTEGALDRESRAEYNITITVTDLGTPRLKTQQSITVQVSDVNDNAPAFTQTSYTLFVRENNSPALHIGSVSATDRDSGINAQVTYSLLPPQDPHLPLSSLVSINADNGHLFALRSLDYEALQSFEFRVGATDRGSPALSSEALVRLLVLDANDNSPFVLYPLQNGSAPCTELVPRAAEPGYLVTKVVAVDGDSGQNAWLSYQLLKATELGLFGVWAHNGEVRTARLLSERDAAKHRLVVLVKDNGEPPRSATATLHVLLVDGFSQPYLPLPEAAPAQAQADSLTVYLVVALASVSSLFLFSVLLFVAVRLCRRSRAASVGRYSVPEGPFPGHLVDVSGTGTLSQSYQYKVCLTGGSETNEFKFLKPIMPNFPPQGTEREMEETPTSRNSFPFS

SEQ ID NO: 46003 - protein, 688 aa, Homo sapiens
MDDPFQIYRAELRVRDINDHSPVFRHKEMVLKISENTAEGTAFRLERAQDPDEGHNSIQNYTISSNSFFHIKISGSDEGMIYPELVLDKALDREEQEELSLTLTALDGGSPSRSGTSTIRIVVLDVNDNVPQFAQALYETQAPENSPVGSLIVKVSAGDADSGVNAEVSYSFFDASEDILTTFQINPFSGEIFLRELLDYELVNSYKINIQAMDGGGLSARCTVLIKVLDSNDNPPELIISSLSNSVAENSPGIVLAVFKIKDRDSGENGKTICYVQDNLPFFLKPSVDNFYILMTEGALDRESKAEYNITITVTDLGTPRLKTEHSITLQVSDVNDNAPAFTQTSYTLFVRENNSPALHIGSVSATDRDSGTNAQVTYSLLPPQDPHLPLASLVSINADNGHLFALRSLDYEALQAFDFRVGASDRGSPALSSEALVRVLVLDANDNSPFVLYPLQNGSAPCTELVPRAAEPGYLVTKVVAVDGDSGQNAWLSYQLLKATEPGLFGVWAHNGEVRTARLLSERDAAKHRLVVLVKDNGEPPRSATATLHVLLVDGFSQPYLPLPEAAPAQAQADLLTVYLVVALASVSSLFLLSVLLFVAVRLCRRSRAASVGRCSVPEGPFPGHLVDVSGTGTLFQSYQYEVCLTGGSETGEFKFLKPITPHLPPHRGGKEIEENSTLPNSFGFNY

SEQ ID NO: 46004 - protein, 759 aa, Homo sapiens
MQSGSFVGNLAKDLGLKVRELSSRGARVVSNDKKQRLQLDINTGDLLLSETLDREELCGSIEPCVLHLQVLMQNPTQFLQIELQVRDINDHSPIFSEKQMLLEIPENSPVGAVFLLESAKDLDVGINAVKSYTISPNSHFHIKMRVIPDNRKYPELVLDKALDYEELPELSFILSALDGGSPPRSGTALVRVVVVDINDNSPEFEQAFYEVKIRENSILGSLILIVSAWDLDSGTNGEICYTFSHASEDIRKTFEINQKSGEITLRAPLDFETIESYSIIIQATDGGGLFGKSTVIIHVIDVNDNAPEITVSSITSPIPENTPETVVMVFSIQDIDSGDNGRIVCSIPEDLPFVLKSSVENYYTLETERPLDRESTAEYNITITVTDLGIPRLKTEHNTTVLVSDVNDNAPTFTQTSYTLFVRENNSPALHIGSVSATDRDSGTNAQVNYSLLPPQDLHLPLASLVSINTDNGHLFALRSLDYEALQAFDFRVGATDRGSPALSSEALVRVLVLDANDNSPFVLYPLQNGSAPCTELVPRAAEPGYLVTKVVAVDGDSGQNAWLSYQLLKATEPGLFGVWAHNGEVRTARLLSERDAAKHRLVVLVKDNGEPPRSATATLQVLLVDGFSQPYLPLPEAAPAQAQADSLTVYLVVALASVSSLFLFSVLLFVAVRLCRRSRAASVGSCSVPKGPFPGHLVDVSGTGTLSQSYQYEVCLTGGSETNEFKFLKPVIPNIQAKGLGKNSEENSTFRNSFGFNF

SEQ ID NO: 46005 - protein, 276 aa, Homo sapiens [sequence omitted]

SEQ ID NO: 46006 - protein, 918 aa, Homo sapiens
MLLCLSLELLLEAGAGNIHYSVPEETDKGSFVGNIAKDLGLQPQELADGGVRIVSRGRMPLFALNPRSGSLITARRIDREELCAQSMPCLVSFNILVEDKMKLFPVEVEIIDINDNTPQFQLEELEFKMNEITTPGTRVSLPFGQDLDVGMNSLQSYQLSSNPHFSLDVQQGADGPQHPEMVLQSPLDREEEAVHHLILTASDGGEPVRSGTLRIYIQVVDANDNPPAFTQAQYHINVPENVPLGTQLLMVNATDPDEGANGEVTYSFHNVDHRVAQIFRLDSYTGEISNKEPLDFEEYKMYSMEVQAQDGAGLMAKVKVLIKVLDVNDNAPEVTITSVTTAVPENFPPGTIIALISVHDQDSGDNGYTTCFIPGNLPFKLEKLVDNYYRLVTERTLDRELISGYNITITAIDQGTPALSTETHISLLVTDINDNSPVFHQDSYSAYIPENNPRGASIFSVRAHDLDSNENAQITYSLIEDTIQGAPLSAYLSINSDTGVLYALRSFDYEQFRDMQLKVMARDSGDPPLSSNVSLSLFLLDQNDNAPEILYPALPTDGSTGVELAPLSAEPGYLVTKVVAVDRDSGQNAWLSYRLLKASEPGLFSVGLHTGEVRTARALLDRDALKQSLVVAVQDHGQPPLSATVTLTVAVADRISDILADLGSLEPSAKPNDSDLTLYLVVAAAAVSCVFLAFVIVLLAHRLRRWHKSRLLQASGGGLASMPGSHFVGVDGVRAFLQTYSHEVSLTADSRKSHLIFPQPNYADTLISQESCEKKGFLSAPQSLLEDKKEPFSQQAPPNTDWRFSQAQRPGTSGSQNGDDTGTWPNNQFDTEMLQAMILASASEAADGSSTLGGGAGTMGLSARYGPQFTLQHVPDYRQNVYIPGSNATLTNAAGKRDGKAPAGGNGNKKKSGKKEKK

SEQ ID NO: 46007 - protein, 918 aa, Homo sapiens
MKSQVLFPFLLSLFCGAISQQIRYTIPEELANGSRVGKLAKDLGLSVRELPTRKLRVSAEDYFNVSLESGDLLVNGRIDREKICGRKLECALEFETVAENPMNVFHVVVVIQDINDNAPRFVAKGIDLEICESALPGVKFSLDSAQDADVEGNSLKLYTINPNQYFSLSTKESPDGSKYPVLLLEKPLDREHQSSHRLILTAMDGGDPPLSGTTHIWIRVTDANDNAPVFSQEVYRVSLQENVPWGTSVLRVMATDQDEGINAEITYAFLNSPISTSLFNLNPNTGDITTNGTLDFEETSRYVLSVEAKDGGVHTAHCNVQIEIVDENDNAPEVTFMSFSNQIPEDSDLGTVIALIKVRDKDSGQNGMVTCYTQEEVPFKLESTSKNYYKLVIAGALNREQTADYNVTIIATDKGKPALSSRTSITLHISDINDNAPVFHQASYVVHVSENNPPGASIAQVSASDPDLGPNGRVSYSILASDLEPRELLSYVSVSPQSGVVFAQRAFDHEQLRAFELTLQARDQGSPALSANVSLRVLVGDLNDNAPRVLYPALGPDGSALFDMVPRAAEPGYLVTKVVAVDADSGHNAWLSYHVLQASEPGLFSLGLRTGEVRTARALGDRDAARQRLLVAVRDGGQPPLSATATLHLIFADSLQEVLPDLSDRPEPSDPQTELQFYLVVALALISVLFLLAVILAIALRLRRSSSLDTEGCFQTGLCSKSGPGVPPNHSEGTLPYSYNLCIASHSAKTEFNSLNLTPEMAPPQDLLCDDPSMVVCASNEDHKIAYDPSLSSHQAPPNTDWRFSQAQRPGTSGSQNGDDTGTWPNNQFDTEMLQAMILASASEAADGSSTLGGGAGTMGLSARYGPQFTLQHVPDYRQNVYIPGSNATLTNAAGKRDGKAPAGGNGNKKKSGKKEKK

SEQ ID NO: 46008 - protein, 914 aa, Homo sapiens
MLFLFLLSLLDQALSEPIRYAIPEELDRGSLVGNLAKDLGFGVGDLPTRNLRVIAEKKFFTVSPENGNLLVSDRIDREEICGKKSTCVLEFEMVAEKPLNFFHVTVLIQDINDNPPTFSQNITELEISELALTGATFALESAQDPDVGVNSLQQYYLSPDPHFSLIQKENLDGSRYPELVLKAPLDREEQPHHHLVLTAVDGGEPSRSCTTQIRVIVADANDNPPVFTQDMYRVNVAENLPAGSSVLKVMAIDMDEGINAEIIYAFINIGKEVRQLFKLDSKTGELTTIGELDFEERDSYTIGVEAKDGGHHTAYCKVQIDISDENDNAPEITLASESQHIQEDAELGTAVALIKTHDLDSGFNGEILCQLKGNFPFKIVQDTKNTYRLVTDGALDREQIPEYNVTITATDKGNPPLSSSKTITLHILDVNDNVPVFHQASYTVHVAENNPPGASIAHVRASDPDLGPNGLVSYYIVASDLEPRELSSYVSVSARSGVVFAQRAFDHEQLRAFELTLQARDQGSPTLSANVSLRVLVDDRNDNAPLVLYPALGPEGSALFDMVPRSAEPGYLVTKVVAVDADSGYNAWLSYHIVQASEPGLFSLGLRTGEVRTARTLGDREAARQRLLVTVRDGGQQPLSATVMLHLIFADSLQEIQPDLSDRPTPSDPQAELQFHLVVALALISVLFLLAVILAISLRLRCSSRPATEGYFQPGVCFKTVPGVLPTYSERTLPYSYNPCAASHSSNTEFKFLNIKAENAAPQDLLCDEASWFESNDNPEMPSNSGNLQKQAPPNTDWRFSQAQRPGTSGSQNGDDTGTWPNNQFDTEMLQAMILASASEAADGSSTLGGGAGTMGLSARYGPQFTLQHVPDYRQNVYIPGSNATLTNAAGKRDGKAPAGGNGNKKKSGKKEKK

SEQ ID NO: 46009 - protein, 883 aa, Homo sapiens
MPKGSVVGNLATDLGFSVQELPTRKLRVSSEKPYFTVSAESGELLVSSRLDREEICGKKPACALEFEAVAENPLNFYHVNVEIEDINDHTPKFTQNSFELQISESAQPGTRFILGSAHDADIGSNTLQNYQLSPSDHFSLINKEKSDGSKYPEMVLKTPLDREKQKSYHLTLTALDFGAPPLSSTAQIHVLVTDANDNAPVFSQDVYRVSLSENVYPGTTVLQVTATDQDEGVNAEITFSFSEASQITQFDLNSNTGEITVLNTLDFEEVKEYSIVLEARDGGGMIAQCTVEVEVIDENDNAPEVIFQSLPNLIMEDAELGTHIALLKVRDKDSRHNGEVTCKLEGDVPFKILTSSRNTYKLVTDAVLDREQNPEYNITVTATDRGKPPLSSSSSITLHIGDVNDNAPVFSQSSYIVHVAENNPPGASISQVRASDPDLGPNGQVSYCIMASDLEQRELSSYVSISAESGVVFAQRAFDHEQLRAFELTLQARDQGSPALSANVSLRVLVDDRNDNAPRVLYPALGPDGSALFDMVPHAAEPGYLVTKVVAVDADSGHNAWLSYHVLQASEPGLFSLGLRTGEVRTARALGDRDAVRQRLLVAVRDGGQPPLSATATLHLVFADSLQEVLPDITDRPDPSDLQAELQFYLVVALALISVLFLVAMILAIALRLRRSSSPASWSCFQPGLCVKSESVVPPNYSEGTLPYSYNLCVAHTGKTEFNFLKCSEQLSSGQDILCGDSSGALFPLCNSSELTSHQQAPPNTDWRFSQAQRPGTSGSQNGDDTGTWPNNQFDTEMLQAMILASASEAADGSSTLGGGAGTMGLSARYGPQFTLQHVPDYRQNVYIPGSNATLTNAAGKRDGKAPAGGNGNKKKSGKKEKK

SEQ ID NO: 46010 - protein, 763 aa, Homo sapiens [sequence omitted]

SEQ ID NO: 46011 - protein, 678 aa, Homo sapiens
MPPGTRLLTVTASDPDEGINGKVAYKFRKINEKQTPLFQLNENTGEISIAKSLDYEECSFYEMEIQAEDVGALLGRTKLLISVEDVNDNRPEVIITSLFSPVLENSLPGTVIAFLSVHDQDSGKNGQVVCYTRDNLPFKLEKSIGNYYRLVTRKYLDRENVSIYNITVMASDLGTPPLSTETQIALHVADINDNPPTFPHASYSAYILENNLRGASIFSLTAHDPDSQENAQVTYSVTEDTLQGAPLSSYISINSDTGVLYALQSFDYEQIRDLQLLVTASDSGDPPLSSNMSLSLFVLDQNDNAPEILYPALPTDGSTGVELAPRSAERGYLVTKVVAVDRDSGQNAWLSYRLLKASEPGLFSVGLHTGEVRTARALLDRDALKQSLVVAVQDHGQPPLSATVTLTVAVADSIPEVLTELGSLKPSVDPNDSSLTLYLVVAVAAISCVFLAFVAVLLGLRLRRWHKSRLLQDSGGRLVGVPASHFVGVEEVQAFLQTYSQEVSLTADSRKSHLIFPQPNYADMLISQEGCEKNDSLLTSVDFHEYKNEADHGQQAPPNTDWRFSQAQRPGTSGSQNGDDTGTWPNNQFDTEMLQAMILASASEAADGSSTLGGGAGTMGLSARYGPQFTLQHVPDYRQNVYIPGSNATLTNAAGKRDGKAPAGGNGNKKKSGKKEKK

SEQ ID NO: 46012 - protein, 766 aa, Homo sapiens
MNSLSKYQLSPNEYFSLVEKDNPDGGKYPELVLQKTLDRETQSAHHLVLTALDGGDPPRSGTAQIRILVIDANDNPPVFSQDVYRVSLREDVPPGTSILRVKATDQDEGINSEITYSFFGVADKAQHVFSLDYTTGNILTQQPLDFEEVERYTINIEAKDRGSLSTRCKVIVEVVDENDNSPEIIITSLSDQIMEDSPPGVVVALFKTRDQDSGENGEVRCSLSRGVPFKIHSSSNNYYKLVTDEALDREQTPEYNVTIAATDRGKPPLSSSKTITLHITDVNDNAPVFGQSAYLVHVPENNQPGASIAQVSASDPDFGLNGRVSYSLIASDLESRTLSSYVSVSAQSGVVFAQRAFDHEQLRTFELTLQARDQGSPALSANVSLRVLVGDRNDNAPRVLYPALGPDGSALFDTVPRAAQPGYLVTKVVAVDADSGHNAWLSYHVVQASEPGLFSLGLRTGEVRMVRALGDKDSVRQRLLVAVRDGGQPPLSATATLHLVFADSLQEVLPDFSDHPTPSDSQAEMQFYLVVALALISVLFLLAVILAIALRLRQSFSPTAGDCFESVLCSKSGPVGPPNYSEGTLPYAYNFCVPGDQMNPEFNFFTSVDHCPATQDNLNKDSMLLASILTPSVEADKKILKQQAPPNTDWRFSQAQRPGTSGSQNGDDTGTWPNNQFDTEMLQAMILASASEAADGSSTLGGGAGTMGLSARYGPQFTLQHVPDYRQNVYIPGSNATLTNAAGKRDGKAPAGGNGNKKKSGKKEKK

SEQ ID NO: 46013 - protein, 805 aa, Homo sapiens
MRISESAASGARFPLDSAQDPDVGTNTVSFYTLSPNSHFSLNVKTLKDGKPFPELVLEQQLDREAQARHQLVLTAVDGGTPARSGTTLISVIVLDINDNAPTFQSSVLRVGIPENAPIGTLLLRLNATDPDEGTNGQLDYSFGDHTSEAVRNLFGLDPSSGAIHVLGPIDFEESRFYEIHARARDQGQPAMEGHCVIQVDVGDVNDNAPEVLLASLANPVLESTPVGTVVGLFNVRDRDSGRNGEVSLDISPDLPFQIKPSENHYSLLTSQPLDREATSHYIIELLASDAGSPSLHKHLTIRLNISDVNDNAPRFNQQLYTAYILENRPPGSLLCTVAASDPDTGDNARLTYSIVGNQVQGAPASSFVYVNPEDGRIFAQRTFDYELLQMLQIVVGVRDSGSPPLHANTSLHVFVLDENDNAPAVLHPRPDWEHSAPQRLPRSAPPGSLVTKVTAVDADAGHNAWLSYSLLPQSTAPGLFLVSTHTGEVRTARALLEDDSDTQQVVVLVRDNGDPSLSSTATVLLVLEDEDPEEMPKSSDFLIHPPERSDLTLYLIVALATVSLLSLVTFTFLSAKCLQGNADGDGGGGQCCRRQDSPSPDFYKQSSPNLQVSSDGTLKYMEVTLRPTDSQSHCYRTCFSPASDGSDFTFLRPLSVQQPTALALEPDAIRSRSNTLRERSQQAPPNTDWRFSQAQRPGTSGSQNGDDTGTWPNNQFDTEMLQAMILASASEAADGSSTLGGGAGTMGLSARYGPQFTLQHVPDYRQNVYIPGSNATLTNAAGKRDGKAPAGGNGNKKKSGKKEKK

SEQ ID NO: 46014 - protein, 1218 aa, Homo sapiens
MRIKKEKEKPNSAHRNSSASYGDDPTAQSLQDVSDEQVLVLFEQMLLDMNLNEEKQQPLREKDIIIKREMVSQYLYTSKAGMSQKESSKSAMMYIQELRSGLRDMPLLSCLESLRVSLNNNPVSWVQTFGAEGLASLLDILKRLHDEKEETAGSYDSRNKHEIIRCLKAFMNNKFGIKTMLETEEGILLLVRAMDPAVPNMMIDAAKLLSALCILPQPEDMNERVLEAMTERAEMDEVERFQPLLDGLKSGTTIALKVGCLQLINALITPAEELDFRVHIRSELMRLGLHQVLQDLREIENEDMRVQLNVFDEQGEEDSYDLKGRLDDIRMEMDDFNEVFQILLNTVKDSKAEPHFLSILQHLLLVRNDYEARPQYYKLIEECISQIVLHKNGADPDFKCRHLQIEIEGLIDQMIDKTKVEKSEAKAAELEKKLDSELTARHELQVEMKKMESDFEQKLQDLQGEKDALHSEKQQIATEKQDLEAEVSQLTGEVAKLTKELEDAKKEMASLSAAAITVPPSVPSRAPVPPAPPLPGDSGTIIPPPPAPGDSTTPPPPPPPPPPPPPLPGGVCISSPPSLPGGTAISPPPPLSGDATIPPPPPLPEGVGIPSPSSLPGGTAIPPPPPLPGSARIPPPPPPLPGSAGIPPPPPPLPGEAGMPPPPPPLPGGPGIPPPPPFPGGPGIPPPPPGMGMPPPPPFGFGVPAAPVLPFGLTPKKLYKPEVQLRRPNWSKLVAEDLSQDCFWTKVKEDRFENNELFAKLTLTFSAQTKTSKAKKDQEGGEEKKSVQKKKVKELKVLDSKTAQNLSIFLGSFRMPYQEIKNVILEVNEAVLTESMIQNLIKQMPEPEQLKMLSELKDEYDDLAESEQFGVVMGTVPRLRPRLNAILFKLQFSEQVENIKPEIVSVTAACEELRKSESFSNLLEITLLVGNYMNAGSRNAGAFGFNISFLCKLRDTKSTDQKMTLLHFLAELCENDYPDVLKFPDELAHVEKASRVSAENLQKNLDQMKKQISDVERDVQNFPAATDEKDKFVEKMTSFVKDAQEQYNKLRMMHSNMETLYKELGEYFLFDPKKLSVEEFFMDLHNFRNMFLQAVKENQKRRETEEKMRRAKLAKEKAEKERLEKQQKREQLIDMNAEGDETGVMDSLLEALQSGAAFRRKRGPRQANRKAGCAVTSLLASELTKDDAMAAVPAKVSKNSETFPTILEEAKELVGRAS

SEQ ID NO: 46015 - protein, 1466 aa, Homo sapiens
MEPSPSPAPQAQPPKPVPKPRTVFGGLSGPATTQRPGLSPALGGPGVSRSPEPSPRPPPLPTSSSEQSSALNTVEMMPNSIYFGLDSRGRAQAAQDKAPDSSQISAPTPALRPTTGTVHIMDPGCLYYGVQPVGTPGAPDRRESRGVCQGRAEHRLSRQDLEAREDAGYASLELPGDSTLLSPTLETEETSDDLISPYASFSFTADRLTPLLSGWLDKLSPQGNYVFQRRFVQFNGRSLMYFGSDKDPFPKGVIPLTAIEMTRSSKDNKFQVITGQRVFVFRTESEAQRDMWCSTLQSCLKEQRLLGHPRPPQPPRPLRTGMLELRGHKAKVFAALSPGELALYKSEQAFSLGIGICFIELQGCSVRETKSRSFDLLTPHRCFSFTAESGGARQSWAAALQEAVTETLSDYEVAEKIWSNRANRQCADCGSSRPDWAAVNLGVVICKQCAGQHRALGSGISKVQSLKLDTSVWSNEIVQLFIVLGNDRANRFWAGTLPPGEGLHPDATPGPRGEFISRKYRLGLFRKPHPQYPDHSQLLQALCAAVARPNLLKNMTQLLCVEAFEGEEPWFPPAPDGSCPGLLPSDPSPGVYNEVVVRATYSGFLYCSPVSNKAGPSPPRRGRDAPPRLWCVLGAALEMFASENSPEPLSLIQPQDIVCLGVSPPPTDPGDRFPFSFELILAGGRIQHFGTDGADSLEAWTSAVGKWFSPLSCHQLLGPGLLRLGRLWLRSPSHTAPAPGLWLSGFGLLRGDHLFLCSAPGPGPPAPEDMVHLRRLQEISVVSAADTPDKKEHLVLVETGRTLYLQGEGRLDFTAWNAAIGGAAGGGGTGLQEQQMSRGDIPIIVDACISFVTQHGLRLEGVYRKGGARARSLRLLAEFRRDARSVKLRPGEHFVEDVTDTLKRFFRELDDPVTSARLLPRWREAAELPQKNQRLEKYKDVIGCLPRVNRRTLATLIGHLYRVQKCAALNQMCTRNLALLFAPSVFQTDGRGEHEVRVLQELIDGYISVFDIDSDQVAQIDLEVSLITTWKDVQLSQAGDLIMEVYIEQQLPDNCVTLKVSPTLTAEELTNQVLEMRGTAAGMDLWVTFEIREHGELERPLHPKEKVLEQALQWCQLPEPCSASLLLKKVPLAQAGCLFTGIRRESPRVGLLRCREEPPRLLGSRFQERFFLLRGRCLLLLKEKKSSKPEREWPLEGAKVYLGIRKKLKPPTPWGFTLILEKMHLYLSCTDEDEMWDWTTSILKAQHDDQQPVVLRRHSSSDLARQKFGTMPLLPIRGDDSGATLLSANQTLRRLHNRRTLSMFFPMKSSQGSVEEQEELEEPVYEEPVYEEVGAFPELIQDTSTSFSTTREWTVKPENPLTSQKSLDQPFLSKSSTLGQEERPPEPPPGPPSKSSPQARGSLEEQLLQELSSLILRKGETTAGLGSPSQPSSPQSPSPTGLPTQTPGFPTQPPCTSSPPSSQPLT

SEQ ID NO: 46016 - protein, 1003 aa, Homo sapiens
MGNLDRERWDSYDLTIKVQDGGSPPRASSALLRVTVLDTNDNAPKFERPSYEAELSENSPIGHSVIQVKANDSDQGANAEIEYTFHQAPEVVRRLLRLDRNTGLITVQGPVDREDLSTLRFSVLAKDRGTNPKSARAQVVVTVKDMNDNAPTIEIRGIGLVTHQDGMANISEDVAEETAVALVQVSDRDEGENAAVTCVVAGDVPFQLRQASETGSDSKKKYFLQTTTPLDYEKVKDYTIEIVAVDSGNPPLSSTNSLKVQVVDVNDNAPVFTQSVTEVAFPENNKPGEVIAEITASDADSGSNAELVYSLEPEPAAKGLFTISPETGEIQVKTSLDREQRESYELKVVAADRGSPSLQGTATVLVNVLDCNDNDPKFMLSGYNFSVMENMPALSPVGMVTVIDGDKGENAQVQLSVEQDNGDFVIQNGTGTILSSLSFDREQQSTYTFQLKAVDGGVPPRSAYVGVTINVLDENDNAPYITAPSNTSHKLLTPQTRLGETVSQVAAEDFDSGVNAELIYSIAGGNPYGLFQIGSHSGAITLEKEIERRHHGLHRLVVKVSDRGKPPRYGTALVHLYVNETLANRTLLETLLGHSLDTPLDIDIAGDPEYERSKQRGNILFGVVAGVVAVALLIALAVLVRYCRQREAKSGYQAGKKETKDLYAPKPSGKASKGNKSKGKKSKSPKPVKPVEDEDEAGLQKSLKFNLMSDAPGDSPRIHLPLNYPPGSPDLGRHYRSNSPLPSIQLQPQSPSASKKHQVVQDLPPANTFVGTGDTTSTGSEQYSDYSYRTNPPKYPSKQLPHRRVTFSATSQAQELQDPSQHSYYDSGLEESETPSSKSSSGPRLGPLALPEDHYERTTPDGSIGEMEHPENDLRPLPDVAMTGTCTRECSEFGHSDTCWMPGQSSPSRRTKSSALKLSTFVPYQDRGGQEPAGAGSPSPPEDRNTKTAPVRLLPSYSAFSHSSHDSCKDSATLEEIPLTQTSDFPPAATPASAQTAKREIYL

SEQ ID NO: 46017 - protein, 826 aa, Homo sapiens
MGNLDRERWDSYDLTIKVQDGGSPPRASSALLRVTVLDTNDNAPKFERPSYEAELSENSPIGHSVIQVKANDSDQGANAEIEYTFHQAPEVVRRLLRLDRNTGLITVQGPVDREDLSTLRFSVLAKDRGTNPKSARAQVVVTVKDMNDNAPTIEIRGIGLVTHQDGMANISEDVAEETAVALVQVSDRDEGENAAVTCVVAGDVPFQLRQASETGSDSKKKYFLQTTTPLDYEKVKDYTIEIVAVDSGNPPLSSTNSLKVQVVDVNDNAPVFTQSVTEVAFPENNKPGEVIAEITASDADSGSNAELVYSLEPEPAAKGLFTISPETGEIQVKTSLDREQRESYELKVVAADRGSPSLQGTATVLVNVLDCNDNDPKFMLSGYNFSVMENMPALSPVGMVTVIDGDKGENAQVQLSVEQDNGDFVIQNGTGTILSSLSFDREQQSTYTFQLKAVDGGVPPRSAYVGVTINVLDENDNAPYITAPSNTSHKLLTPQTRLGETVSQVAAEDFDSGVNAELIYSIAGGNPYGLFQIGSHSGAITLEKEIERRHHGLHRLVVKVSDRGKPPRYGTALVHLYVNETLANRTLLETLLGHSLDTPLDIDIAGDPEYERSKQRGNILFGVVAGVVAVALLIALAVLVRYCRQREAKSGYQAGKKETKDLYAPKPSGKASKGNKSKGKKSKSPKPVKPVEDEDEAGLQKSLKFNLMSDAPGDSPRIHLPLNYPPGSPDLGRHYRSNSPLPSIQLQPQSPSASKKHQVVQDLPPANTFVGTGDTTSTGSEQYSDYSYRTNPPKYPSKQVGQPFQLSTPQPLPHPYHGAIWTEVWE

SEQ ID NO: 46018 - protein, 752 aa, Homo sapiens
MDFYKTLRGGATVKVSASSPSLAVASQSDSKQRRLLVDFPKGSVSNAQQPDLSKAVSLSMGLYMGETETKVMGNDLGFPQQGQISLSSGETDLKLLEESIANLNRSTSVPENPKSSASTAVSAAPTEKEFPKTHSDVSSEQQHLKGQTGTNGGNVKLYTTDQSTFDILQDLEFSSGSPGKETNESPWRSDLLIDENCLLSPLAGEDDSFLLEGNSNEDCKPLILPDTKPKIKDNGDLVLSSPSNVTLPQVKTEKEDFIELCTPGVIKQEKLGTVYCQASFPGANIIGNKMSAISVHGVSTSGGQMYHYDMNTASLSQQQDQKPIFNVIPPIPVGSENWNRCQGSGDDNLTSLGTLNFPGRTVFSNGYSSPSMRPDVSSPPSSSSTATTGPPPKLCLVCSDEASGCHYGVLTCGSCKVFFKRAVEGRQHNYLCAGRNDCIIDKIRRKNCPACRYRKCLQAGMNLEARKTKKKIKGIQQATTGVSQETSENPGNKTIVPATLPQLTPTLVSLLEVIEPEVLYAGYDSSVPDSTWRIMTTLNMLGGRQVIAAVKWAKAIPGFRNLHLDDQMTLLQYSWMFLMAFALGWRSYRQSSANLLCFAPDLIINEQRMTLPCMYDQCKHMLYVSSELHRLQVSYEEYLCMKTLLLLSSVPKDGLKSQELFDEIRMTYIKELGKAIVKREGNSSQNWQRFYQLTKLLDSMHEVVENLLNYCFQTFLDKTMSIEFPEMLAEIITNQIPKYSNGNIKKLLFHQK

SEQ ID NO: 46019 - protein, 751 aa, Homo sapiens
MDFYKTLRGGATVKVSASSPSLAVASQSDSKQRRLLVDFPKGSVSNAQQPDLSKAVSLSMGLYMGETETKVMGNDLGFPQQGQISLSSGETDLKLLEESIANLNRSTSVPENPKSSASTAVSAAPTEKEFPKTHSDVSSEQQHLKGQTGTNGGNVKLYTTDQSTFDILQDLEFSSGSPGKETNESPWRSDLLIDENCLLSPLAGEDDSFLLEGNSNEDCKPLILPDTKPKIKDNGDLVLSSPSNVTLPQVKTEKEDFIELCTPGVIKQEKLGTVYCQASFPGANIIGNKMSAISVHGVSTSGGQMYHYDMNTASLSQQQDQKPIFNVIPPIPVGSENWNRCQGSGDDNLTSLGTLNFPGRTVFSNGYSSPSMRPDVSSPPSSSSTATTGPPPKLCLVCSDEASGCHYGVLTCGSCKVFFKRAVEGQHNYLCAGRNDCIIDKIRRKNCPACRYRKCLQAGMNLEARKTKKKIKGIQQATTGVSQETSENPGNKTIVPATLPQLTPTLVSLLEVIEPEVLYAGYDSSVPDSTWRIMTTLNMLGGRQVIAAVKWAKAIPGFRNLHLDDQMTLLQYSWMFLMAFALGWRSYRQSSANLLCFAPDLIINEQRMTLPCMYDQCKHMLYVSSELHRLQVSYEEYLCMKTLLLLSSVPKDGLKSQELFDEIRMTYIKELGKAIVKREGNSSQNWQRFYQLTKLLDSMHEVVENLLNYCFQTFLDKTMSIEFPEMLAEIITNQIPKYSNGNIKKLLFHQK

SEQ ID NO: 46020 - protein, 1076 aa, Homo sapiens
MNGRLHLGHTFSLSKCEFAVGYQRLKGKCCLFPFGLHCTGMPIKSKAAAKAGSSKYQWGIMKSLGLSDEEIVKFSEAEHWLDYFPPLAIQDLKRMGLKVDWRRSFITTDVNPYYDSFVRWQFLTLRERNKIKFGKRYTIYSPKDGQPCMDHDRQTGEGVGPQEYTLLKLKVLEPYPSKLSGLKGKNIFLVAATLRPETMFGQTNCWVRPDMKYIGFETVNGDIFICTQKAARNMSYQGFTKDNGVVPVVKELMGEEILGASLSAPLTSYKVIYVLPMLTIKEDKGTGVVTSVPSDSPDDIAALRDLKKKQALRAKYGIRDDMVLPFEPVPVIEIPGFGNLSAVTICDELKIQSQNDREKLAEAKEKIYLKGFYEGIMLVDGFKGQKVQDVKKTIQKKMIDAGDALIYMEPEKQVMSRSSDECVVALCDQWYLDYGEENWKKQTSQCLKNLETFCEETRRNFEATLGWLQEHACSRTYGLGTHLPWDEQWLIESLSDSTIYMAFYTVAHLLQGGNLHGQAESPLGIRPQQMTKEVWDYVFFKEAPFPKTQIAKEKLDQLKQEFEFWYPVDLRVSGKDLVPNHLSYYLYNHVAMWPEQSDKWPTAVRANGHLLLNSEKMSKSTGNFLTLTQAIDKFSADGMRLALADAGDTVEDANFVEAMADAGILRLYTWVEWVKEMVANWDSLRSGPASTFNDRVFASELNAGIIKTDQNYEKMMFKEALKTGFFEFQAAKDKYRELAVEGMHRELVFRFIEVQTLLLAPFCPHLCEHIWTLLGKPDSIMNASWPVAGPVNEVLIHSSQYLMEVTHDLRLRLKNYMMPAKGKKTDKQPLQKPSHCTIYVAKNYPPWQHTTLSVLRKHFEANNGKLPDNKVIASELGSMPELKKYMKKVMPFVAMIKENLEKMGPRILDLQLEFDEKAVLMENIVYLTNSLELEHIEVKFASEAEDKIREDCCPGKPLNVFRIEPGVSVSLVNPQPSNGHFSTKIEIRQGDNCDSIIRRLMKMNRGIKDLSKVKLMRFDDPLLGPRRVPVLGKEYTEKTPISEHAVFNVDLMSKKIHLTENGIRVDIGDTIIYLVH

SEQ ID NO: 46021 - protein, 7 aa, Homo sapiens
MVCRLDW

SEQ ID NO: 46022 - protein, 931 aa, Homo sapiens
MNNEIPEEMTADETKDYMNQLSHEVLCHIFRYLPLQDIMCMECLSRKLKEAVTLYLRVVRVVDLCAGRWWEYMPSGFTDASFLTLLKKMPDVEQLYGLHPRYLERRRVRGHEAFSIPGVLEALQACPNLVGVETSHLELVESIWTYMPHVHILGKFRNRNGAFPIPPENKLKIPIGAKIQTLHLVGVNVPEIPCIPMLRHLYMKWVRLTKPQPFKDFLCISLRTFVMRNCAGPTNSLKYVPLVTGLASARNLEHLEMVRVPFLGGLIQHVVEDSWRSGGFRNLHTIVLGACKNALEVDLGYLIITAARRLHEVRIQPSLTKDGVFSALKMAELEFPQFETLHLGYVDEFLLQSRMANADLVKYGLADVVENPGIITDIGMKAVNEVFSCIKYLAIYNCPHLHNPYNWISDHSRWTRLVDINLVRCHALKLDSFGQFIELLPSLEFISLDQMFREPPKGCARVGLSAGTGIGVSSALVSNQNSNNDDNNAQNNNANIHDNNHHHPDDSDEENDFRQDLQPGEQQFAADALNEMEDIVQEDGEVVAESGNNTPAHSQAIIPVDVDEEQAGPSGLQRVVKPTSITVHDSESDDEEDSLELQEVWIPKNGTRRYSEREEKTGESVQSRELSEVAKTKPRHAMKRKRTADKSTSTSDPVIEDDHVQVLVLKSKNLVGVTMTNCGITDLVLKDCPKMMFIHATRCRVLKHLKVENAPIVNRFDYAQCKKLNMDQVLDQILRMPPERNRIIYLRPMQQVDTLTLEQKLFSGPYPYHICIIHEFSNPPNVRNKVRIRSWMDTIANINQELIKYEFFPEATRSEEDLKKYPKYPWGREIYTLEGVVDGAPYSMISDFPWLRSLRAAEPNSFARYDFEDDEESTIYAPRRKGQLSADICMETIGEEISEMRQMKKGVFQRVVAIFIHYCDVNGEPVEDDYI

SEQ ID NO: 46023 - protein, 1176 aa, Homo sapiens
MNNEIPEEMTADETKDYMNQLSHEVLCHIFRYLPLQDIMCMECLSRKLKEAVTLYLRVVRVVDLCAGRWWEYMPSGFTDASFLTLLKKMPDVEQLYGLHPRYLERRRVRGHEAFSIPGVLEALQACPNLVGVETSHLELVESIWTYMPHVHILGKFRNRNGAFPIPPENKLKIPIGAKIQTLHLVGVNVPEIPCIPMLRHLYMKWVRLTKPQPFKDFLCISLRTFVMRNCAGPTNSLKYVPLVTGLASARNLEHLEMVRVPFLGGLIQHVVEDSWRSGGFRNLHTIVLGACKNALEVDLGYLIITAARRLHEVRIQPSLTKDGVFSALKMAELEFPQFETLHLGYVDEFLLQSRMANADLVKYGLADVVENPGIITDIGMKAVNEVFSCIKYLAIYNCPHLHNPYNWISDHSRWTRLVDINLVRCHALKLDSFGQFIELLPSLEFISLDQMFREPPKGCARVGLSAGTGIGVSSALVSNQNSNNDDNNAQNNNANIHDNNHHHPDDSDEENDFRQDLQPGEQQFAADALNEMEDIVQEDGEVVAESGNNTPAHSQAIIPVDVDEEQAGPSGLQRVVKPTSITVHDSESDDEEDSLELQEVWIPKNGTRRYSEREEKTGESVQSRELSVSGKGKTPLRKRYNSHQMGQSKQFPLEESSCEKGCQVTSEQIKADMKAARDIPEKKKNKDVYPSCSSTTASTVGNSSSHNTASQSPDFVRTVNSGGSSEPSPTEVDVSRQCACSPGGSEDSEAMEEGDAESSVCPRCCCHRPQESQRRTSRCSDEERPSTSRACVVNGPDGTRSAFSFRTLPQGGSSGPAHDERTNGSGSGATGEDRRGSSQPESCDVQSNEDYPRRPLTRARSRLSHVLLVSESEVAKTKPRHAMKRKRTADKSTSTSDPVIEDDHVQVLVLKSKNLVGVTMTNCGITDLVLKDCPKMMFIHATRCRVLKHLKVENAPIVNRFDYAQCKKLNMDQVLDQILRMPPERNRIIYLRPMQQVDTLTLEQKLFSGPYPYHICIIHEFSNPPNVRNKVRIRSWMDTIANINQELIKYEFFPEATRSEEDLKKYPKYPWGREIYTLEGVVDGAPYSMISDFPWLRSLRAAEPNSFARYDFEDDEESTIYAPRRKGQLSADICMETIGEEISEMRQMKKGVFQRVVAIFIHYCDVNGEPVEDDYI

SEQ ID NO: 46024 - protein, 1101 aa, Homo sapiens
MNNEIPEEMTADETKDYMNQLSHEVLCHIFRYLPLQDIMCMECLSRKLKEAVTLYLRVVRVVDLCAGRWWEYMPSGFTDASFLTLLKKMPDVEQLYGLHPRYLERRRVRGHEAFSIPGVLEALQACPNLVGVETSHLELVESIWTYMPHVHILGKFRNRNGAFPIPPENKLKIPIGAKIQTLHLVGVNVPEIPCIPMLRHLYMKWVRLTKPQPFKDFLCISLRTFVMRNCAGPTNSLKYVPLVTGLASARNLEHLEMVRVPFLGGLIQHVVEDSWRSGGFRNLHTIVLGACKNALEVDLGYLIITAARRLHEVRIQPSLTKDGVFSALKMAELEFPQFETLHLGYVDEFLLQSRMANADLVKYGLADVVENPGIITDIGMKAVNEVFSCIKYLAIYNCPHLHNPYNWISDHSRWTRLVDINLVRCHALKLDSFGQFIELLPSLEFISLDQMFREPPKGCARVGLSAGTGIGVSSALVSNQNSNNDDNNAQNNNANIHDNNHHHPDDSDEENDFRQDLQPGEQQFAADALNEMEDIVQEDGEVVAESGNNTPAHSQAIIPVDVDEEQAGPSGLQRVVKPTSITVHDSESDDEEDSLELQEVWIPKNGTRRYSEREEKTGESVQSRELSVSGKGKTPLRKRYNSHQMGQSKQFPLEESSCEKGCQVTSEQIKADMKAARDIPEKKKNKDVYPSCSSTTASTVGNSSSHNTASQSPDFVRTVNSGGSSEPSPTEVDVSRQCACSPGGSEDSEAMEEGDAESSVCPRCCCHRPQESQRRTSRCSDEERPSTSRACVVNGPDEVAKTKPRHAMKRKRTADKSTSTSDPVIEDDHVQVLVLKSKNLVGVTMTNCGITDLVLKDCPKMMFIHATRCRVLKHLKVENAPIVNRFDYAQCKKLNMDQVLDQILRMPPERNRIIYLRPMQQVDTLTLEQKLFSGPYPYHICIIHEFSNPPNVRNKVRIRSWMDTIANINQELIKYEFFPEATRSEEDLKKYPKYPWGREIYTLEGVVDGAPYSMISDFPWLRSLRAAEPNSFARYDFEDDEESTIYAPRRKGQLSADICMETIGEEISEMRQMKKGVFQRVVAIFIHYCDVNGEPVEDDYI

SEQ ID NO: 46025 - protein, 436 aa, Homo sapiens
MASSKPIKIRGPSHCAGCKEEIKHGQSLLALDKQWHVSCFKCQTCSVILTGEYISKDGVPYCESDYHAQFGIKCETCDRYISGRVLEAGGKHYHPTCARCVRCHQMFTEGEEMYLTGSEVWHPICKQAARAEKKLKHRRTSETSISPPGSSIGSPNRVICDIYENLDLRQRRASSPGYIDSPTYSRQGMSPTFSRSPHHYYRSGDLSTATKSKTSEDISQTSKYSPIYSPDPYYASESEYWTYHGSPKVPRARRFSSGGEEDDFDRSMHKLQSGIGRLILKEEMKARSSSYADPWTPPRSSTSSREALHTAGYEMSLNGSPRSHYLADSDPLISKSASLPAYRRNGLHRTPSADLFHYDSMNAVNWGMREYKIYPYELLLVTTRGRNRLPKDVDRTRLERHLSQEEFYQVFGMTISEFDRLALWKRNELKKQARLF

SEQ ID NO: 46026 - protein, 92 aa, Homo sapiens
MKVKADRDESSPYAAMLAAQDVAQRCKELGITALHIKLRATGGNRTKTPGPGAQSALRALARSGMKIGRIEDVTPIPSDSTRRKGGRRGRRL

SEQ ID NO: 46027 - protein, 381 aa, Homo sapiens
MHTLSTRATSISTQLPDDPAKTTMKKAYYLACGFCRWTSRDVGMADKSVASGGWQEPENPHTQRMNKLIEYYQQLAQKEKVERDRKKLARRRNYMPLAFSDKYGLGTRLQRPRAGASISTLAGLSLKEGEDQKEIKIEPAQAVDEVEPLPEDYYTRPVNLTEVTTLQQRLLQPDFQPVCASQLYPRHKHLLIKRSLRCRKCEHNLSKPEFNPTSIKFKIQLVAVNYIPEVRIMSIPNLRYMKESQVLLTLTNPVENLTHVTLFECEEGDPDDINSTAKVVVPPKELVLAGKDAAAEYDELAEPQDFQDDPDIIAFRKANKVGIFIKVTPQREEGEVTVCFKMKHDFKNLAAPIRPIEESDQGTEVIWLTQHVELSLGPLLP

SEQ ID NO: 46028 - protein, 52 aa, Homo sapiens [sequence omitted]

SEQ ID NO: 46029 - protein, 30 aa, Homo sapiens
MARLLQASCLLSLLLAGFVSQSRGQEKSKN

SEQ ID NO: 46030 - protein, 43 aa, Homo sapiens
MARLLQASCLLSLLLAGFVSQSRGQEKSKAPRQMGNPQVRETS

SEQ ID NO: 46031 - protein, 597 aa, Homo sapiens
MQGIKMLGELLEESQMEATRLRQKAEELVKDNELLPPPSPSLGSFDPLAELTGKDSNVTASPTAPACPSDKPAPVQKPPSSGTSSEFEVVTPEEQNSPESSSHANAMALGPLPREDGNLMLHLQRLETTLSVCAEEPDHGQLFTHLGRMALEFNRLASKVHKNEQRTSILQTLCEQLRKENEALKAKLDKGLEQRDQAAERLREENLELKKLLMSNGNKEGASGRPGSPKMEGTGKKAVAGQQQASVTAGKVPEVVALGAAEKKVKMLEQQRSELLEVNKQWDQHFRSMKQQYEQKITELRQKLADLQKQVTDLEAEREQKQRDFDRKLLLAKSKIEMEETDKEQLTAEAKELRQKVKYLQDQLSPLTRQREYQEKEIQRLNKALEEALSIQTPPSSPPTAFGSPEGAGALLRKQELVTQNELLKQQVKIFEEDFQRERSDRERMNEEKEELKKQVEKLQAQVTLSNAQLKAFKDEEKAREALRQQKRKAKASGERYHVEPHPEHLCGAYPYAYPPMPAMVPHHGFEDWSQIRYPPPPMAMEHPPPLPNSRLFHLPEYTWRLPCGGVRNPNQSSQVMDPPTARPTEPEPADLRLPRN

SEQ ID NO: 46032 - protein, 598 aa, Homo sapiens
MQGIKMLGELLEESQMEATRLRQKAEELVKDNELLPPPSPSLGSFDPLAELTGKDSNVTASPTAPACPSDKPAPVQKPPSSGTSSEFEVVTPEEQNSPESSSHANAMALGPLPREDGNLMLHLQRLETTLSVCAEEPDHGQLFTHLGRMALEFNRLASKVHKNEQRTSILQTLCEQLRKENEALKAKLDKGLEQRDQAAERLREENLELKKLLMSNGNKEGASGRPGSPKMEGTGKKAVAGQQQASVTAGKVPEVVALGAAEKKVKMLEQQRSELLEVNKQWDQHFRSMKQQYEQKITELRQKLADLQKQVTDLEAEREQKQRDFDRKLLLAKSKIEMEETDKEQLTAEAKELRQKVKYLQDQLSPLTRQREYQEKEIQRLNKALEEALSIQTPPSSPPTAFGSPEGAGALLRKQELVTQNELLKQQVKIFEEDFQRERSDRERMNEEKEELKKQVEKLQAQVTLSNAQLKAFKDEEKAREALRQQKRKAKASGERYHVEPHPEHLCGAYPYAYPPMPAMVPHHGFEDWSQIRYPPPPMAMEHPPPLPNSRLFHLPEYTWRLPCGGVRNPNQSSQVMDPPTARPTEPESPKNDREGPQ

SEQ ID NO: 46033 - protein, 398 aa, Homo sapiens
MGPISLLIIGIVAVHCMGILVKCAHHFCRRLNKSFVDYGDTVMYGLESSPCSWLRNHAHWGRRVVDFFLIVTQLGFCCVYFVFLADNFKQVIEAANGTTNNCHNNETVILTPTMDSRLYMLSFLPFLVLLVFIRNLRALSIFSLLANITMLVSLVMIYQFIVQRIPDPSHLPLVAPWKTYPLFFGTAIFSFEGIGMVLPLENKMKDPRKFPLILYLGMVIVTILYISLGCLGYLQFGANIQGSITLNLPNCWLYQSVKLLYSIGIFFTYALQFYVPAEIIIPFFVSRAPEHCELVVDLFVRTVLVCLTCILAILIPRLDLVISLVGSVSSSALALIIPPLLEVTTFYSEGMSPLTIFKDALISILGFVGFVVGTYEALYELIQPSNAPIFINSTCAFI

SEQ ID NO: 46034 - protein, 837 aa, Homo sapiens
MTYRFCSQFSKGVYAIFGFYERRTVNMLTSFCGALHVCFITPSFPVDTSNQFVLQLRPELQDALISIIDHYKWQKFVYIYDADRGLSVLQKVLDTAAEKNWQVTAVNILTTTEEGYRMLFQDLEKKKERLVVVDCESERLNAILGQIIKLEKNGIGYHYILANLGFMDIDLNKFKESGANVTGFQLVNYTDTIPAKIMQQWKNSDARDHTRVDWKRPKYTSALTYDGVKVMAEAFQSLRRQRIDISRRGNAGDCLANPAVPWGQGIDIQRALQQVRFEGLTGNVQFNEKGRRTNYTLHVIEMKHDGIRKIGYWNEDDKFVPAATDAQAGGDNSSVQNRTYIVTTILEDPYVMLKKNANQFEGNDRYEGYCVELAAEIAKHVGYSYRLEIVSDGKYGARDPDTKAWNGMVGELVYGRADVAVAPLTITLVREEVIDFSKPFMSLGISIMIKKPQKSKPGVFSFLDPLAYEIWMCIVFAYIGVSVVLFLVSRFSPYEWHSEEFEEGRDQTTSDQSNEFGIFNSLWFSLGAFMQQGCDISPRSLSGRIVGGVWWFFTLIIISSYTANLAAFLTVERMVSPIESAEDLAKQTEIAYGTLEAGSTKEFFRRSKIAVFEKMWTYMKSAEPSVFVRTTEEGMIRVRKSKGKYAYLLESTMNEYIEQRKPCDTMKVGGNLDSKGYGIATPKGSALRGPVNLAVLKLSEQGVLDKLKSKWWYDKGECGSKDSGSKDKTSALSLSNVAGVFYILIGGLGLAMLVALIEFCYKSRSESKRMKGFCLIPQQSINEAIRTSTLPRNSGAGASSGGSGENGRVVSHDFPKSMQSIPCMSHSSGMPLGATGL

SEQ ID NO: 46035 - protein, 251 aa, Homo sapiens
MLSQESEIKVKSILNSLSGEELETLKVELEQLKETFSLAEFCEEEEEEKKGDEDFTKDITELFSQLHVSSKPEKLARARNTAHEWIRKSLTKPLAENEEGEKQSEAENTEQVNKNSIEDIHAFAIRSLAELTACSIELFHKTAALVLHGRKQEVTAIERSQTLSQMTIVLCKELSSLSKEFTTCLTTAGVKEMADVLNPLITAVFLEASNSASYIQDAFQLLLPVLEISLIENKIESHRHELQGQKPLLEH

SEQ ID NO: 46036 - protein, 1152 aa, Homo sapiens
MDRDVKCWDIATLECSWTLPSLGGFAYSLAFSSVDIGSLAIGVGDGMIRVWNTLSIKNNYDVKNFWQGVKSKVTALCWHPTKEGCLAFGTDDGKVGLYDTYSNKPPQISSTYHKKTVYTLAWGPPVPPMSLGGEGDRPSLALYSCGGEGIVLQHNPWKLSGEAFDINKLIRDTNSIKYKLPVHTEISWKADGKIMALGNEDGSIEIFQIPNLKLICTIQQHHKLVNTISWHHEHGSQPELSYLMASGSNNAVIYVHNLKTVIESSPESPVTITEPYRTLSGHTAKITSVAWSPHHDGRLVSASYDGTAQVWDALREEPLCNFRGHRGRLLCVAWSPLDPDCIYSGADDFCVHKWLTSMQDHSRPPQGKKSIELEKKRLSQPKAKPKKKKKPTLRTPVKLESIDGNEEESMKENSGPVENGVSDQEGEEQAREPELPCGLAPAVSREPVICTPVSSGFEKSKVTINNKVILLKKEPPKEKPETLIKKRKARSLLPLSTSLDHRSKEELHQDCLVLATAKHSRELNEDVSADVEERFHLGLFTDRATLYRMIDIEGKGHLENGHPELFHQLMLWKGDLKGVLQTAAERGELTDNLVAMAPAAGYHVWLWAVEAFAKQLCFQDQYVKAASHLLSIHKVYEAVELLKSNHFYREAIAIAKARLRPEDPVLKDLYLSWGTVLERDGHYAVAAKCYLGATCAYDAAKVLAKKGDAASLRTAAELAAIVGEDELSASLALRCAQELLLANNWVGAQEALQLHESLQGQRLVFCLLELLSRHLEEKQLSEGKSSSSYHTWNTGTEGPFVERVTAVWKSIFSLDTPEQYQEAFQKLQNIKYPSATNNTPAKQLLLHICHDLTLAVLSQQMASWDEAVQALLRAVVRSYDSGSFTIMQEVYSAFLPDGCDHLRDKLGDHQSPATPAFKSLEAFFLYGRLYEFWWSLSRPCPNSSVWVRAGHRTLSVEPSQQLDTASTEETDPETSQPEPNRPSELDLRLTEEGERMLSTFKELFSEKHASLQNSQRTVAEVQETLAEMIRQHQKSQLCKSTANGPDKNEPEVEAEQPLCSSQSQCKEEKNEPLSLPELTKRLTEANQRMAKFPESIKAWPFPDVLECCLVLLLIRSHFPGCLAQEMQQQAQELLQKYGNTKTYRRHCQTFCM

SEQ ID NO: 46037 - protein, 277 aa, Homo sapiens
MPGSVGPQVYKVGIYGWRKRCLYFFVLLLMILILVNLAMTIWILKVMNFTIDGMGNLRITEKGLKLEGDSEFLQPLYAKEIQSRPGNALYFKSARNVTVNILNDQTKVLTQLITGPKAVEAYGKKFEVKTVSGKLLFSADNNEVVVGAERLRVLGAEGTVFPKSIETPNVRADPFKELRLESPTRSLVMEAPKGVEINAEAGNMEATCRTELRLESKDGEIKLDAAKIRLPRLPHGSYTPTGTRQKVFEICVCANGRLFLSQAGAGSTCQINTSVCL

SEQ ID NO: 46038 - protein, 243 aa, Homo sapiens
MPGSVGPQVYKVGIYGWRKRCLYFFVLLLMILILVNLAMTIWILKVMNFTIDGMGNLRITEKGLKLEGDSEFLQPLYAKEIQSRPGNALYFKSARNVTVNILNDQTKVLTQLITGPKAVEAYGKKFEVKTVSGKLLFSADNNEVVVGAERLRVLGAEGTVFPKSIETPNVRADPFKELRLESPTRSLVMEAPKGVEINAEAGNMEATCRTELRLESKDGEVRDEKDRSSKSYSFNRPTLPITG

SEQ ID NO: 46039 - protein, 607 aa, Homo sapiens [sequence omitted]

SEQ ID NO: 46040 - protein, 432 aa, Homo sapiens
MADLLLSFTVLPFSAALEVLGYWVLGRIFCDIWAAVDVLCCTASILSLCAISIDRYIGVRYSLQYPTLVTRRKAILALLSVWVLSTVISIGPLLGWKEPAPNDDKECGVTEEPFYALFSSLGSFYIPLAVILVMYCRVYIVAKRTTKNLEAGVMKEMSNSKELTLRIHSKNFHEDTLSSTKAKGHNPRSSIAVKLFKFSREKKAAKTLGIVVGMFILCWLPFFIALPLGSLFSTLKPPDAVFKVVFWLGYFNSCLNPIIYPCSSKEFKRAFVRILGCQCRGRGRRRRRRRRRLGGCAYTYRPWTRGGSLERSQSRKDSLDDSGSCLSGSQRTLPSASPSPGYLGRGAPPPVELCAFPEWKAPGALLSLPAPEPPGRRGRHDSGPLFTFKLLTEPESPGTDGGASNGGCEAAADVANGQPGFKSNMPLAPGQF

SEQ ID NO: 46041 - protein, 534 aa, Homo sapiens
MEPIPGSEAGTDPLPVTATEASVPDGETDGQQSAPQADEPPLPPPPPPPGELARSPEAVGPELEAEEKLSVRVAESAAAAPQGGPELPPSPASPPEQPPAPEEREEPPLPQPVAPALVPPAGGDSTVSQLIPGSEVRVTLDHIIEDALVVSFRFGEKLFSGVLMDLSKRFGPHGIPVTVFPKREYKDKPEAMPLQSNTFQEGTEVKCEANGAVPDDPSPVPHPELSLAESLWTSKPPPLFHEGAPYPPPLFIRDTYNQSIPQPPPRKIKRPKRKMYREEPTSIMNAIKLRPRQVLCDKCKNSVVAEKKEIRKGSSATDSSKYEDKKRRNESVTTVNKKLKTDHKVDGKNQNESQKRNAVVKVSNIAHSRGRVVKVSAQANTSKAQLSTKKVLQSKNMDHAKAREVLKIAKEKAQKKQNETSTSKNAHSKVHFTRRYQNPSSGSLPPRVRLKPQRYRNEENDSSLKTGLEKMRSGKMAPKPQSRCTSTRSAGLNKWQLLHQTVTSPAAPLQCLTDHCGFRLGALKLTVKRAAQRH

SEQ ID NO: 46042 - protein, 494 aa, Homo sapiens
MEPIPGSEAGTDPLPVTATEASVPDGETDGQQSAPQADEPPLPPPPPPPGELARSPEAVGPELEAEEKLSVRVAESAAAAPQGGPELPPSPASPPEQPPAPEEREEPPLPQPVAPALVPPAGGDSTVSQLIPGSEVRVTLDHIIEDALVVSFRFGEKLFSGVLMDLSKRFGPHGIPVTVFPKREYKDKPEAMPLQSNTFQEGTEVKCEANGAVPDDPSPVPHPELSLAESLWTSKPPPLFHEGAPYPPPLFIRDTYNQSIPQPPPRKIKRPKRKMYREEPTSIMNAIKLRPRQVLCDKCKNSVVAEKKEIRKGSSATDSSKYEDKKRRNESVTTVNKKLKTDHKVDGKNQNESQKRNAVVKVSNIAHSRGRVVKVSAQANTSKAQLSTKKVLQSKNMDHAKAREVLKIAKEKAQKKQNETSTSKNAHSKVHFTRRYQNPSSGSLPPRVRLKPQRYRNEENDSSLKTGLEKMRSGKMAPKPQSRCTSTRSAAQRH

SEQ ID NO: 46043 - protein, 729 aa, Homo sapiens [sequence omitted]

SEQ ID NO: 46044 - protein, 461 aa, Homo sapiens
MTHKKKDCFERPRRVGAKFTGTNIAPDEHVQPQLMFDYDGKRDRWNGYNPEEHMKIVEEYAKVDLAKRTLKAQKLQEELASGKLVEQANSPKHQWGEEEPNSQMEKDHNSEDEDEDKYADDIDMPGQNFDSKRRITVRNLRIREDIAKYLRNLDPNSAYYDPKTRAMRENPYANAGKNPDEVSYAGDNFVRYTGDTISMAQTQLFAWEAYDKGSEVHLQADPTKLELLYKSFKVKKEDFKEQQKESILEKYGGQEHLDAPPAELLLAQTEDYVEYSRHGTVIKGQERAVACSKYEEDVKIHNHTHIWGSYWKEGRWGYKCCHSFFKYSYCTGEAGKEIVNSEECIINEITGEESVKKPQTLMELHQEKLKEEKKKKKKKKKKHRKSSSDSDDEEKKHEKLKKALNAEEARLLHVKETMQIDERKRPYNSMYETREPTEEEMEAYRMKRQRPDDPMASFLGQ

SEQ ID NO: 46045 - protein, 588 aa, Homo sapiens
MINIISRLQEVFGHAIKAAYPDLENPPLLVTPSQQAKFGDYQCNSAMGISQMLKTKEQKVNPREIAENITKHLPDNECIEKVEIAGPGFINVHLRKDFVSEQLTSLLVNGVQLPALGENKKVIVDFSSPNIAKEMHVGHLRSTIIGESISRLFEFAGYDVLRLNHVGDWGTQFGMLIAHLQDKFPDYLTVSPPIGDLQVFYKESKKRFDTEEEFKKRAYQCVVLLQGKNPDITKAWKLICDVSRQELNKIYDALDVSLIERGESFYQDRMNDIVKEFEDRGFVQVDDGRKIVFVPGCSIPLTIVKSDGGYTYDTSDLAAIKQRLFEEKADMIIYVVDNGQSVHFQTIFAAAQMIGWYDPKVTRVFHAGFGVVLGEDKKKFKTRSGETVRLMDLLGEGLKRSMDKLKEKERDKVLTAEELNAAQTSVAYGCIKYADLSHNRLNDYIFSFDKMLDDRGNTAAYLLYAFTRIRSIARLANIDEEMLQKAARETKILLDHEKEWKLGRCILRFPEILQKILDDLFLHTLCDYIYELATAFTEFYDSCYCVEKDRQTGKILKVNMWRMLLCEAVAAVMAKGFDILGIKPVQRM

SEQ ID NO: 46046 - protein, 75 aa, Homo sapiens [sequence omitted]

SEQ ID NO: 46047 - protein, 534 aa, Homo sapiens
MLESLSCECEAIKQQQKMHLEKLEEQLSRSHGQEVNELKTKIEKLKVELDEARLSEKQLKHQVDHQKELLSCKSEELRVMSERVQESMSSEMLALQIELTEMESMKTTLKEEVNELQYRQEQLELLITNLMRQVDRLKEEKEEREKEAVSYYNALEKARVANQDLQVQLDQALQQALDPNSKGNSLFAEVEDRRAAMERQLISMKVKYQSLKKQNVFNREQMQRMKLQIATLLQMKGSQTEFEQQERLLAMLEQKNGEIKHLLGEIRNLEKFKNLYDSMESKPSVDSGTLEDNTYYTDLLQMKLDNLNKEIESTKGELSIQRMKALFESQRALDIERKLFANERCLQLSESENMKLRAKLDELKLKYEPEETVEVPVLKKRREVLPVDITTAKDACVNNSALGGEVYRLPPQKEETQSCPNSLEDNNLQLEKSVSIYTPVVSLSPHKNLPVDMQLKKEKKCVKLIGVPADAEALSERSGNTPNSPRLAAESKLQTEVKEGKETSSKLEKETCKKLHPILYVSSKSTPETQCPQQ

SEQ ID NO: 46048 - protein, 498 aa, Homo sapiens
MDIRNYILNYVASQPKLAPFVIQALIQVIAKITKLGWFEVQKDQFVFREIIADVKKFLQGTVEHCIIGVIILSELTQEMNLVDYSRPSAKHRKIATSFRDTSLKDVLVLACSLLKEVFAKPLNLQDQCQQNLVMQVLKLVLNCLNFDFIGSSADESADDLCTVQIPTTWRTIFLEPETLDLFFNLYHSLPPLLSQLALSCLVQFASTRRSLFNSPERAKYLGNLIKGVKRILENPQGLSDPGNYHEFCRFLARLKTNYQLGELVMVKEYPEVIRLIANFTITSLQHWEFAPNSVHYLLTLWQRMVASVPFVKSTEPHLLDTYAPEITKAFITSRLDSVAIVVRDHLDDPLDDTATVFQQLEQLCTVSRCEYEKTCALLVQLFDQNAQNYQKLLHPYSGVTVDITIQEGRLAWLVYLVGTVVGGRLTYTSTDEHDAMDGELSCRVFQLISLMDTGLPRCCNEKIELAILWFLDQFRKTYVGDQLQRTSKEVAGDCILLN

SEQ ID NO: 46049 - protein, 444 aa, Homo sapiens
MCHYQHGHINSYLKPMLQRDFITALPEQGLDHIAENILSYLDARSLCAAELVCKEWQRVISEGMLWKKLIERMVRTDPLWKGLSERRGWDQYLFKNRPTDGPPNSFYRSLYPKIIQDIETIESNWRCGRHNLQRIQCRSENSKGVYCLQYDDEKIISGLRDNSIKIWDKTSLECLKVLTGHTGSVLCLQYDERVIVTGSSDSTVRVWDVNTGEVLNTLIHHNEAVLHLRFSNGLMVTCSKDRSIAVWDMASATDITLRRVLVGHRAAVNVVDFDDKYIVSASGDRTIKVWSTSTCEFVRTLNGHKRGIACLQYRDRLVVSGSSDNTIRLWDIECGACLRVLEGHEELVRCIRFDNKRIVSGAYDGKIKVWDLQAALDPRAPASTLCLRTLVEHSGRVFRLQFDEFQIISSSHDDTILIWDFLNVPPSAQNETRSPSRTYTYISR

SEQ ID NO: 46050 - protein, 106 aa, Homo sapiens
MIEEKSDIETLDIPEPPPNSGYECQLRLRLSTGKDLKLVVRSTDTVFHMKRRLHAAEGVEPGSQRWFFSGRPLTDKMKFEELKIPKDYVVQVIVSQPVQNPTPVEN

SEQ ID NO: 46051 - protein, 447 aa, Homo sapiens
MSAQDIPKYACPDLVTRPGYWAKALPENLALRDTVLAYWADRHGRVFYSVNDGEPVLFHCGVAVGGPLWALIDVYGITDEVQLLESAFADTLTPARLSQARFSACLPPSSHDAANFDNNELENNQVVAKLGHLALGRAPGPPPADAAAAAIPCGPRERPRPASSPALLEADLRFHATRGPDVSLSADRKVACAPRPDGGRTLVFSERPLRPGESLFVEVGRPGLAAPGALAFGITSCDPGVLRPNELPADPDALLDRKEYWVVARAGPVPSGGDALSFTLRPGGDVLLGINGRPRGRLLCVDTTQALWAFFAVRGGVAGQLRLLGTLQSSPATTTPSGSLSGSQDDSDSDMTFSVNQSSSASESSLVTAPSSPLSPPVSPVFSPPEPAGIKNGECTVCFDGEVDTVIYTCGHMCLCHSCGLRLKRQARACCPICRRPIKDVIKIYRP

SEQ ID NO: 46052 - protein, 612 aa, Homo sapiens [sequence omitted]

SEQ ID NO: 46053 - protein, 311 aa, Homo sapiens
MRAENDTIKGQSSLFPMEDGFLDDGRGDQPLHSGLGSPHCFSHQNGERVERYSRKVFVGGLPPDIDEDEITASFRRFGPLIVDWPHKAESKSYFPPKGYAFLLFQDESSVQALIDACIEEDGKLYLCVSSPTIKDKPVQIRPWNLSDSDFVMDGSQPLDPRKTIFVGGVPRPLRAVELAMIMDRLYGGVCYAGIDTDPELKYPKGAGRVAFSNQQSYIAAISARFVQLQHGEIDKRVEVKPYVLDDQLCDECQGARCGGKFAPFFCANVTCLQYYCEYCWAAIHSRAGREFHKPLVKEGGDRPRHISFRWN

SEQ ID NO: 46054 - protein, 805 aa, Homo sapiens
MTVRKEDLGSLGKVDPLCSSKTYTVSPRKEDPGSLRKVDPVSSDKVDPVFPRKEEPRYSGKEHPVSSEKVAPTSAEKVDLVLSGKRDPGPSGKADPMPLESMDSASTGKTEPGLLGKLIPGSSGKNGPVSSGTGAPGSLGRLDPTCLGMADPASVGNVETVPATKEDSRFLGKMDPASSGEGRPVSGHTDTTASAKTDLTSLKNVDPMSSGKVDPVSLGKMDPMCSGKPELLSPGQAERVSVGKAGTVSPGKEDPVSSRREDPISAGSRKTSSEKVNPESSGKTNPVSSGPGDPRSLGTAGPPSAVKAEPATGGKGDPLSSEKAGLVASGKAAPTASGKAEPLAVGKEDPVSKGKADAGPSGQGDSVSIGKVVSTPGKTVPVPSGKVDPVSLGKAEAIPEGKVGSLPLEKGSPVTTTKADPRASGKAQPQSGGKAETKLPGQEGAAAPGEAGAVCLKKETPQASEKVDPGSCRKAEPLASGKGEPVSLGKADSAPSRKTESPSLGKVVPLSLEKTKPSSSSRQLDRKALGSARSPEGARGSEGRVEPKAEPVSSTEASSLGQKDLEAAGAERSPCPEAAAPPPGPRTRDNFTKAPSWEASAPPPPREDAGTQAGAQACVSVAVSPMSPQDGAGGSAFSFQAAPRAPSPPSRRDAGLQVSLGAAETRSVATGPMTPQAAAPPAFPEVRVRPGSALAAAVAPPEPAEPVRDVSWDEKGMTWEVYGAAMEVEVLGMAIQKHLERQIEEHGRQGAPAPPPAARAGPGRSGSVRTAPPDGAAKRPPGLFRALLQSVRRPRCCSRAGPTAE

SEQ ID NO: 46055 - protein, 256 aa, Homo sapiens [sequence omitted]

SEQ ID NO: 46056 - protein, 367 aa, Homo sapiens [sequence omitted]

SEQ ID NO: 46057 - protein, 24 aa, Homo sapiens
MGCRKRRQNSRIEQSVWPKEKSHR

SEQ ID NO: 46058 - protein, 275 aa, Homo sapiens [sequence omitted]

SEQ ID NO: 46059 - protein, 279 aa, Homo sapiens
MQDPDEEHLKKSSQVPRTEAPAPASSTPQEPWPGPTAPSPTSRPPWAVDPAFAERYAPDKTSTVLTRHSQPATPTPLQSRTSIVQAAAGGVPGGGSNNGKTPVCHQCHKVIRGRYLVALGHAYHPEEFVCSQCGKVLEEGGFFEEKGAIFCPPCYDVRYAPSCAKCKKKITGEIMHALKMTWHVHCFTCAACKTPIRNRAFYMEEGVPYCERDYEKMFGTKCHGCDFKIDAGDRFLEALGFSWHDTCFVCAICQINLEGKTFYSKKDRPLCKSHAFSHV

SEQ ID NO: 46060 - protein, 491 aa, Homo sapiens
MAKGITYDDPIKTSWTPPRYVLSMSEERHERVRKKYHILVEGDGIPPPIKSFKEMKFPAAILRGLKKKGIHHPTPIQIQGIPTILSGRDMIGIAFTGSGKTLVFTLPVIMFCLEQEKRLPFSKREGPYGLIICPSRELARQTHGILEYYCRLLQEDSSPLLRCALCIGGMSVKEQMETIRHGVHMMVATPGRLMDLLQKKMVSLDICRYLALDEADRMIDMGFEGDIRTIFSYFKGQRQTLLFSATMPKKIQNFAKSALVKPVTINVGRAGAASLDVIQEVEYVKEEAKMVYLLECLQKTPPPVLIFAEKKADVDAIHEYLLLKGVEAVAIHGGKDQEERTKAIEAFREGKKDVLVATDVASKGLDFPAIQHVINYDMPEEIENYVHRIGRTGRSGNTGIATTFINKACDESVLMDLKALLLEAKQKVPPVLQVLHCGDESMLDIGGERGCAFCGGLGHRITDCPKLEAMQTKQVSNIGRKDYLAHSSMDF

SEQ ID NO: 46061 - protein, 326 aa, Homo sapiens
MDSNGFSKEGAAEPEPQSLPPSNLSGSSEQQPDINLDLSPLTLGSPQNHTLQAPGEPAPPWAEMRGPHPPWTEVRGPPPGIVPENGLVRRLNTVPNLSRVIWVKTPKPGYPSSEEPSSKEVPSCKQELPEPVSSGGKPQKGKRQGSQAKKSEASPAPRPPASLEVPSAKGQVAGPKQPGRVLELPKVGSCAEAGEGSRGSRPGPGWAGSPKTEKEKGSSWRNWPGEAKARPQEQESVQPSGPARPQSLPQGKGRSRRSRNKQEKPASSLDDVFLPKDMDGVEMDETDREVEYFKRFCLDSAKQTRQKVAVNWTNFSLKKTTPSTAQ

SEQ ID NO: 46062 - protein, 111 aa, Homo sapiens [sequence omitted]

SEQ ID NO: 46063 - protein, 157 aa, Homo sapiens [sequence omitted]

SEQ ID NO: 46064 - protein, 272 aa, Homo sapiens
MAIVEHLYQQGMLSVAEELCQESTLNVDLDFKQPFLELNRILEALHEQDLGPALEWAVSHRQRLLELNSSLEFKLHRLHFIRLLAGGPAKQLEALSYARHFQPFARLHQREIQVMMGSLVYLRLGLEKSPYCHLLDSSHWAEICETFTRDACSLLGLSVESPLSVSFASGCVALPVLMNIKAVIEQRQCTGVWNHKDELPIEIELGMKCWYHSVFACPILRQQTSDSNPPIKLICGHVISRDALNKLINGGKLKCPYCPMEQNPADGKRIIF

SEQ ID NO: 46065 - protein, 75 aa, Homo sapiens [sequence omitted]

SEQ ID NO: 46066 - protein, 409 aa, Homo sapiens [sequence omitted]

SEQ ID NO: 46067 - protein, 271 aa, Homo sapiens
MAMQRPGPYDRPGAGRGYNSIGRGAGFERMRRGAYGGGYGGYDDYNGYNDGYGFGSDRFGRDLNYCFSGMSDHRYGDGGSTFQSTTGHCVHMRGLPYRATENDIYNFFSPLNPVRVHIEIGPDGRVTGEADVEFATHEDAVAAMSKDKANMQHRYVELFLNSTAGASGGAYEHRYVELFLNSTAGASGGAYGSQMMGGMGLSNQSSYGGPASQQLSGGYGGGYGGQSSMSGYGNQGAVNSSYYSSGSRASMGVNGMGGLSSMSSMSGGWGM

SEQ ID NO: 46068 - protein, 248 aa, Homo sapiens
MAMQRPGPYDRPGAGRGYNSIGRGAGFERMRRGAYGGGYGGYDDYNGYNDGYGFGSDRFGRDLNYCFSGMSDHRYGDGGSTFQSTTGHCVHMRGLPYRATENDIYNFFSPLNPVRVHIEIGPDGRVTGEADVEFATHEDAVAAMSKDKANMQHRYVELFLNSTAGASGGAYEHRYVELFLNSTAGASGGAYGSQMMGGMGLSNQSSYGGPASQQLSGGYGGGYGGQSSMSGYDQVLQENSSDFQSNIA

SEQ ID NO: 46069 - protein, 228 aa, Homo sapiens
MAMQRPGPYDRPGAGRGYNSIGRGAGFERMRRGAYGGGYGGYDDYNGYNDGYGFGSDRFGRDLNYCFSGMSDHRYGDGGSTFQSTTGHCVHMRGLPYRATENDIYNFFSPLNPVRVHIEIGPDGRVTGEADVEFATHEDAVAAMSKDKANMQHRYVELFLNSTAGASGGAYGSQMLGGMGLSNQSSYGGPASQQLSGGYGGGYGGQSSMSGYDQVLQENSSDFQSNIA

SEQ ID NO: 46070 - protein, 1009 aa, Homo sapiens
MAEFALPRHSAVMERLRRRIELCRRHHSTCEARYEAVSPERLELERQHTFALHQRCIQAKAKRAGKHRQPPAATAPAPAAPAPRLDAADGPEHGRPATHLHDTVKRNLDSATSPQNGDQQNGYGDLFPGHKKTRREAPLGVAISSNGLPPASPLGQSDKPSGADALQSSGKHSLGLDSLNKKRLADSSLHLNGGSNPSESFPLSLNKELKQEPVEDLPCMITGTVGSISQSNLMPDLNLNEQEWKELIEELNRSVPDEDMKDLFNEDFEEKKDPESSGSATQTPLAQDINIKTEFSPAAFEQEQLGSPQVRAGSAGQTFLGPSSAPVSTDSPSLGGSQTLFHTSGQPRADNPSPNLMPASAQAQNAQRALAGVVLPSQGPGGASELSSAHQLQQIAAKQKREQMLQNPQQATPAPAPGQMSTWQQTGPSHSSLDVPYPMEKPASPSSYKQDFTNSKLLMMPSVNKSSPRPGGPYLQPSHVNLLSHQPPSNLNQNSANNQGSVLDYGNTKPLSHYKADCGQGSPGSGQSKPALMAYLPQQLSHISHEQNSLFLMKPKPGNMPFRSLVPPGQEQNPSSVPVQAQATSVGTQPPAVSVASSHNSSPYLSSQQQAAVMKQHQLLLDQQKQREQQQKHLQQQQFLQRQQHLLAEQEKQQFQRHLTRPPPQYQDPTQGSFPQQVGQFTGSSAAVPGMNTLGPSNSSCPRVFPQAGNLMPMGPGHASVSSLPTNSGQQDRGVAQFPGSQNMPQSSLYGMASGITQIVAQPPPQATNGHAHIPRQTNVGQNTSVSAAYGQNSLGSSGLSQQHNKGTLNPGLTKPPVPRVSPAMGGQNSSWQHQGMPNLSGQTPGNSNVSPFTAASSFHMQQQAHLKMSSPQFSQAVPNRPMAPMSSAAAVGSLLPPVSAQQRTSAPAPAPPPTAPQQGLPGLSPAGPELGAFSQSPASQMGGRAGLHCTQAYPVRTAGQELPFAYSGQPGGSGLSSVAGHTDLIDSLLKNRTSEEWMSDLDDLLGSQ

SEQ ID NO: 46071 - protein, 403 aa, Homo sapiens
MGIPSVRREVHSYLTDTLHSLISELSPQEKEDSVIVVLIAETDSQYTSAVTENIKALFPTEIHSGLLEVISPSPHFYPDFSRLRESFGDPKERVRWRTKQNLDYCFLMMYAQSKGIYYVQLEDDIVAKPNYLSTMKNFALQQPSEDWMILEFSQLGFIGKMFKSLDLSLIVEFILMFYRDKPIDWLLDHILWVKVCNPEKDAKHCDRQKANLRIRFKPSLFQHVGTHSSLAGKIQKLKDKDFGKQALRKEHVNPPAEVSTSLKTYQHFTLEKAYLREDFFWAFTPAAGDFIRFRFFQPLRLERFFFRSGNIEHPEDKLFNTSVEVLPFDNPQSDKEALQEGRTATLRYPRSPDGYLQIGSFYKGVAEGEVDPAFGPLEALRLSIQTDSPVWVILSEIFLKKAD

SEQ ID NO: 46072 - protein, 180 aa, Homo sapiens [sequence omitted]

SEQ ID NO: 46073 - protein, 201 aa, Homo sapiens [sequence omitted]

SEQ ID NO: 46074 - protein, 870 aa, Homo sapiens [sequence omitted]

SEQ ID NO: 46075 - protein, 334 aa, Homo sapiens
MAIQSSPSKRLTLSEIYQFLQARFPFFRGAYQGWKNSVRHNLSLNECFIKLPKGLGRPGKGHYWTIDPASEFMFEEGSFRRRPRGFRRKCQALKPMYHRVVSGLGFGASLLPQGFDFQAPPSAPLGCHSQGGYGGLDMMPAGYDAGAGAPSHAHPHHHHHHHVPHMSPNPGSTYMASCPVPAGPGGVGAAGGGGGGDYGPDSSSSPVPSSPAMASAIECHSPYTSPAAHWSSPGASPYLKQPPALTPSSNPAASAGLHSSMSSYSLEQSYLHQNAREDLSVGLPRYQHHSTPVCDRKDFVLNFNGISSFHPSASGSYYHHHHQSVCQDIKPCVM

SEQ ID NO: 46076 - protein, 354 aa, Homo sapiens [sequence omitted]

SEQ ID NO: 46077 - protein, 336 aa, Homo sapiens
MVLLGAKGNTATQMAQALSLNTEEDIHRAFQSLLTEVNKAGTQYLLRTANRLFGEKTCQFLSTFKESCLQFYHAELKELSFIRAAEESRKHINTWVSKKTEGKIEELLPGSSIDAETRLVLVNAIYFKGKWNEPFDETYTREMPFKINQEEQRPVQMMYQEATFKLAHVGEVRAQLLELPYARKELSLLVLLPDDGVELSTVEKSLTFEKLTAWTKPDCMKSTEVEVLLPKFKLQEDYDMESVLRHLGIVDAFQQGKADLSAMSAERDLCLSKFVHKSFVEVNEEGTEAAAASSCFVVAECCMESGPRFCADHPFLFFIRHNRANSILFCGRFSSP

SEQ ID NO: 46078 - protein, 42 aa, Homo sapiens
MDSVRSGPFGQIFRPDNFVFGKRRVFKREESASLRPVLPSPP

SEQ ID NO: 46079 - protein, 46 aa, Homo sapiens
MRLTDSLFLWVGATPHLRNLAVAMCSRYTGSEPAVGLRYPATASTK

SEQ ID NO: 46080 - protein, 218 aa, Homo sapiens
MFVRGCWVNGIRRLIVSRRGDEEEFFEIRTEWSDRSVLYLHRSLADLGRLWQRLRDAFPEDRSELAQGPLRQGLVAIKEAHDIETRLNEVEKLLKTIISMPCKYSRSEVVLTFFERSPLDQVLKNDNVHKIQPSFQSPVKISEIMRSNGFCLANTETIVIDHSIPNGRDQQLGVDPTEHLFENGSEFPSELEDGDDPAAYVTNLSYYHLVPFETDIWD

SEQ ID NO: 46081 - protein, 93 aa, Homo sapiens
MFTSDVPSNTAEAMSHACPRQGLPSPAARPPAGGAPRPGSSRVCPWPGSSGVGPSLQGGCVWPAFGAAGRRGGEWLGPAGRGFIRRFPSRAAR

SEQ ID NO: 46082 - protein, 298 aa, Homo sapiens [sequence omitted]

SEQ ID NO: 46083 - protein, 280 aa, Homo sapiens
MNTGPYYFVKNLPLHELITPEFISTFIKKGKLILSLDKDTYEETGLQGHPSQFSGRKIMKFIVSIDLMELSLNLDSKKYERISWSFKEKKPLKFDFLLAWHKTGSEESTMMSYFSKYQIQEHQPKVALSTLRDLQCPVLQSSELEGTPEVSCRALELFDWLGAVFSNVDLNNEPNNFISTYCCPEPSTVVAKAYLCTITGFILPEKICLLLEHLCHYFDEPKLAPWVTLSVQGFADSPVSWEKNEHGFRKGGEHLYNFVIFNNQDYWLQMAVGANDHCPP

SEQ ID NO: 46084 - protein, 94 aa, Homo sapiens
MANYPQGLDDKTNIKTVCTYWEDFHSCTVTALTDCQEGAKDMWDKLRKESKNLNIQGSLFELCGSGNGAAGSLLPAFPVLLVSLSAALATWLSF

SEQ ID NO: 46085 - protein, 561 aa, Homo sapiens [sequence omitted]

SEQ ID NO: 46086 - protein, 37 aa, Homo sapiens
MGMRFYHSGKFMPAGLIAGASLLMVAKVGVSMFNRPH

SEQ ID NO: 46087 - protein, 207 aa, Homo sapiens [sequence omitted]

SEQ ID NO: 46088 - protein, 162 aa, Homo sapiens
MKLKERQKFFEEAFQQDMEQYLSTGYLQIAERREPIGSMSSMEVNVDMLEQMDLMDISDQEALDVFLNSGGEENTVLSPALGPESSTCQNEITLQVPNPSELRAKPPSSSSTCTDSATRDISEGGESPVVQSDEEEVQVDTALATSHTDREATPDGGEDSDS

SEQ ID NO: 46089 - protein, 1336 aa, Homo sapiens
MLESPALHCQPSTSSAFPIGSSGFSLVKEIKDSTSQHDDDNISTTSGFSSRASDKDITVSKNTSLPPLWSPEAERSHSLSQHTATSSKKPAFNLSAFGTLSPSLGNSSILKTSQLGDSPFYPGKTTYGGAAAAVRQSKLRNTPYQAPVRRQMKAKQLSAQSYGVTSSTARRILQSLEKMSSPLADAKRIPSIVSSPLNSPLDRSGIDITDFQAKREKVDSQYPPVQRLMTPKPVSIATNRSVYFKPSLTPSGEFRKTNQRIDNKCSTGYEKNMTPGQNREQRESGFSYPNFSLPAANGLSSGVGGGGGKMRRERTRFVASKPLEEEEMEVPVLPKISLPITSSSLPTFNFSSPEITTSSPSPINSSQALTNKVQMTSPSSTGSPMFKFSSPIVKSTEANVLPPSSIGFTFSVPVAKTAELSGSSSTLEPIISSSAHHVTTVNSTNCKKTPPEDCEGPFRPAEILKEGSVLDILKSPGFASPKIDSVAAQPTATSPVVYTRPAISSFSSSGIGFGESLKAGSSWQCDTCLLQNKVTDNKCIACQAAKLSPRDTAKQTGIETPNKSGKTTLSASGTGFGDKFKPVIGTWDCDTCLVQNKPEAIKCVACETPKPGTCVKRALTLTVVSESAETMTASSSSCTVTTGTLGFGDKFKRPIGSWECSVCCVSNNAEDNKCVSCMSEKPGSSVPASSSSTVPVSLPSGGSLGLEKFKKPEGSWDCELCLVQNKADSTKCLACESAKPGTKSGFKGFDTSSSSSNSAASSSFKFGVSSSSSGPSQTLTSTGNFKFGDQGGFKIGVSSDSGSINPMSEGFKFSKPIGDFKFGVSSESKPEEVKKDSKNDNFKFGLSSGLSNPVSLTPFQFGVSNLGQEEKKEELPKSSSAGFSFGTGVINSTPAPANTIVTSENKSSFNLGTIETKSASVAPFTCKTSEAKKEEMPATKGGFSFGNVEPASLPSASVFVLGRTEEKQQEPVTSTSLVFGKKADNEEPKCQPVFSFGNSEQTKDENSSKSTFSFSMTKPSEKESEQPAKATFAFGAQTSTTADQGAAKPVFSFLNNSSSSSSTPATSAGGGIFGSSTSSSNPPVATFVFGQSSNPVSSSAFGNTAESSTSQSLLFSQDSKLATTSSTGTAVTPFVFGPGASSNNTTTSGFGFGATTTSSSAGSSFVFGTGPSAPSASPAFGANQTPTFGQSQGASQPNPPGFGSISSSTALFPTGSQPAPPTFGTVSSSSQPPVFGQQPSQSAFGSGTTPNSSSAFQFGSSTTNFNFTNNSPSGVFTFGANSSTPAASAQPSGSGGFPFNQSPAAFTVGSNGKNVFSSSGTSFSGRKIKTAVRRRK

SEQ ID NO: 46090 - protein, 1720 aa, Homo sapiens
MEGNQTVLHPPPSNTKQGERKPPKVFAFDYCFWSMDESNTTKYAGQEVVFKCLGEGILEKAFQGYNACIFAYGQTGSGKSFSMMGHAEQLGLIPRLCCALFKRISLEQNESQTFKVEVSYMEIYNEKVRDLLDPKGSRQSLKVREHKVLGPYVDGLSQLAVTSFEDIESLMSEGNKSRTVAATNMNEESSRSHAVFNIIITQTLYDLQSGNSGEKVSKVSLVDLAGSERVSKTGAAGERLKEGSNINKSLTTLGLVISSLADQAAGKGKSKFVPYRDSVLTWLLKDNLGGNSQTSMIATISPAADNYEETLSTLRYADRAKRIVNHAVVNEDPNAKVIRELREEVEKLREQLSQAEAMKAPELKEKLEESEKLIKELTVTWEEKLRKTEEIAQERQRQLESMGISLEMSGIKVGDDKCYLVNLNADPALNELLVYYLKDHTRVGADTSQDIQLFGIGIQPQHCEIDIASDGDVTLTPKENARSCVNGTLVCSTTQLWHGDRILWGNNHFFRINLPKRKRRDWLKDFEKETGPPEHDLDAASEASSEPDYNYEFAQMEVIMKTLNSNDPVQNVVQVLEKQYLEEKRSALEEQRLMYERELEQLRQQLSPDRQPQSSGPDRLAYSSQTAQQKVTQWAEERDELFRQSLAKLREQLVKANTLVREANFLAEEMSKLTDYQVTLQIPAANLSANRKRGAIVSEPAIQVRRKGKSTQVWTIEKLENKLIDMRDLYQEWKEKVPEAKRLYGKRGDPFYEAQENHNLIGVANVFLECLFCDVKLQYAVPIISQQGEVAGRLHVEVMRVTGAVPERVVEDDSSENSSESGSLEVVDSSGEIIHRVKKLTCRVKIKEATGLPLNLSNFVFCQYTFWDQCESTVAAPVVDPEVPSPQSKDAQYTVTFSHCKDYVVNVTEEFLEFISDGALAIEVWGHRCAGNGSSIWEVDSLHAKTRTLHDRWNEVTRRIEMWISILELNELGEYAAVELHQAKDVNTGGIFQLRQGHSRRVQVTVKPVQHSGTLPLMVEAILSVSIGCVTARSTKLQRGLDSYQEEDLNCVRERWSDALIKRREYLDEQIKKVSNKTEKTEDDVEREAQLVEQWVGLTEERNAVLVPAPGSGIPGAPADWIPPPGMETHIPVLFLDLNADDLSANEQLVGPHASGVNSILPKEHGSQFFYLPIIKHSDDEVSATASWDSSVHDSVHLNRVTPQNERIYLIVKTTVQLSHPAAMELVLRKRIAANIYNKQSFTQSLKRRISLKNIFYSCGVTYEIVSNIPKATEEIEDRETLALLAARSENEGTSDGETYIEKYTRGVLQVENILSLERLRQAVTVKEALSTKARHIRRSLSTPNVHNVSSSRPDLSGFDEDDKGWPENQLDMSDYSSSYQDVACYGTLPRDSPRRNKEGCTSETPHALTVSPFKAFSPQPPKFFKPLMPVKEEHKKRIALEARPLLSQEDSEEEENELEAINRKLISSQPYVPVEFADFSVYNASLENREWFSSKVDLSNSRVLEKEVSRSPTTSSITSGYFSHSASNATLSDMVVPSSDSSDQLAIQTKDADSTEHSTPSLVHDFRPSSNKELTEVEKGLVKDKIIVVPLKENSALAKGSPSSQSIPEKNSKSLCRTGSCSELDACPSKISQPARGFCPREVTVEHTTNILEDHSFTEFMGVSEGKDFDGLTDSSAGELSSRRSLPNKTGGKTVSDGLHHPSQLHSKLENDQGGTTSR

SEQ ID NO: 46091 - protein, 1741 aa, Homo sapiens
MEGNQTVLHPPPSNTKQGERKPPKVFAFDYCFWSMDESNTTKYAGQEVVFKCLGEGILEKAFQGYNACIFAYGQTGSGKSFSMMGHAEQLGLIPRLCCALFKRISLEQNESQTFKVEVSYMEIYNEKVRDLLDPKGSRQSLKVREHKVLGPYVDGLSQLAVTSFEDIESLMSEGNKSRTVAATNMNEESSRSHAVFNIIITQTLYDLQSGNSGEKVSKVSLVDLAGSERVSKTGAAGERLKEGSNINKSLTTLGLVISSLADQAAGKGKSKFVPYRDSVLTWLLKDNLGGNSQTSMIATISPAADNYEETLSTLRYADRAKRIVNHAVVNEDPNAKVIRELREEVEKLREQLSQAEAMKAPELKEKLEESEKLIKELTVTWEEKLRKTEEIAQERQRQLESMGISLEMSGIKVGDDKCYLVNLNADPALNELLVYYLKDHTRVGADTSQDIQLFGIGIQPQHCEIDIASDGDVTLTPKENARSCVNGTLVCSTTQLWHGDRILWGNNHFFRINLPKRKRRDWLKDFEKETGPPEHDLDAASEASSEPDYNYEFAQMEVIMKTLNSNDPVQNVVQVLEKQYLEEKRSALEEQRLMYERELEQLRQQLSPDRQPQSSGPDRLAYSSQTAQQKVTQWAEERDELFRQSLAKLREQLVKANTLVREANFLAEEMSKLTDYQVTLQIPAANLSANRKRGAIVSEPAIQVRRKGKSTQVWTIEKLENKLIDMRDLYQEWKEKVPEAKRLYGKRGDPFYEAQENHNLIGVANVFLECLFCDVKLQYAVPIISQQGEVAGRLHVEVMRVTGAVPERVVEDDSSENSSESGSLEVVDSSGEIIHRVKKLTCRVKIKEATGLPLNLSNFVFCQYTFWDQCESTVAAPVVDPEVPSPQSKDAQYTVTFSHCKDYVVNVTEEFLEFISDGALAIEVWGHRCAGNGSSIWEVDSLHAKTRTLHDRWNEVTRRIEMWISILELNELGEYAAVELHQAKDVNTGGIFQLRQGHSRRVQVTVKPVQHSGTLPLMVEAILSVSIGCVTARSTKLQRGLDSYQRDDEDGDDMDSYQEEDLNCVRERWSDALIKRREYLDEQIKKVSNKTEKTEDDVEREAQLVEQWVGLTEERNAVLVPAPGSGIPGAPADWIPPPGMETHIPVLFLDLNADDLSANEQLVGPHASGVNSILPKEHGSQFFYLPIIKHSDDEVSATASWDSSVHDSVHLNRVTPQNERIYLIVKTTVQLSHPAAMELVLRKRIAANIYNKQSFTQSLKRRISLKNIFYSCGVTYEIVSNIPKATEEIEDRETLALLAARSENEGTSDGETYIEKYTRGVLQVENILSLERLRQAVTVKEALSTKARHIRRSLSTPNVHNVSSSRPDLSGFDEDDKGWPENQLDMSDYSSSYQDVACYGTLPRDSPRRNKEGCTSETPHALTVSPFKAFSPQPPKFFKPLMPVKEEHKKRIALEARPLLSQEDSEEEENELEAINRKLISSQPYVPVEFADFSVYNASLENREWFSSKVDLSNSRVLEKEVSRSPTTSSITSGYFSHSASNATLSDMVVPSSDSSDQLAIQTKDADSTEHSTPSLVHDFRPSSNKELTEVEKGLVKDKIIVVPLKENSALAKGSPSSQSIPEKNSKSLCRTGSCSELDACPSKISQPARGFCPREVTVEHTTNILEDHSFTEFMGVSEGKDFDGLTDSSAGELSSRRSLPNKTGGKTVSDGLHHPSQLHSKLENDQVIIPEAAFWVLCCQ

SEQ ID NO: 46092 - protein, 292 aa, Homo sapiens
MTAENPTPGDLAPAPLITCKLCLCEQSLDKMTTLQECQCIFCTACLKQYMQLAIREGCGSPITCPDMVCLNHGTLQEAEIACLVPVDQFQLYQRLKFEREVHLDPYRTWCPVADCQTVCPVASSDPGQPVLVECPSCHLKFCSCCKDAWHAEVSCRDSQPIVLPTEHRALFGTDAEAPIKQCPVCRVYIERNEGCAQMMCKNCKHTFCWYCLQNLDNDIFLRHYDKGPCRNKLGHSRASVMWNRTQVVGILVGLGIIALVTSPLLLLASPCIICCVCKSCRGKKKKHDPSTT

SEQ ID NO: 46093 - protein, 309 aa, Homo sapiens [sequence omitted]

SEQ ID NO: 46094 - protein, 130 aa, Homo sapiens
MRRDVIGCTQEMDFILWPRNDIEKIVCLLFSRWKESDEPFRPVQAKFEFHHGDYEKQFLHVLSRKDKTGIVVNNPNQSVFLFIDRQHLQTPKNKATIFKLCSICLYLPQEQLTHWAVGTIEDHLRPYMPE

SEQ ID NO: 46095 - protein, 46 aa, Homo sapiens
MALQEACEAYLVGLFEDTNLCAIHAKRVTIMPKDIQLARRIRGERA

SEQ ID NO: 46096 - protein, 4 aa, Homo sapiens
MENY

SEQ ID NO: 46097 - protein, 326 aa, Homo sapiens
MVTTAVIIRDKSVRNMSCSINNTLLGQKKESVIFIPESFMPSVSPCAVALPIIVVILMIPIAVCIYWINKLQKEKKILSGEKEFERETREIALKELEKERVQKEEELQVKEKLQEELRWRRTFLHAVDVVLDPDTAHPDLFLSEDRRSVRRCPFRHLGESVPDNPERFDSQPCVLGRESFASGKHYWEVEVENVIEWTVGVCRDSVERKGEVLLIPQNGFWTLEMHKGQYRAVSSPDRILPLKESLCRVGVFLDYEAGDVSFYNMRDRSHIYTCPRSAFSVPVRPFFRLGCEDSPIFICPALTGANGVTVPEEGLTLHRVGTHQSL

SEQ ID NO: 46098 - protein, 116 aa, Homo sapiens [sequence omitted]

SEQ ID NO: 46099 - protein, 240 aa, Homo sapiens
MVPLAEQTPLTLQSQPKEPQLTCDSAQKCHSIGETDEVTKTEDRELVLRKDCPKIVEPHGKMFNEQTWEVSQQDPSHGEVGEHKDRIERQWGNLLGEGQHKCDECGKSFTQSSGLIRHQRIHTGERPYECNECGKAFSRSSGLFNHRGIHNIQKRYHCKECGKVFSQSAGLIQHQRIHKGEKPYQCSQCSKSYSRRSFLIEHQRSHTGERPHQCIECGKSFNRHCNLIRHQKIHTVAELV

SEQ ID NO: 46100 - protein, 594 aa, Homo sapiens
MDQDEPLEVKIEEEKYTTRQDWDLRKNNTHSREVFRQYFRQFCYQETSGPREALSRLRELCHQWLRPETHTKEQILELLVLEQFLTILPEELQAWVQEQHPESGEEVVTVLEDLERELDEPGEQVSVHTGEQEMFLQETVRLRKEGEPSMSLQSMKAQPKYESPELESQQEQVLDVETGNEYGNLKQEVSEEMEPHGKTSSKFENDMSKSARCGETREPEEITEEPSACSREDKQPTCDENGVSLTENSDHTEHQRICPGEESYGCDDCGKAFSQHSHLIEHQRIHTGDRPYKCEECGKAFRGRTVLIRHKIIHTGEKPYKCNECGKAFGRWSALNQHQRLHTGEKHYHCNDCGKAFSQKAGLFHHIKIHTRDKPYQCTQCNKSFSRRSILTQHQGVHTGAKPYECNECGKAFVYNSSLVSHQEIHHKEKCYQCKECGKSFSQSGLIQHQRIHTGEKPYKCDVCEKAFIQRTSLTEHQRIHTGERPYKCDKCGKAFTQRSVLTEHQRIHTGERPYKCDECGNAFRGITSLIQHQRIHTGEKPYQCDECGKAFRQRKKTSYKEILLKNHSEPQAGVNLLLSSLIPEWQSCFRRDL

SEQ ID NO: 46101 - protein, 377 aa, Homo sapiens
MEPREPWVEQEGPQYWEWTTGYAKANAQTDRVALRNLLRRYNQSEAGSHTLQGMNGCDMGPDGRLLRGYHQHAYDGKDYISLNEDLRSWTAADTVAQITQRFYEAEEYAEEFRTYLEGECLELLRRYLENGKETLQRADPPKAHVAHHPISDHEATLRCWALGFYPAEITLTWQRDGEEQTQDTELVETRPAGDGTFQKWAAVVVPPGEEQRYTCHVQHEGLPQPLILRWEQSPQPTIPIVGIVAGLVVLGAVVTGAVVAAVMWRKKSSDRNRGSYSQAAAYSVVSGNLMITWWSSLFLLGVLFQGYLGCLRSHSVLGRRKVGDMWILFFLWLWTSFNTAFLALQSLRFGFGFRRGRSFLLRSWHHLMKRVQIKIFD

SEQ ID NO: 46102 - protein, 218 aa, Homo sapiens
MAPRTLLLLLSGALALTLTQTWARSHSMRYFYTTMSRPGRGEPRFISVGYVDDTQFVRFDSDDASPREEPRAPWMEREGPEYWDRNTQICKAQAQTERENLRIALRYYNQSEGGSHTMQVMYGCDVGPDGRFLRGYEQHAYDGKDYIALNEDLRSWTAADMAAQITKRKWEAARRAEQLRAYLEGEFVEWLRRYLENGKETLQRADPPQDTYDPPPHL

SEQ ID NO: 46103 - protein, 123 aa, Homo sapiens
MDLANTCSSFQSDLDFCSDCGSVLPLPGAQDTVTCIRCGFNINVRDFEGKVVKTSVVFHQLGTAMPMSVEEGPECQGPVVDRRCPRCGHEGMAYHTRQMRSADEGQTVFYTCTNCKFQEKEDS

SEQ ID NO: 46104 - protein, 39 aa, Homo sapiens
MGPIIMTSVQGTVCRNVIEIQVRASLPFSLQKQNQDNLS

SEQ ID NO: 46105 - protein, 748 aa, Homo sapiens
MERLKKLSVPTSDEEDEVPAPKPRGGKKTKGGNVFAALIQDQSEEEEEEEKHPPKPAKPEKNRINKAVSEEQQPALKGKKGKEEKSKGKAKPQNKFAALDNEEEDKEEEIIKEKEPPKQGKEKAKKAEQGSEEEGEGEEEEEEGGESKADDPYAHLSKKEKKKLKKQMEYERQVASLKAANAAENDFSVSQAEMSSRQAMLENASDIKLEKFSISAHGKELFVNADLYIVAGRRYGLVGPNGKGKTTLLKHIANRALSIPPNIDVLLCEQEVVADETPAVQAVLRADTKRLKLLEEERRLQGQLEQGDDTAAERLEKVYEELRATGAAAAEAKARRILAGLGFDPEMQNRPTQKFSGGWRMRVSLARALFMEPTLLMLDEPTNHLDLNAVIWLNNYLQGWRKTLLIVSHDQGFLDDVCTDIIHLDAQRLHYYRGNYMTFKKMYQQKQKELLKQYEKQEKKLKELKAGGKSTKQAEKQTKEALTRKQQKCRRKNQDEESQEAPELLKRPKEYTVRFTFPDPPPLSPPVLGLHGVTFGYQGQKPLFKNLDFGIDMDSRICIVGPNGVGKSTLLLLLTGKLTPTHGEMRKNHRLKIGFFNQQYAEQLRMEETPTEYLQRGFNLPYQDARKCLGRFGLESHAHTIQICKLSGGQKARVVFAELACREPDVLILDEPTNNLDIESIDALGEAINEYKGAVIVVSHDARLITETNCQLWVVEEQSVSQIDGDFEDYKREVLEALGEVMVSRPRE

SEQ ID NO: 46106 - protein, 903 aa, Homo sapiens
MKEARKMVSRCTYLNILLQTRSPEILVKFIDVGGYKLLNNWLTYSKTTNNIPLLQQILLTLQHLPLTVDHLKQNNTAKLVKQLSKSSEDEELRKLASVLVSDWMAVIRSQSSTQPAEKDKKKRKDEGKSRTTLPERPLTEVKAETRAEEAPEKKREKPKSLRTTAPSHAKFRSTGLELETPSLVPVKKNASTVVVSDKYNLKPIPLKRQSNVAAPGDATPPAEKKYKPLNTTPNATKEIKVKIIPPQPMEGLGFLDALNSAPVPGIKIKKKKKVLSPTAAKPSPFEGKTSTEPSTAKPSSPEPAPPSEAMDADRPGTPVPPVEVPELMDTASLEPGALDAKPVESPGDPNQLTRKGRKRKSVTWPEEGKLREYFYFELDETERVNVNKIKDFGEAAKREILSDRHAFETARRLSHDNMEEKVPWVCPRPLVLPSPLVTPGSNSQERYIQAEREKGILQELFLNKESPHEPDPEPYEPIPPKLIPLDEECSMDETPYVETLEPGGSGGSPDGAGGSKLPPVLANLMGSMGAGKGPQGPGGGGINVQEILTSIMGSPNSHPSEELLKQPDYSDKIKQMLVPHGLLGPGPIANGFPPGGPGGPKGMQHFPPGPGGPMPGPHGGPGGPVGPRLLGPPPPPRGGDPFWDGPGDPMRGGPMRGGPGPGPGPYHRGRGGRGGNEPPPPPPPFRGARGGRSGGGPPNGRGGPGGGMVGGGGHRPHEGPGGGMGNSSGHRPHEGPGGGMGSGHRPHEGPGGSMGGGGGHRPHEGPGGGISGGSGHRPHEGPGGGMGAGGGHRPHEGPGGSMGGSGGHRPHEGPGHGGPHGHRPHDVPGHRGHDHRGPPPHEHRGHDGPGHGGGGHRGHDGGHSHGGDMSNRPVCRHFMMKGNCRYENNCAFYHPGVNGPPLP

SEQ ID NO: 46107 - protein, 742 aa, Homo sapiens
MPKETRGQPARAVDLVEEESGAPGEEQRRWEEARLGAASLKFGARDAASQEPKYQLVLEEEETIEFVRATQLQGDEEPSAPPTSTQAQQKESIQAVRRSLPVFPFREELLAAIANHQVLIIEGETGSGKTTQIPQYLFEEGYTNKGMKIACTQPRRVAAMSVAARVAREMGVKLGNEVGYSIRFEDCTSERTVLRYMTDGMLLREFLSEPDLASYSVVMVDEAHERTLHTDILFGLIKDVARFRPELKVLVASATMDTARFSTFFDDAPVFRIPGRRFPVDIFYTKAPEADYLEACVVSVLQIHVTQPPGDILVFLTGQEEIEAACEMLQDRCRRLGSKIRELLVLPIYANLPSDMQARIFQPTPPGARKVVVATNIAETSLTIEGIIYVLDPGFCKQKSYNPRTGMESLTVTPCSKASANQRAGRAGRVAAGKCFRLYTAWAYQHELEETTVPEIQRTSLGNVVLLLKSLGIHDLMHFDFLDPPPYETLLLALEQLYALGALNHLGELTTSGRKMAELPVDPMLSKMILASEKYSCSEEILTVAAMLSVNNSIFYRPKDKVVHADNARVNFFLPGGDHLVLLNVYTQWAESGYSSQWCYENFVQFRSMRRARDVREQLEGLLERVEVGLSSCQGDYIRVRKAITAGYFYHTARLTRSGYRTVKQQQTVFIHPNSSLFEQQPRWLLYHELVLTTKEFMRQVLEIESSWLLEVAPHYYKAKELEDPHAKKMPKKIGKTREELG

SEQ ID NO: 46108 - protein, 183 aa, Homo sapiens
MAAERVKAWTSRYFGVLQRSLYVACTALALQLVMRYWEPIPKGPVLWEARAEPWATWVPLLCFVLHVISWLLIFSILLVFDYAELMGLKQVYYHVLGLGEPLALKSPRALRLFSHLRHPVCVELLTVLWVVPTLGTDRLLLAFLLTLYLGLAHGLDQQDLRYLRAQLQRKLHLLSRPQDGEAE

SEQ ID NO: 46109 - protein, 417 aa, Homo sapiens [sequence omitted]

SEQ ID NO: 46110 - protein, 406 aa, Homo sapiens
MRMLFLEQPLPQAAVALWVKKEFSKAQEESTGLLSGLRIWHTQLLPGGLQGLILNPIFRQNLRIALLGGGKAWSDDTSQLGPDKHARDVPSLDKYAEERWEVVLHFMVGSPSAAVSQDLAQLLSQAGLMKSTEPGEPPCITSAGFQFLLLDTPAQLWYFMLQYLQTAQSRGMDLVEILSFLFQLSFSTLGKDYSVEGMSDSLLNFLQHLREFGLVFQRKRKSRRYYPTRLAINLSSGVSGAGGTVHQPGFIVVETNYRLYAYTESELQIALIALFSEMLYRFPNMVVAQVTRESVQQAIASGITAQQIIHFLRTRAHPVMLKQTPVLPPTITDQIRLWELERDRLRFTEGVLYNQFLSQVDFELLLAHARELGVLVFENSAKRLMVVTPAGHSDVKRFWKRQKHSS

SEQ ID NO: 46111 - protein, 35 aa, Homo sapiens
MPSPGVMTGGSAWKTTAAKVLWSIMSDSQEVTGWN

SEQ ID NO: 46112 - protein, 359 aa, Homo sapiens
MAPRTVLLLLSAALALTETWAGSHSMRYFYTSVSRPGRGEPRFISVGYVDDTQFVRFDSDAASPREEPRAPWIEQEGPEYWDRNTQIYKAQAQTDRESLRNLRGYYNQSEAGSHTLQSMYGCDVGPDGRLLRGHDQYAYDGKDYIALNEDLRSWTAADTAAQITQRKWEAAREAEQRRAYLEGECVEWLRRYLENGKDKLERADPPKTHVTHHPISDHEATLRCWALGFYPAEITLTWQRDGEDQTQDTELVETRPAGDRTFQKWAAVVVPSGEEQRYTCHVQHEGLPKPLTLRWEPSSQSTVPIVGIVAGLAVLAVVVIGAVVAAVMCRRKSSGGKGGSYSQAACSDSAQGSDVSLTA

SEQ ID NO: 46113 - protein, 221 aa, Homo sapiens
MNVTNFWKEDAMKTKTHYRAMQADCLQKLQRYLKSGVAIRRTVPPMVNVTCSEVSEGNITVTCRASSFYPRNITLTWRQDGVSLSHNTQQWGDVLPDGNGTYQTWVATRIRQGEEQRFTCYMEHSGNHGTHPVPSGKALVLQSQRTDFPYVSAAMPCFVIIIILCVPCCKKKTSAAEGPELVSLQVLDQHPVGTGDHRDAAQLGFQPLMSATGSTGSTEGT

SEQ ID NO: 46114 - protein, 23 aa, Homo sapiens
MACRVSGKLPLPGVCHLQPTFQA

SEQ ID NO: 46115 - protein, 108 aa, Homo sapiens [sequence omitted]

SEQ ID NO: 46116 - protein, 210 aa, Homo sapiens
MVLWLKGVTFNVTTVDTKRRTETVQKLCPGGQLPFLLYGTEVHTDTNKIEEFLEAVLCPPRYPKLAALNPESNTAGLDIFAKFSAYIKNSNPALNDNLEKGLLKALKVLDNYLTSPLPEEVDETSAEDEGVSQRKFLDGNELTLADCNLLPKLHIVQVVCKKYRGFTIPEAFRGVHRYLSNAYAREEFASTCPDDEEIELAYEQVAKALK

SEQ ID NO: 46117 - protein, 42 aa, Homo sapiens
MLSVKNCFIRGSVVRYVQLPADEVDTQLLQDAARKEALQQKQ

SEQ ID NO: 46118 - protein, 518 aa, Homo sapiens
MVLTKLKETAEAFLGHPVTNAVITVPAYFNDSQRQATKDAGVIAGLNVLRIINEPTAAAIAYGLDKGGQGERHVLIFDLGGGTFDVSILTIDDGIFEVKATAGDTHLGGEDFDNRLVSHFVEEFKRKHKKDISQNKRAVRRLRTACERAKRTLSSSTQANLEIDSLYEGIDFYTSITRARFEELCADLFRGTLEPVEKALRDAKMDKAKIHDIVLVGGSTRIPKVQRLLQDYFNGRDLNKSINPDEAVAYGAAVQAAILMGDKSEKVQDLLLLDVAPLSLGLETAGGVMTALIKRNSTIPTKQTQIFTTYSDNQPGVLIQVYEGERAMTKDNNLLGRFDLTGIPPAPRGVPQIEVTFDIDANGILNVTATDKSTGKVNKITITNDKGRLSKEEIERMVLDAEKYKAEDEVQREKIAAKNALESYAFNMKSVVSDEGLKGKISESDKNKILDKCNELLSWLEVNQLAEKDEFDHKRKELEQMCNPIITKLYQGGCTGPACGTGYVPGRPATGPTIEEVD

SEQ ID NO: 46119 - protein, 51 aa, Homo sapiens
MRVVMARLLSEGEQGIPTACAAFAQQPAGGHVAAWLGSCKTFIAVLSLSKE

SEQ ID NO: 46120 - protein, 1190 aa, Homo sapiens
MGALLLEKETRGATERVHGSLGDTPRSEETLPKATPDSLEPAGPSSPASVTVTVGDEGADTPVGATPLIGDESENLEGDGDLRGGRILLGHATKSFPSSPSKGGSCPSRAKMSMTGAGKSPPSVQSLAMRLLSMPGAQGAAAAGSEPPPATTSPEGQPKVHRARKTMSKPGNGQPPVPEKRPPEIQHFRMSDDVHSLGKVTSDLAKRRKLNSGGGLSEELGSARRSGEVTLTKGDPGSLEEWETVVGDDFSLYYDSYSVDERVDSDSKSEVEALTEQLSEEEEEEEEEEEEEEEEEEEEEEEEDEESGNQSDRSGSSGRRKAKKKWRKDSPWVKPSRKRRKREPPRAKEPRGVNGVGSSGPSEYMEVPLGSLELPSEGTLSPNHAGVSNDTSSLETERGFEELPLCSCRMEAPKIDRISERAGHKCMATESVDGELSGCNAAILKRETMRPSSRVALMVLCETHRARMVKHHCCPGCGYFCTAGTFLECHPDFRVAHRFHKACVSQLNGMVFCPHCGEDASEAQEVTIPRGDGVTPPAGTAAPAPPPLSQDVPGRADTSQPSARMRGHGEPRRPPCDPLADTIDSSGPSLTLPNGGCLSAVGLPLGPGREALEKALVIQESERRKKLRFHPRQLYLSVKQGELQKVILMLLDNLDPNFQSDQQSKRTPLHAAAQKGSVEICHVLLQAGANINAVDKQQRTPLMEAVVNNHLEVARYMVQRGGCVYSKEEDGSTCLHHAAKIGNLEMVSLLLSTGQVDVNAQDSGGWTPIIWAAEHKHIEVIRMLLTRGADVTLTDNEENICLHWASFTGSAAIAEVLLNARCDLHAVNYHGDTPLHIAARESYHDCVLLFLSRGANPELRNKEGDTAWDLTPERSDVWFALQLNRKLRLGVGNRAIRTEKIICRDVARGYENVPIPCVNGVDGEPCPEDYKYISENCETSTMNIDRNITHLQHCTCVDDCSSSNCLCGQLSIRCWYDKDGRLLQEFNKIEPPLIFECNQACSCWRNCKNRVVQSGIKVRLQLYRTAKMGWGVRALQTIPQGTFICEYVGELISDAEADVREDDSYLFDLDNKDGEVYCIDARYYGNISRFINHLCDPNIIPVRVFMLHQDLRFPRIAFFSSRDIRTGEELGFDYGDRFWDIKSKYFTCQCGSEKCKHSAEAIALEQSRLARLDPHPELLPELGSLPPVNT

SEQ ID NO: 46121 - protein, 1262 aa, Homo sapiens
MVLFCLLFLYPGLADSAPSCPQNVNISGGTFTLSHGWAPGSLLTYSCPQGLYPSPASRLCKSSGQWQTPGATRSLSKAVCKPGHCPNPGISLGAVRTGFRFGHGDKVRYRCSSNLVLTGSSERECQGNGVWSGTEPICRQPYSYDFPEDVAPALGTSFSHMLGATNPTQKTKDHENGTGTNTYAALNSVYLMMNNQMRLLGMETMAWQEIRHAIILLTDGKSNMGGSPKTAVDHIREILNINQKRNDYLDIYAIGVGKLDVDWRELNELGSKKDGERHAFILQDTKALHQVFEHMLDVSKLTDTICGVGNMSANASDQERTPWHVTIKPKSQETCRGALISDQWVLTAAHCFRDGNDHSLWRVNVGDPKSQWGKEFLIEKAVISPGFDVFAKKNQGILEFYGDDIALLKLAQKVKMSTHARPICLPCTMEANLALRRPQGSTCRDHENELLNKQSVPAHFVALNGSKLNINLKMGVEWTSCAEVVSQEKTMFPNLTDVREVVTDQFLCSGTQEDESPCKGVTTTPWSLARPQGSCSLEGVEIKGGSFRLLQEGQALEYVCPSGFYPYPVQTRTCRSTGSWSTLKTQDQKTVRKAECRAIHCPRPHDFENGEYWPRSPYYNVSDEISFHCYDGYTLRGSANRTCQVNGRWSGQTAICDNGAGYCSNPGIPIGTRKVGSQYRLEDSVTYHCSRGLTLRGSQRRTCQEGGSWSGTEPSCQDSFMYDTPQEVAEAFLSSLTETIEGVDAEDGHGPGEQQKRKIVLDPSGSMNIYLVLDGSDSIGASNFTGAKKCLVNLIEKVASYGVKPRYGLVTYATYPKIWVKVSEADSSNADWVTKQLNEINYEDHKLKSGTNTKKALQAVYSMMSWPDDVPPEGWNRTRHVIILMTDGLHNMGGDPITVIDEIRDLLYIGKDRKNPREDYLDVYVFGVGPLVNQVNINALASKKDNEQHVFKVKDMENLEDVFYQMIDESQSLSLCGMVWEHRKGTDYHKQPWQAKISVIRPSKGHESCMGAVVSEYFVLTAAHCFTVDDKEHSIKVSVGGEKRDLEIEVVLFHPNYNINGKKEAGIPEFYDYDVALIKLKNKLKYGQTIRPICLPCTEGTTRALRLPPTTTCQQQKEELLPAQDIKALFVSEEEKKLTRKEVYIKNGDKKGSCERDAQYAPGYDKVKDISEVVTPRFLCTGGVSPYADPNTCRGDSGGPLIVHKRSRFIQVGVISWGVVDVCKNQKRQKQVPAHARDFHINLFQVLPWLKEKLQDEDLGFL

SEQ ID NO: 46122 - protein, 980 aa, Homo sapiens
MWDGETAVCDNGDHENGTGTNTYAALNSVYLMMNNQMRLLGMETMAWQEIRHAIILLTDGKSNMGGSPKTAVDHIREILNINQKRNDYLDVSKLTDTICGVGNMSANASDQERTPWHVTIKPKSQETCRGALISDQWVLTAAHCFRDGNDHSLWRVNVGDPKSQWGKEFLIEKAVISPGFDVFAKKNQGILEFYGDDIALLKLAQKVKMSTHARPICLPCTMEANLALRRPQGSTCRDHENELLNKQSVPAHFVALNGSKLNINLKMGVEWTSCAEVVSQEKTMFPNLTDVREVVTDQFLCSGTQEDESPCKGGSAIHCPRPHDFENGEYWPRSPYYNVSDEISFHCYDGYTLRGSANRTCQVNGRWSGQTAICDNGAGYCSNPGIPIGTRKVGSQYRLEDSVTYHCSRGLTLRGSQRRTCQEGGSWSGTEPSCQDSFMYDTPQEVAEAFLSSLTETIEGVDAEDGHGPGEQQKRKIVLDPSGSMNIYLVLDGSDSIGASNFTGAKKCLVNLIEKVASYGVKPRYGLVTYATYPKIWVKVSEADSSNADWVTKQLNEINYEDHKLKSGTNTKKALQAVYSMMSWPDDVPPEGWNRTRHVIILMTDGLHNMGGDPITVIDEIRDLLYIGKDRKNPREDYLDVYVFGVGPLVNQVNINALASKKDNEQHVFKVKDMENLEDVFYQMIDESQSLSLCGMVWEHRKGTDYHKQPWQAKISVIRPSKGHESCMGAVVSEYFVLTAAHCFTVDDKEHSIKVSVGGEKRDLEIEVVLFHPNYNINGKKEAGIPEFYDYDVALIKLKNKLKYGQTIRPICLPCTEGTTRALRLPPTTTCQQQKEELLPAQDIKALFVSEEEKKLTRKEVYIKNGDKKGSCERDAQYAPGYDKVKDISEVVTPRFLCTGGVSPYADPNTCRGDSGGPLIVHKRSRFIQVGVISWGVVDVCKNQKRQKQVPAHARDFHINLFQVLPWLKEKLQDEDLGFL

SEQ ID NO: 46123 - protein, 254 aa, Homo sapiens
MSWKRHHLIPETFGVKRRRKRGPVESDPLRGEPGSARAAVSELMQLFPRGLFEDALPPIVLRSQVYSLVPDRTVADRQLKELQEQGEIRIVQLGFDLDAHGIIFTEDYRTRVLKACDGRPYAGAVQKFLASVLPACGDLSFQQDQMTQTFGFRDSEITHLVNAGVLTVRDAGSWWLAVPGAGRFIKYFVKGRQAVLSMVRKAKYRELLLSELLGRRAPVVVRLGLTYHVHDLIGAQLVDCISTTSGTLLRLPET

SEQ ID NO: 46124 - protein, 637 aa, Homo sapiens [sequence omitted]

SEQ ID NO: 46125 - protein, 561 aa, Homo sapiens
MDVSPSEPPWELLPIFPDLQVKSEPSSPCSSSSLSSESSRLSTEPSSEALGVGEVLHVKTESLAPPLCLLGDDPTSSFETVQINVIPTSDDSSDVQTKIEPVSPCSSVNSEASLLSADSSSQAFIGEEVLEVKTESLSPSGCLLWDVPAPSLGAVQISMGPSLDGSSGKALPTRKPPLQPKPVVLTTVPMPSRAVPPSTTVLLQSLVQPPPVSPVVLIQGAIRVQPEGPAPSLPRPERKSIVPAPMPGNSCPPEVDAKLLKRQQRMIKNRESACQSRRKKKEYLQGLEARLQAVLADNQQLRRENAALRRRLEALLAENSELKLGSGNRKVVCIMVFLLFIAFNFGPVSISEPPSAPISPRMNKGEPQPRRHLLGFSEQEPVQGVEPLQGSSQGPKEPQPSPTDQPSFSNLTAFPGGAKELLLRDLDQLFLSSDCRHFNRTESLRLADELSGWVQRHQRGRRKIPQRAQERQSLDTSPSRSLSHGRSHLQLRQSPSNPLDPQKGILWASCNYIATQTVRSQHSWMQLTDGKTHFMLSLSEGTTCCSQPSATTRPPGPRCPW

SEQ ID NO: 46126 - protein, 179 aa, Homo sapiens
MDDHNVDSFISLSSPQMGQYGDTDYLKWLFPTSMRSNLYRICYSPWGQEFSICNYWHDPHHDDLYLNASSFLALINGERDHPNATVWRKNFLRVGHLVLIGGPDDGVITPWQSSFFGFYDANETVLEMEEQLVYLRDSFGLKTLLARGAIVRCPMAGISHTAWHSNRTLYETCIEPWLS

SEQ ID NO: 46127 - protein, 287 aa, Homo sapiens
MVARMDLWPGAWMLLLLLFLLLLFLLPTLWFCSPSAKYFFKMAFYNGWILFLAVLAIPVCAVRGRNVENMKILRLMLLHIKYLYGIRVEVRGAHHFPPSQPYVVVSNHQSSLDLLGMMEVLPGRCVPIAKRELLWAGSAGLACWLAGVIFIDRKRTGDAISVMSEVAQTLLTQDVRVWVFPEGTRNHNGSMLPFKRGAFHLAVQAQVPIVPIVMSSYQDFYCKKERRFTSGQCQVRVLPPVPTEGLTPDDVPALADRVRHSMLTVFREISTDGRGGGDYLKKPGGGG

SEQ ID NO: 46128 - protein, 360 aa, Homo sapiens
MCPICLDMLKNTMTTKECLHRFCSDCIVTALRSGNKECPTCRKKLVSKRSLRPDPNFDALISKIYPSREEYEAHQDRVLIRLSRLHNQQALSSSIEEGLRMQAMHRAQRVRRPIPGSDQTTTMSGGEGEPGEGEGDGEDVSSDSAPDSAPGPAPKRPRGGGAGGSSVGTGGGGTGGVGGGAGSEDSGDRGGTLGGGTLGPPSPPGAPSPPEPGGEIELVFRPHPLLVEKGEYCQTRYVKTTGNATVDHLSKYLALRIALERRQQQEAGEPGGPGGGASDTGGPDGCGGEGGGAGGGDGPEEPALPSLEGVSEKQYTIYIAPGGGAFTTLNGSLTLELVNEKFWKVSRPLELCYAPTKDPK

SEQ ID NO: 46129 - protein, 661 aa, Homo sapiens
MSAFLATHRAFTSTPALLGLMADRLEALESHPTDELERTTEVAISVLSTWLASHPEDFGSEAKGQLDRLESFLLQTGYAAGKGVGGGSADLIRNLRSRVDPQAPDLPKPLALPGDPPADPTDVLVFLADHLAEQLTLLDAELFLNLIPSQCLGGLWGHRDRPGHSHLCPSVRATVTQFNKVAGAVVSSVLGATSTGEGPGEVTIRPLRPPQRARLLEKWIRVAEECRLLRNFSSVYAVVSALQSSPIHRLRAAWGEATRDSLRVFSSLCQIFSEEDNYSQSRELLVQEVKLQSPLEPHSKKAPRSGSRGGGVVPYLGTFLKDLVMLDAASKDELENGYINFDKRRKEFAVLSELRRLQNECRGYNLQPDHDIQRWLQGLRPLTEAQSHRVSCEVEPPGSSDPPAPRVLRPTLVISQWTEVLGSVGVPTPLVSCDRPSTGGDEAPTTPAPLLTRLAQHMKWPSVSSLDSALESSPSLHSPADPSHLSPPASSPRPSRGHRRSASCGSPLSGGAEEASGGTGYGGEGSGPGASDCRIIRVQMELGEDGSVYKSILVTSQDKAPSVISRVLKKNNRDSAVASEYELVQLLPGERELTIPASANVFYAMDGASHDFLLRQRRRSSTATPGVTSGPSASGTPPSEGGGGSFPRIKATGRKIARALF

SEQ ID NO: 46130 - protein, 324 aa, Homo sapiens
MVSISSPVLSLSSLLRPQPEPQQEPVLITMATVVLTVLTHTPAPRVRLGQDALLDLSFAYMPPTSEAASSLAPGPPPFGLEWRRQHLGKGHLLLAATPGLNGQMPAAQEGAVAFAAWDDDEPWGPWTGNGTFWLPTVQPFQEGTYLATIHLPYLQGQVTLELAVYKPPKVSLMPATLARAAPGEAPPELLCLVSHFYPSGGLEVEWELRGGPGGRSQKAEGQRWLSALRHHSDGSVSLSGHLQPPPVTTEQHGARYACRIHHPSLPASGRSAEVTLEVAGLSGPSLEDSVGLFLSAFLLLGLFKALGWAAVYLSTCKDSKKKAE

SEQ ID NO: 46131 - protein, 429 aa, Homo sapiens
MSQLEEKERRLQTSEAALSSSQAEVASLRQETVAQAALLTEREERLHGLEMERRRLHNQLQELKGNIRVFCRVRPVLPGEPTPPPGLLLFPSGPGGPSDPPTRLSLSRSDERRGTLSGAPAPPTRHDFSFDRVFPPGSGQDEVFEEIAMLVQSALDGYPVCIFAYGQTGSGKTFTMEGGPGGDPQLEGLIPRALRHLFSVAQELSGQGWTYSFVASYVEIYNETVRDLLATGTRKGQGGECEIRRAGPGSEELTVTNARYVPVSCEKEVDALLHLARQNRAVARTAQNERSSRSHSVFQLQISGEHSSRGLQCGAPLSLVDLAGSERLDPGLALGPGERERLRETQAINSSLSTLGLVIMALSNKESHVPYRNSKLTYLLQNSLGGSAKMLMFVNISPLEENVSESLNSLRFASKVNQCVIGTAQANRK

SEQ ID NO: 46132 - protein, 367 aa, Homo sapiens
MLQCRSCLQWFHEACTQCLSKPLLYGDRFYEFECCVCRGGPEKVRRLQLRWVDVAHLVLYHLSVCCKKKYFDFDREILPFTSENWDSLLLGELSDTPKGERSSRLLSALNSHKDRFISGREIKKRKCLFGLHARMPPPVEPPTGDGALTSFPSGQGPGGGVSRPLGKRRRPEPEPLRRRQKGKVEELGPPSAVRNQPEPQEQRERAHLQRALQASVSPPSPSPNQSYQGSSGYNFRPTDARCLPSSPIRMFASFHPSASTAGTSGDSGPPDRSPLELHIGFPTDIPKSAPHSMTASSSSVSSPSPGLPRRSAPPSPLCRSLSPGTGGGVRGGVGYLSRGDPVRVLARRVRPDGSVQYLVEWGGGGIF

SEQ ID NO: 46133 - protein, 152 aa, Homo sapiens
MVTLPLQPSSTMGQVGRQLAIIGDDINRRYDSEFQTMLQHLQPTAENAYEYFTKIATSLFESGINWGRVVALLGFGYRLALHVYQHGLTGFLGQVTRFVVDFMLHHCIARWIAQRGGWVAALNLGNGPILNVLVVLGVVLLGQFVVRRFFKS

SEQ ID NO: 46134 - protein, 106 aa, Homo sapiens
MQILVSSFSEEQLNRYEMYRRSAFPKAAIKRLIQSITGTSVSQNVVIAMSGISKVFVGEVVEEALDVCEKWGEMPPLQPKHMREAVRRLKSKGQIPNSKHKKIIFF

SEQ ID NO: 46135 - protein, 1068 aa, Homo sapiens
MWRGPNVNCVDSTGYTPLHHAALNGHKDVVEVLLRNDALTNVADSKGCYPLHLAAWKGDAQIVRLLIHQGPSHTRVNEQNNDNETALHCAAQYGHTEVVKVLLEELTDPTMRNNKFETPLDLAALYGRLEVVKMLLNAHPNLLSCNTKKHTPLHLAARNGHKAVVQVLLDAGMDSNYQTEMGSALHEAALFGKTDVVQILLAAGTDVNIKDNHGLTALDTVRELPSQKSQQIAALIEDHMTGKRSTKEVDKTPPPQPPLISSMDSISQKSQGDVEKAVTELIIDFDANAEEEGPYEALYNAISCHSLDSMASGRSSDQDSTNKEAEAAGVKPAGVRPRERPPPPAKPPPDEEEEDHIDKKYFPLTASEVLSMRPRIHGSAAREEDEHPYELLLTAETKKVVLVDGKTKDHRRSSSSRSQDSAEGQDGQVPEQFSGLLHGSSPVCEVGQDPFQLLCTAGQSHPDGSPQQGACHKASMQLEETGVHAPGASQPSALDQSKRVGYLTGLPTTNSRSHPETLTHTASPHPGGAEEGDRSGARSRAPPTSKPKAELKLSRSLSKSDSDLLTCSPTEDATMGSRSESLSNCSIGKKRLEKSPSFASEWDEIEKIMSSIGEGIDFSQERQKISGLRTLEQSVGEWLESIGLQQYESKLLLNGFDDVHFLGSNVMEEQDLRDIGISDPQHRRKLLQAARSLPKVKALGYDGNSPPSVPSWLDSLGLQDYVHSFLSSGYSSIDTVKNLWELELVNVLKVQLLGHRKRIIASLADRPYEEPPQKPPRFSQLRCQDLLSQTSSPLSQNDSCTGRSADLLLPPGDTGRRRHDSLHDPAAPSRAERFRIQEEHREAKLTLRPPSLAAPYAPVQSWQHQPEKLIFESCGYEANYLGSMLIKDLRGTESTQDACAKMRKSTEHMKKIPTIILSITYKGVKFIDASNKNVIAEHEIRNISCAAQDPEDLCTFAYITKDLQTSHHYCHVFSTVDVNLTYEIILTLGQAFEVAYQLALQAQKSRATGASAAEMIETKSSKPVPKPRVGVRKSALEPPDMDQDAQSHASVSWVVDPKPDSKRSLSTN

SEQ ID NO: 46136 - protein, 581 aa, Homo sapiens
MLSCNRSGKKDTCALTCPSRARFLPESENGFTVSCGTPSPRAAPARAGHNGNSTNSNHCHEAAVLSIKQRASFKIKDAKCRLHLRNKGKTEEAGRITGPGGAPCSECQVTFIHLKCDSSRKGKGRRARTPPGKEVTRLTLELEAEVRAEETTASCGLPCLRQRMERRLKGSLKMLRKSINQDRFLLRLAGLDYELAHKPGLVAGERAEPMESCRPGQHRAGTKCVSCPQGTYYHGQTEQCVPCPAGTFQEREGQLSCDLCPGSDAHGPLGATNVTTCAGQCPPGQHSVDGFKPCQPCPRGTYQPEAGRTLCFPCGGGLTTKHEGAISFQDCDTKVQCSPGHYYNTSIHRCIRCAMGSYQPDFRQNFCSRCPGNTSTDFDGSTSVAQCKNRQCGGELGEFTGYIESPNYPGNYPAGVECIWNINPPPKRKILIVVPEIFLPSEDECGDVLVMRKNSSPSSITTYETCQTYERPIAFTARSRKLWINFKTSEANSARGFQIPYVTYDEDYEQLVEDIVRDGRLYASENHQEILKDKKLIKAFFEVLAHPQNYFKYTEKHKEMLPKSFIKLLRSKVSSFLRPYK

SEQ ID NO: 46137 - protein, 148 aa, Homo sapiens
MVTEEDGAPQVALITQDGAQQVSLSPEDLQALGSAISMVTQHGSTTLTIPSPDADLATSGTHTVTMVSADGTQTQPVTIITSGAVVAEDSSVASLRHQQVALLATANGTHIAVQLEEQQTLEEAINVATAAMQQGAVTLETTVSESGC

SEQ ID NO: 46138 - protein, 117 aa, Homo sapiens
MTGPAGVAPRGDQPWSSHRRKPLRSGKRRRKRKWQRQKEPQSSMGDHSMHFLPAATQTSPGAPRHPHCWTNCRWAVTGPHAAASTWSAGCAGTRHRASTTVFMHVRGARASSVVRSA

SEQ ID NO: 46139 - protein, 202 aa, Homo sapiens
MEVQRDPDTYSKHLFVHIGQTNPAFSDPPLEAVDVRQIYDKFPEKKGGLKELYEKGPPNAFFLVKFWADLNSTIQEGPGAFYGVSSQYSSADSMTISVSTKVCSFGKQVVEKVETEYARLENGRFVYRIHRSPMCEYMINFIHKLKHLPEKYMMNSVLENFTILQVVTSRDSQETLLVIAFVFEVSTSEHGAQHHVYKLVKD

SEQ ID NO: 46140 - protein, 361 aa, Homo sapiens [sequence omitted]

SEQ ID NO: 46141 - protein, 548 aa, Homo sapiens
MKVVKSAEHYTETALDEIRLLKSVRNSDPNDPNREMVVQLLDDFKISGVNGTHICMVFEVLGHHLLKWIIKSNYQGLPLPCVKKIIQQVLQGLDYLHTKCRIIHTDIKPENILLSVNEQYIRRLAAEATEWQRSGAPPPSGSAVSTAPQPKPADKMSKNKKKKLKKKQKRQAELLEKRMQEIEEMEKESGPGQKRPNKQEESESPVERPLKENPPNKMTQEKLEESSTIGQDQTLMERDTEGGAAEINCNGVIEVINYTQNSNNETLRHKEDLHNANDCDVQNLNQESSFLSSQNGDSSTSQETDSCTPITSEVSDTMVCQSSSTVGQSFSEQHISQLQESIRAEIPCEDEQEQEHNGPLDNKGKSTAGNFLVNPLEPKNAEKLKVKIADLGNACWVHKHFTEDIQTRQYRSLEVLIGSGYNTPADIWSTACMAFELATGDYLFEPHSGEEYTRDEDHIALIIELLGKVPRKLIVAGKYSKEFFTKKGDLKHITKLKPWGLFEVLVEKYEWSQEEAAGFTDFLLPMLELIPEKRATAAECLRHPWLNS

SEQ ID NO: 46142 - protein, 17 aa, Homo sapiens
MVIMGYSGEEICGNESS

SEQ ID NO: 46143 - protein, 287 aa, Homo sapiens
MQHENVIGLLDVFTPASSLRNFYDFYLVMPFMQTDLQKIMGMEFSEEKIQYLVYQMLKGLKYIHSAGVVHRDLKPGNLAVNEDCELKILDFGLARHADAEMTGYVVTRWYRAPEVILSWMHYNQTVDIWSVGCIMAEMLTGKTLFKGKDYLDQLTQILKVTGVPGTEFVQKLNDKAAKSYIQSLPQTPRKDFTQLFPRASPQAADLLEKMLELDVDKRLTAAQALTHPFFEPFRDPEEETEAQQPFDDSLEHEKLTVDEWKQHIYKEIVNFSPIARKDSRRRSGMKL

SEQ ID NO: 46144 - protein, 1085 aa, Homo sapiens [sequence omitted]

SEQ ID NO: 46145 - protein, 348 aa, Homo sapiens
MPLAEDIKGSCFQSGNKRNHEPFIAPERFGNSSVGFGSNSHSQAPEKVTLLVDGTRFVVNPQIFTAHPDTMLGRMFGPGREYNFTRPNEKGEYEIAEGISATVFRTVLDYYKTGIINCPDGISIPDLRDTCDYLCINFDFNTIRCQDLSALLHELSNDGAHKQFDHYLEELILPIMVGCAKKGERECHIVVLTDEDSVDWDEDHPPPMGEEYSQILYSSKLYRFFKYIENRDVAKTVLKERGLKNIRIGIEGYPTCKEKIKRRPGGRSEVIYNYVQRPFIQMSWEKEEGKSRHVDFQCVRSKSLTNLVAAGDDVLEDQEILMHHPPQVDELDRLNAPLSQMASNDFQD

SEQ ID NO: 46146 - protein, 455 aa, Homo sapiens
MLLLPLLLLLVATTGPVGALTDEEKRLMVELHNLYRAQVSPTASDMLHMRWDEELAAFAKAYARQCVWGHNKERGRRGENLFAITDEGMDVPLAMEEWHHEREHYNLSAATCSPGQMCGHYTQVVWAKTERIGCGSHFCEKLQGVEETNIELLVCNYEPPGNVKGKRPYQEGTPCSQCPSGYHCKNSLCEPIGSPEDAQDLPYLVTEAPSFRATEASDSRKMGTPSSLATGIPAFLVTEVSGSLATKALPAVETQAPTSLATKDPPSMATEAPPCVTTEVPSILAAHSLPSLDEEPVTFPKSTHVPIPKSADKVTDKTKVPSRSPENSLDPKMSLTGARELLPHAQEEAEAEAELPPSSEVLASVFPAQDKPGELQATLDHTGHTSSKSLPNFPNTSATANATGGRALALQSSLPGAEGPDKPSVVSGLNSGPGHVWGPLLGLLLLPPLVLAGIF

SEQ ID NO: 46147 - protein, 183 aa, Homo sapiens
MYLIFEQKHLGNGSCTEITPKYRGASNIINNFIICWSFKIVLFLSFITILISCFLLYSVYAQIFRGLVIYIVWIFFYETANVVIQILTNNDFDIKEVRIMRWFGLVSRTVMHCFWMFFVINYAHITYKNRSQGNIISYKRRISTAEILHSRNKRLSISSGFSGSHLESQYFERQRCSGKTSIK

SEQ ID NO: 46148 - protein, 175 aa, Homo sapiens
MYLIFEQKHLGNGSCTEITPKYRGASNIINNFIICWSFKIVLFLSFITILISCFLLYSVYAQIFRGLVIYIVWIFFYETANVVIQILTNNDFDIKEVRIMRWFGLVSRTVMHCFWMFFVINYAHITYKNRSQGNIISYKRRISTAEILHSRNKRLSISSGFSGSHLESQYFERQR

SEQ ID NO: 46149 - protein, 461 aa, Homo sapiens [sequence omitted]

SEQ ID NO: 46150 - protein, 424 aa, Homo sapiens [sequence omitted]

SEQ ID NO: 46151 - protein, 823 aa, Homo sapiens
MLTVHQTVSDVRGNFYQEKTVFLRCTVNSNPPARFIWKRGSDTLSHSQDNGVDIYEPLYTQGETKVLKLKNLRPQDYASYTCQVSVRNVCGIPDKAITFRLTNTTAPPALKLSVNETLVVNPGENVTVQCLLTGGDPLPQLQWSHGPGPLPLGALAQGGTLSIPSVQARDSGYYNCTATNNVGNPAKKTVNLLVRSMKNATFQITPDVIKESENIQLGQDLKLSCHVDAVPQEKVTYQWFKNGKPARMSKRLLVTRNDPELPAVTSSLELIDLHFSDYGTYLCMASFPGAPVPDLSVEVNISSETVPPTISVPKGRAVVTVREGSPAELQCEVRGKPRPPVLWSRVDKEAALLPSGLPLEETPDGKLRLERVSRDMSGTYRCQTARYNGFNVRPREAQVQLNVQFPPEVEPSSQDVRQALGRPVLLRCSLLRGSPQRIASAVWRFKGQLLPPPPVVPAAAEAPDHAELRLDAVTRDSSGSYECSVSNDVGSAACLFQVSAKAYSPEFYFDTPNPTRSHKLSKNYSYVLQWTQREPDAVDPVLNYRLSIRQLNQHNAVVKAIPVRRVEKGQLLEYILTDLRVPHSYEVRLTPYTTFGAGDMASRIIHYTEPINSPNLSDNTCHFEDEKICGYTQDLTDNFDWTRQNALTQNPKRSPNTGPPTDISGTPEGYYMFIETSRPRELGDRARLVSPLYNASAKFYCVSFFYHMYGKHIGSLNLLVRSRNKGALDTHAWSLSGNKGNVWQQAHVPISPSGPFQIIFEGVRGPGYLGDIAIDDVTLKKGECPRKQTDPNKVVVMPGSGAPCQSSPQLWGPMAIFLLALQR

SEQ ID NO: 46152 - protein, 149 aa, Homo sapiens [sequence omitted]

SEQ ID NO: 46153 - protein, 1033 aa, Homo sapiens
MEFSSPIPNAEELNIRFAELVDELDLTDKNREAMFALPPEKKWQIYCSKKKEQEDPNKLATSWPDYYIDRINSMAAMQSLYAFDEEETEMRNQVVEDLKTALRTQPMRFVTRFIELEGLTCLLNFLRSMDHATCESRIHTSLIGCIKALMNNSQGRAHVLAQPEAISTIAQSLRTENSKTKVAVLEILGAVCLVPGGHKKVLQAMLHYQVYAAERTRFQTLLNELDRSLGRYRDEVNLKTAIMSFINAVLNAGAGEDNLEFRLHLRYEFLMLGIQPVIDKLRQHENAILDKHLDFFEMVRNEDDLELARRFDMVHIDTKSASQMFELIHKKLKYTEAYPCLLSVLHHCLQMPYKRNGGYFQQWQLLDRILQQIVLQDERGVDPDLAPLENFNVKNIVNMLINENEVKQWRDQAEKFRKEHMELVSRLERKERECETKTLEKEEMMRTLNKMKDKLARESQELRQARGQVAELVAQLSELSTGPVSSPPPPGGPLTLSSSMTTNDLPPPPPPLPFACCPPPPPPPLPPGGPPTPPGAPPCLGMGLPLPQDPYPSSDVPLRKKRVPQPSHPLKSFNWVKLNEERVPGTVWNEIDDMQVFRILDLEDFEKMFSAYQRHQKELGSTEDIYLASRKVKELSVIDGRRAQNCIILLSKLKLSNEEIRQAILKMDEQEDLAKDMLEQLLKFIPEKSDIDLLEEHKHEIERMARADRFLYEMSRIDHYQQRLQALFFKKKFQERLAEAKPKVEAILLASRELVRSKRLRQMLEVILAIGNFMNKGQRGGAYGFRVASLNKIADTKSSIDRNISLLHYLIMILEKHFPDILNMPSELQHLPEAAKVNLAELEKEVGNLRRGLRAVEVELEYQRRQVREPSDKFVPVMSDFITVSSFSFSELEDQLNEARDKFAKALMHFGEHDSKMQPDEFFGIFDTFLQAFSEARQDLEAMRRRKEEEERRARMEAMLKEQRERERWQRQRKVLAAGSSLEEGGEFDDLVSALRSGEVFDKDLCKLKRSRKRSGSQALEVTRERAINRLNY

SEQ ID NO: 46154 - protein, 249 aa, Homo sapiens
MFPNSPPANPSIFSWDPLHVQGLRPRMSFSSQVATLWKGCRVPQTPPLAQQRLGSGSFQRHYTSRADSDANSKCLSPGSWASAAPSGPQLTSEQLTHVDSEGRAAMVDVGRKPDTERVAVASAVVLLGPVAFKLVQQNQLKKGDALVVAQLAGVQAAKVTSQLIPLCHHVALSHIQVQLELDSTRHAVKIQASCRARGPTGVEMEALTSAAVAALTLYDMCKAVSRDIVLEEIKLISKTGGQRGDFHRA

SEQ ID NO: 46155 - protein, 625 aa, Homo sapiens
MSPAELLHFQQQQALQVARQFLLQQASGLSSPGNNDSKQSASAVQVPVSVAMMSPQMLTPQQMQQILSPPQLQALLQQQQALMLQQLQEYYKKQQEQLHLQLLTQQQAGKPQPKEALGNKQLAFQQQLLQMQQLQQQHLLNLQRQGLVSLQPNQASGPLQTLPQAAVCPTDLPQLWKGEGAPGQPAEDSVKQEGLDLTGTAATATSFAAPPKVSPPLSHHTLPNGQPTVLTSRRDSSSHEETPGSHPLYGHGECKWPGCETLCEDLGQFIKHLNTEHALDDRSTAQCRVQMQVVQQLEIQLAKESERLQAMMAHLHMRPSEPKPFSQPLNPVPGSSSFSKVTVSAADSFPDGLVHPPTSAAAPVTPLRPPGLGSASLHGGGPARRRSSDKFCSPISSELAQNHEFYKNADVRPPFTYASLIRQAILETPDRQLTLNEIYNWFTRMFAYFRRNTATWKNAVRHNLSLHKCFVRVENVKGAVWTVDEREYQKRRPPKMTGSPTLVKNMISGLSYGALNASYQAALAESSFPLLNSPGMLNPGSASSLLPLSHDDVGAPVEPLPSNGSSSPPRLSPPQYSHQVQVKEEPAEAEEDRQPGPPLGAPNPSASGPPEDRDLEEELPGEELS

SEQ ID NO: 46156 - protein, 613 aa, Homo sapiens [sequence omitted]

SEQ ID NO: 46157 - protein, 331 aa, Homo sapiens
MLHIGSNPERELDDVIDNIMRLDDVLGYINPEMQMPNTLPLSSSHLNVYSSDPQVTASLVGVTSSSCPADLTQKRELTDAESRALAKERQKKDNHNLIERRRRFNINDRIKELGMLIPKANDLDVRWNKGTILKASVDYIRRMQKDLQKSRELENHSRRLEMTNKQLWLRIQELEMQARVHGLPTTSPSGMNMAELAQQVVKQELPSEEGPGEALMLGAEVPDPEPLPALPPQAPLPLPTQPPSPFHHLDFSHSLSFGGREDEGPPGYPEPLAPGHGSPFPSLSKKDLDLMLLDDSLLPLASDPLLSTMSPEASKASSRRSSFSMEEGDVL

SEQ ID NO: 46158 - protein, 247 aa, Homo sapiens
MLQSYISEIGRSAKSYCEHTARTQPTLSDIVVTLVEMGFNVDTLPAYAKRSQRMVITAPPVTNQPVTPKALTAGQNRPHPPHIPSHFPEFPDPHTYIKTPTYREPVSDYQVLREKAASQRRDVERALTRFMAKTGETQSLFKDDVSTFPLIAARPFTIPYLTALLPSELEMQQMEETDSSEQDEQTDTENLALHISMEDSGAEKENTSVLQQNPSLSGSRNGEENIIDNPYLRPVKKPKIRRKKSLS

SEQ ID NO: 46159 - protein, 940 aa, Homo sapiens
MEPPAPAIPSRYQQVPQQPHPGFTGGLSKPALQVGQHPTQGHLYYDYQQPLAQVPVQGGQPLQAPQMLSQHMQQMQQHQYYPPQQQQQAGQQRISMQEIQTQPQQIRPSQPQPPPQQQQPQQLQLQQRQGSMQIPQYYQPQPMMQHLQEQQQQQMHLQPPSYHRDPHQYTPEQAHTVQLIPLGSMSQYYYQEPQQPYSHPLYQQSHLSQHQQREDSQLKTYSSDRQAQAMLSSHGDLGPPDTGMGDPASSDLTRVSSTLPHRPLLSPSGIHLNNMGPQHQQLSPSAMWPQMHLPDGRAQPGSPESSGQPKGAFGEQFDAKNKLTCSICLKEFKNLPALNGHMRSHGGMRASPNLKQEIPRKHQPSVPKAEEPLKTVQEKKKFRHRPEPLFIPPPPSYNPNPAASYSGATLYQSQLRSPRVLGDHLLLDPTHELPPYTPPPMLSPVRQGSGLFSNVLISGHGPGAHPQLPLTPLTPTPRVLLCRSNSIDGSNVTVTPGPGEQTVDVEPRINIGLRFQAEIPELQDISALAQDTHKATLVWKPWPELENHDLQQRVENLLNLCCSSALPGGGTNSEFALHSLFEAKGDVMVALEMLLLRKPVRLKCHPLANYHYAGSDKWTSLERKLFNKALATYSKDFIFVQKMVKSKTVAQCVEYYYTWKKIMRLGRKHRTRLAEIIDDCVTSEEEEELEEEEEEDPEEDRKSTKEEESEVPKSPEPPPVPVLAPTEGPPLQALGQPSGSFICEMPNCGADCRCHVTPFLPQVFSSRQALNGHARIHGGTNQVTKARGAIPSGKQKPGGTQSGYCSVKSSPSHSTTSGETDPTTIFPCKECGKVFFKIKSRNAHMKTHRQQEEQQRQKAQKAAFAAEMAATIERTTGPVGAPGLLPLDQLSLIKPIKDVDILDDDVVQQLGGVMEEAEVVDTDLLLDDQDSVLLQGDAEL

SEQ ID NO: 46160 - protein, 117 aa, Homo sapiens
MLRIVEPYVTWGFPNLKSVRELILKRGQAKVKNKTIPLTDNTVIEEHLGKFGVICLEDLIHEIAFPGKHFQEISWFLCPFHLSVARHATKNRVGFLKEMGTPGYRGERINQLIRQLN

SEQ ID NO: 46161 - protein, 451 aa, Homo sapiens
MVEYITHSRDVVTEAIYPEAVTMFSVNLFRTLPPSSNPTGAEFDPEEDEPTLEAAWPHLQLVYEFFLRFLESPDFQPNIAKKYIDQKFVLALLDLFDSEDPRERDFLKTILHRIYGKFLGLRAYIRRQINHIFYRFIYETEHHNGIAELLEILGSIINGFALPLKEEHKMFLIRVLLPLHKVKSLSVYHPQLAYCVVQFLEKESSLTEPVIVGLLKFWPKTHSPKEVMFLNELEEILDVIEPSEFSKVMEPLFRQLAKCVSSPHFQVAERALYYWNNEYIMSLISDNAARVLPIMFPALYRNSKSHWNKTIHGLIYNALKLFMEMNQKLFDDCTQQYKAEKQKGRFRMKEREEMWQKIEELARLNPQYPMFRAPPPLPPVYSMETETPTAEDIQLLKRTVETEAVQMLKDIKKEKVLLRRKSELPQDVYTIKALEAHKRAEEFLTASQEAL

SEQ ID NO: 46162 - protein, 162 aa, Homo sapiens [sequence omitted]

SEQ ID NO: 46163 - protein, 243 aa, Homo sapiens [sequence omitted]

SEQ ID NO: 46164 - protein, 1618 aa, Homo sapiens
MLGEDGQVIGPSQESAGEVGALDKSVLEEMETDVKSLIQRALRQLEECVGTIPPAPLLHTVHVLSAYASIEPLTGVFKDPRVLDLLMHMLSSPDYQIRWSAGRMIQALSSHDAGTRTQILLSLSQQEAIEKHLDFDSRCALLALFAQATLSEHPMSFEGIQLPQVPGRVLFSLVKRYLHVTSLLDQLNDSAAEPGAQNTSAPEELSGERGQLELEFSMAMGTLISELVQAMRWDQASDRPRSSARSPGSIFQPQLADVSPGLPAAQAQPSFRRSRRFRPRSEFASGNTYALYVRDTLQPGMRVRMLDDYEEISAGDEGEFRQSNNGVPPVQVFWESTGRTYWVHWHMLEILGFEEDIEDMVEADEYQGAVASRVLGRALPAWRWRPMTELYAVPYVLPEDEDTEECEHLTLAEWWELLFFIKKLDGPDHQEVLQILQENLDGEILDDEILAELAVPIELAQDLLLTLPQRLNDSALRDLINCHVYKKYGPEALAGNQAYPSLLEAQEDVLLLDAQAQAKDSEDAAKVEAKEPPSQSPNTPLQRLVEGYGPAGKILLDLEQALSSEGTQENKVKPLLLQLQRQPQPFLALMQSLDTPETNRTLHLTVLRILKQLVDFPEALLLPWHEAVDACMACLRSPNTDREVLQELIFFLHRLTSVSRDYAVVLNQLGARDAISKALEKHLGKLELAQELRDMVFKCEKHAHLYRKLITNILGGCIQMVLGQIEDHRRTHQPINIPFFDVFLRYLCQGSSVEVKEDKCWEKVEVSSNPHRASKLTDHNPKTYWESNGSAGSHYITLHMRRGILIRQLTLLVASEDSSYMPARVVVCGGDSTSSLHTELNSVNVMPSASRVILLENLTRFWPIIQIRIKRCQQGGIDTRIRGLEILGPKPTFWPVFREQLCRHTRLFYMVRAQAWSQDMAEDRRSLLHLSSRLNGALRQEQNFADRFLPDDEAAQALGKTCWEALVSPVVQNITSPDEDGISPLGWLLDQYLECQEAVFNPQSRGPAFFSRVRRLTHLLVHVEPCEAPPPVVATPRPKGRNRSHDWSSLATRGLPSSIMRNLTRCWRAVVEKQVNNFLTSSWRDDDFVPRYCEHFNILQNSSSELFGPRAAFLLALQNGCAGALLKLPFLKAAHVSEQFARHIDQQIQGSRIGGAQEMERLAQLQQCLQAVLIFSGLEIATTFEHYYQHYMADRLLGVVSSWLEGAVLEQIGPCFPNRLPQQMLQSLSTSKELQRQFHVYQLQQLDQELLKLEDTEKKIQVGLGASGKEHKSEKEEEAGAAAVVDVAEGEEEEEENEDLYYEGAMPEVSVLVLSRHSWPVASICHTLNPRTCLPSYLRGTLNRYSNFYNKSQSHPALERGSQRRLQWTWLGWAELQFGNQTLHVSTVQMWLLLYLNDLKAVSVESLLAFSGLSADMLNQAIGPLTSSRGPLDLHEQKDIPGGVLKIRDGSKEPRSRWDIVRLIPPQTYLQAEGEDGQNLEKRRNLLNCLIVRILKAHGDEGLHIDQLVCLVLEAWQKGPCPPRGLVSSLGKGSACSSTDVLSCILHLLGKGTLRRHDDRPQVLSYAVPVTVMEPHTESLNPGSSGPNPPLTFHTLQIRSRGVPYASCTATQSFSTFR

SEQ ID NO: 46165 - protein, 1650 aa, Homo sapiens
MLGEDGQVIGPSQESAGEVGALDKSVLEEMETDVKSLIQRALRQLEECVGTIPPAPLLHTVHVLSAYASIEPLTGVFKDPRVLDLLMHMLSSPDYQIRWSAGRMIQALSSHDAGEGQCGEEGKAGEGLGRLRDSQDTVAGASDLIRTRTQILLSLSQQEAIEKHLDFDSRCALLALFAQATLSEHPMSFEGIQLPQVPGRVLFSLVKRYLHVTSLLDQLNDSAAEPGAQNTSAPEELSGERGQLELEFSMAMGTLISELVQAMRWDQASDRPRSSARSPGSIFQPQLADVSPGLPAAQAQPSFRRSRRFRPRSEFASGNTYALYVRDTLQPGMRVRMLDDYEEISAGDEGEFRQSNNGVPPVQVFWESTGRTYWVHWHMLEILGFEEDIEDMVEADEYQGAVASRVLGRALPAWRWRPMTELYAVPYVLPEDEDTEECEHLTLAEWWELLFFIKKLDGPDHQEVLQILQENLDGEILDDEILAELAVPIELAQDLLLTLPQRLNDSALRDLINCHVYKKYGPEALAGNQAYPSLLEAQEDVLLLDAQAQAKDSEDAAKVEAKEPPSQSPNTPLQRLVEGYGPAGKILLDLEQALSSEGTQENKVKPLLLQLQRQPQPFLALMQSLDTPETNRTLHLTVLRILKQLVDFPEALLLPWHEAVDACMACLRSPNTDREVLQELIFFLHRLTSVSRDYAVVLNQLGARDAISKALEKHLGKLELAQELRDMVFKCEKHAHLYRKLITNILGGCIQMVLGQIEDHRRTHQPINIPFFDVFLRYLCQGSSVEVKEDKCWEKVEVSSNPHRASKLTDHNPKTYWESNGSAGSHYITLHMRRGILIRQLTLLVASEDSSYMPARVVVCGGDSTSSLHTELNSVNVMPSASRVILLENLTRFWPIIQIRIKRCQQGGIDTRIRGLEILGPKPTFWPVFREQLCRHTRLFYMVRAQAWSQDMAEDRRSLLHLSSRLNGALRQEQNFADRFLPDDEAAQALGKTCWEALVSPVVQNITSPDEDGISPLGWLLDQYLECQEAVFNPQSRGPAFFSRVRRLTHLLVHVEPCEAPPPVVATPRPKGRNRSHDWSSLATRGLPSSIMRNLTRCWRAVVEKQVNNFLTSSWRDDDFVPRYCEHFNILQNSSSELFGPRAAFLLALQNGCAGALLKLPFLKAAHVSEQFARHIDQQIQGSRIGGAQEMERLAQLQQCLQAVLIFSGLEIATTFEHYYQHYMADRLLGVVSSWLEGAVLEQIGPCFPNRLPQQMLQSLSTSKELQRQFHVYQLQQLDQELLKLEDTEKKIQVGLGASGKEHKSEKEEEAGAAAVVDVAEGEEEEEENEDLYYEGAMPEVSVLVLSRHSWPVASICHTLNPRTCLPSYLRGTLNRYSNFYNKSQSHPALERGSQRRLQWTWLGWAELQFGNQTLHVSTVQMWLLLYLNDLKAVSVESLLAFSGLSADMLNQAIGPLTSSRGPLDLHEQKDIPGGVLKIRDGSKEPRSRWDIVRLIPPQTYLQAEGEDGQNLEKRRNLLNCLIVRILKAHGDEGLHIDQLVCLVLEAWQKGPCPPRGLVSSLGKGSACSSTDVLSCILHLLGKGTLRRHDDRPQVLSYAVPVTVMEPHTESLNPGSSGPNPPLTFHTLQIRSRGVPYASCTATQSFSTFR

SEQ ID NO: 46166 - protein, 181 aa, Homo sapiens
MIDFLRFRPEETKSGPFEEKVIQVRYDPCRSADIALVAGGSRKRWIIATENMQAGDTILNSNHIGRMAVAAREGDAHPLGALPVGTLINNVESEPGRGAQYIRAAGTCGVLLRKVNGTAIIQLPSKRQMQVLETCVATVGRVSNVDHNKRVIGKVPGWWENSATGNSGCPWGPAYMPILMS

SEQ ID NO: 46167 - protein, 1059 aa, Homo sapiens [sequence omitted]

SEQ ID NO: 46168 - protein, 2425 aa, Homo sapiens
MWLSAPEVYANCPGLLGERALSKGLQHEPAGVSGSFPRDPGGLDEVAMGEMEADVQALVRRAARQLAESGTPSLTAAVLHTIHVLSAYASIGPLTGVFRETGALDLLMHMLCNPEPQIRRSAGKMLQALAAHDAGSRAHVLLSLSQQDGIEQHMDFDSRYTLLELFAETTSSEEHCMAFEGIHLPQIPGKLLFSLVKRYLCVTSLLDQLNSSPELGAGDQSSPCATREKSRGQRELEFSMAVGNLISELVRSMGWARNLSEQGMSPPRPTRSIFQPYISGPSLLLPTIVTTPRRQGWVFRQRSEFSSRSGYGEYVQQTLQPGMRVRMLDDYEEISAGDEGEFRQSNNGIPPVQVFWQSTGRTYWVHWHMLEILGPEEATEDKASAAVEKGAGATVLGTAFPSWDWNPMDGLYPLPYLQPEPQKNERVGYLTQAEWWELLFFIKKLDLCEQQPIFQNLWKNLDETLGEKALGEISVSVEMAESLLQVLSSRFEGSTLNDLLNSQIYTKYGLLSNEPSSSSTSRNHSCTPDPEEESKSEASFSEEETESLKAKAEAPKTEAEPTKTRTETPMAQSDSQLFNQLLVTEGMTLPTEMKEAASEMARALRGPGPRSSLDQHVAAVVATVQISSLDTNLQLSGLSALSQAVEEVTERDHPLVRPDRSLREKLVKMLVELLTNQVGEKMVVVQALRLLYLLMTKHEWRPLFAREGGIYAVLVCMQEYKTSVLVQQAGLAALKMLAVASSSEIPTFVTGRDSIHSLFDAQMTREIFASIDSATRPGSESLLLTVPAAVILMLNTEGCSSAARNGLLLLNLLLCNHHTLGDQIITQELRDTLFRHSGIAPRTEPMPTTRTILMMLLNRYSEPPGSPERAALETPIIQGQDGSPELLIRSLVGGPSAELLLDLERVLCREGSPGGAVRPLLKRLQQETQPFLLLLRTLDAPGPNKTLLLSVLRVITRLLDFPEAMVLPWHEVLEPCLNCLSGPSSDSEIVQELTCFLHRLASMHKDYAVVLCCLGAKEILSKVLDKHSAQLLLGCELRDLVTECEKYAQLYSNLTSSILAGCIQMVLGQIEDHRRTHQPINIPFFDVFLRHLCQGSSVEVKEDKCWEKVEVSSNPHRASKLTDHNPKTYWESNGSTGSHYITLHMHRGVLVRQLTLLVASEDSSYMPARVVVFGGDSTSCIGTELNTVNVMPSASRVILLENLNRFWPIIQIRIKRCQQGGIDTRVRGVEVLGPKPTFWPLFREQLCRRTCLFYTIRAQAWSRDIAEDHRRLLQLCPRLNRVLRHEQNFADRFLPDDEAAQALGKTCWEALVSPLVQNITSPDAEGVSALGWLLDQYLEQRETSRNPLSRAASFASRVRRLCHLLVHVEPPPGPSPEPSTRPFSKNSKGRDRSPAPSPVLPSSSLRNITQCWLSVVQEQVSRFLAAAWRAPDFVPRYCKLYEHLQRAGSELFGPRAAFMLALRSGFSGALLQQSFLTAAHMSEQFARYIDQQIQGGLIGGAPGVEMLGQLQRHLEPIMVLSGLELATTFEHFYQHYMADRLLSFGSSWLEGAVLEQIGLCFPNRLPQLMLQSLSTSEELQRQFHLFQLQRLDKLFLEQEDEEEKRLEEEEEEEEEEEAEKELFIEDPSPAISILVLSPRCWPVSPLCYLYHPRKCLPTEFCDALDRFSSFYSQSQNHPVLDMGPHRRLQWTWLGRAELQFGKQILHVSTVQMWLLLKFNQTEEVSVETLLKDSDLSPELLLQALVPLTSGNGPLTLHEGQDFPHGEKDEGRTLEQKRNLLSCLLVRILKAHGEKGLHIDQLVCLVLEAWQKGPNPPGTLGHTVAGGVACTSTDVLSCILHLLGQGYVKRRDDRPQILMYAAPEPMGPCRGQADVPFCGSQSETSKPSPEAVATLASLQLPAGRTMSPQEVEGLMKQTVRQVQETLNLEPDVAQHLLAHSHWGAEQLLQSYSEDPEPLLLAAGLCVHQAQAVPVRPDHCPVCVSPLGCDDDLPSLCCMHYCCKSCWNEYLTTRIEQNLVLNCTCPIADCPAQPTGAFIRAIVSSPEVISKYEKALLRGYVESCSNLTWCTNPQGCDRILCRQGLGCGTTCSKCGWASCFNCSFPEAHYPASCGHMSQWVDDGGYYDGMSVEAQSKHLAKLISKRCPSCQAPIEKNEGCLHMTCAKCNHGFCWRCLKSWKPNHKDYYNCSAMVSKAARQEKRFQDYNERCTFHHQAREFAVNLRNRVSAIHEVPPPRSFTFLNDACQGLEQARKVLAYACVYSFYSQDAEYMDVVEQQTENLELHTNALQILLEETLLRCRDLASSLRLLRADCLSTGMELLRRIQERLLAILQHSAQDFRVGLQSPSVEAWEAKGPNMPGSQPQASSGPEAEEEEEDDEDDVPEWQQDEFDEELDNDSFSYDESENLDQETFFFGDEEEDEDEAYD

SEQ ID NO: 46169 - protein, 45 aa, Homo sapiens
MIRGAADGSRFQVWDYEEGEVEALLDRYFEADPPGQVAASPDPTT

SEQ ID NO: 46170 - protein, 327 aa, Homo sapiens
MWQALKLLFCATGLQVSYLTWGVLQERVMTRSYGATATSPGERFTDSQFLVLMNRVLALIVAGLSCVLCKQPRHGAPMYRYSFASLSNVLSSWCQYEALKFVSFPTQVLAKASKVIPVMLMGKLVSRRSYEHWEYLTATLISIGVSMFLLSSGPEPRSSPATTLSGLILLAGYIAFDSFTSNWQDALFAYKMSSVQMMFGVNFFSCLFTVGSLLEQGALLEGTRFMGRHSEFAAHALLLSICSACGQLFIFYTIGQFGAAVFTIIMTLRQAFAILLSCLLYGHTVTVVGGLGVAVVFAALLLRVYARGRLKQRGKKAVPVESPVQKV

SEQ ID NO: 46171 - protein, 461 aa, Homo sapiens
MSDVSPVVAAQQQQQQQQQQQQQQQQQQQQQQQEAAAAAAAAAAAAAAAAAVPRLRPPHDNRTMVEIIADHPAELVRTDSPNFLCSVLPSHWRCNKTLPVAFKVVALGEVPDGTVVTVMAGNDENYSAELRNASAVMKNQVARFNDLRFVGRSGRGKSFTLTITVFTNPPQVATYHRAIKVTVDGPREPRRHRQKLDDSKPSLFSDRLSDLGRIPHPSMRVGVPPQNPRPSLNSAPSPFNPQGQSQITDPRQAQSSPPWSYDQSYPSYLSQMTSPSIHSTTPLSSTRGTGLPAITDVPRRISGASELGPFSDPRQFPSISSLTESRFSNPRMHYPATFTYTPPVTSGMSLGMSATTHYHTYLPPPYPGSSQSQSGPFQTSSTPYLYYGTSSGSYQFPMVPGGDRSPSRMLPPCTTTSNGSTLLNPNLPNQNDGVDADGSHSSSPTVLNSSGRMDESVWRPY

SEQ ID NO: 46172 - protein, 219 aa, Homo sapiens
MDCDVSTLVACVVDVEVFTNQEVKEKFEGLFRTYDDCVTFQLFKSFRRVRINFSNPKSAARARIELHETQFRGKKLKLYFAQVQTPETDGDKLHLAPPQPAKQFLISPPSSPPVGWQPINDATPVLNYDLLYAVAKLGPGEKYELHAGTESTPSVVVHVCDSDIEEEEDPKTSPKPKIIQTRRPGLPPSVSNAACSFSIIAVSSLSCFFPLLFVKKNCL

SEQ ID NO: 46173 - protein, 234 aa, Homo sapiens [sequence omitted]

SEQ ID NO: 46174 - protein, 1335 aa, Homo sapiens [sequence omitted]

SEQ ID NO: 46175 - protein, 592 aa, Homo sapiens
MFPDNFVKEIKRETEFKDDSLPIKRERHGNVASLVQRISTYGLPAGGIQPHPQTKNIKKKTKKRQCKVLFEYIPQNEDELELKVGDIIDINEEVEEGWWSGTLNNKLGLFPSNFVKELEVTDDGETHEAQDDSETVLAGPTSPIPSLGNVSETASGSVTQPKKIRGIGFGDIFKEGSVKLRTRTSSSETEEKKPEKPLILQSLGPKTQSVEITKTDTEGKIKAKEYCRTLFAYEGTNEDELTFKEGEIIHLISKETGEAGWWRGELNGKEGVFPDNFAVQINELDKDFPKPKKPPPPAKAPAPKPELIAAEKKYFSLKPEEKDEKSTLEQKPSKPAAPQVPPKKPTPPTKASNLLRSSGTVYPKRPEKPVPPPPPIAKINGEVSSISSKFETEPVSKLKLDSEQLPLRPKSVDFDSLTVRTSKETDVVNFDDIASSENLLHLTANRPKMPGRRLPGRFNGGHSPTHSPEKILKLPKEEDSANLKPSELKKDTCYSPKPSVYLSTPSSASKANTTAFLTPLEIKAKVETDDVKKNSLDELRAQIIELLCIVEALKKDHGKELEKLRKDLEEEKTMRSNLEMEIEKLKKAVLSS

SEQ ID NO: 46176 - protein, 829 aa, Homo sapiens
MLRQVLRRGLQSFCHRLGLCVSRHPVFFLTVPAVLTITFGLSALNRFQPEGDLERLVAPSHSLAKIERSLASSLFPLDQSKSQLYSDLHTPGRYGRVILLSPTGDNILLQAEGILQTHRAVLEMKDGRNSFIGHQLGGVVEVPNSKDQRVKSARAIQITYYLQTYGSATQDLIGEKWENEFCKLIRKLQEEHQELQLYSLASFSLWRDFHKTSILARSKVLVSLVLILTTATLSSSMKDCLRSKPFLGLLGVLTVCISIITAAGIFFITDGKYNSTLLGIPFFAMGHGTKGVFELLSGWRRTKENLPFKDRIADAYSDVMVTYTMTSSLYFITFGMGASPFTNIEAVKVFCQNMCVSILLNYFYIFSFFGSCLVFAGQLEQNRYHSIFCCKIPSAEYLDRKPVWFQTVMSDGHQQTSHHETNPYQHHFIQHFLREHYNEWITNIYVKPFVVILYLIYASFSFMGCLQISDGANIINLLASDSPSVSYAMVQQKYFSNYSPVIGFYVYEPLEYWNSSVQDDLRRLCSGFTAVSWVEQYYQFLKVSNVSANNKSDFISVLQSSFLKKPEFQHFRNDIIFSKAGDESNIIASRLYLVARTSRDKQKEITEVLEKLRPLSLSKSIRFIVFNPSFVFMDHYSLSVTVPVLIAGFGVLLVLILTFFLVIHPLGNFWLILSVTSIELGVLGLMTLWNVDMDCISILCLIYTLNFAIDHCAPLLFTFVLATEHTRTQCIKSSLQDHGTAILQNVTSFLIGLVPLLFVPSNLTFTLFKCLLLTGGCTLLHCFVILPVFLTFFPPSKKHHKKKKRAKRKEREEIECIEIQENPDHVTTV

SEQ ID NO: 46177 - protein, 672 aa, Homo sapiens [sequence omitted]

SEQ ID NO: 46178 - protein, 33 aa, Homo sapiens
MGVRFKRSKKIMPAGLVAGLSLMMILRLVLLLL

SEQ ID NO: 46179 - protein, 598 aa, Homo sapiens
MKRKFYSWEECMNLREVKSLKKLNHANVVKLKEVIRENDHLYFIFEYMKENLYQLIKERNKLFPESAIRNIMYQILQGLAFIHKHGFFHRDLKPENLLCMGPELVKIADFGLAREIRSKPPYTDYVSTRWYRAPEVLLRSTNYSSPIDVWAVGCIMAEVYTLRPLFPGASEIDTIFKICQVLGTPKKTDWPEGYQLSSAMNFRWPQCVPNNLKTLIPNASSEAVQLLRDMLQWDPKKRPTASQALRYPYFQVGHPLGSTTQNLQDSEKPQKGILEKAGPPPYIKPVPPAQPPAKPHTRISSRQHQASQPPLHLTYPYKAEVSRTDHPSHLQEDKPSPLLFPSLHNKHPQSKITAGLEHKNGEIKPKSRRRWGLISRSTKDSDDWADLDDLDFSPSLSRIDLKNKKRQSDDTLCRFESVLDLKPSEPVGTGNSAPTQTSYQRRDTPTLRSAAKQHYLKHSRYLPGISIRNGILSNPGKEFIPPNPWSSSGLSGKSSGTMSVISKVNSVGSSSTSSSGLTGNYVPSFLKKEIGSAMQRVHLAPIPDPSPGYSSLKAMRPHPGRPFFHTQPRSTPGLIPRPPAAQPVHGRTDWASKYASRR

SEQ ID NO: 46180 - protein, 537 aa, Homo sapiens [sequence omitted]

SEQ ID NO: 46181 - protein, 155 aa, Homo sapiens
MSTSASTLWRATNNSSPDSFASTCSNSNSNSSSPVSLKPEEEHQTDEKQFQIEKWQIARCNKSKPQKFINDLMQVLYTNEYMATHSLTGAKSSTSRDKAVKPAMNQNEVQEIIGVTKQLFPNTDDVSIRRMIGQKLNNCTKKPNLSKNLNSQDIK

SEQ ID NO: 46182 - protein, 232 aa, Homo sapiens [sequence omitted]

SEQ ID NO: 46183 - protein, 385 aa, Homo sapiens
MDLLRFRFSILPKDKIQDFLKDSQLQFEAISDEEKTLREQEIVASSPSLSGLKLGFESIYKIPFADALDLFRGRKVYLEDGFAYVPLKDIVAIILNEFRAKLSKALALTARSLPAVQSDERLQPLLNHLSHSYTGQDYSTQGNVGKISLDQIDLLSTKSFPPCMRQLHKALRENHHLRHGGRMQYGLFLKGIGLTLEQALQFWKQEFIKGKMDPDKFDKGYSYNIRHSFGKEGKRTDYTPFSCLKIILSNPPSQGDYHGCPFRHSDPELLKQKLQSYKISPGGISQILDLVKGTHYQVACQKYFEMIHNVDDCGFSLNHPNQFFCESQRILNGGKDIKKEPIQPETPQPKPSVQKTKDASSALASLNSSLEMDMEGLEDYFSEDS

SEQ ID NO: 46184 - protein, 1313 aa, Homo sapiens
MVEFSVELNKFYNVDLFQRGFYQIRASMKIPSRIPHRVEASLLHATGMTLAFPASVHDSLICSKTFQILYKNEEVVLNDVMIFKVKMLLDERKIEETLEEMNFLLSLDLHFTDGDYSADDLNALQLISSRTLKLHFSPHRGLHHHVNVMFDYFHLSVVSVTVHASLVALHQPLISFPRPVKTTWLNRNAPAQNKDSVIPTLESVVFGINYTKQLSPDGCSFIIADSFLHHAYRFHYTLCATLLLAFKGLHSYFITVTEEIPSCQKLELEEMDVEARLTELCEEVKKIENPDELAELINMNLAQLCSLLMALWGQFLEVITLHEELRILLAQEHHTLRVRRFSEAFFCFEHPREAAIAYQELHAQSHLQMCTAIKNTSFCSSLPPLPIECSELDGDLNSLPIIFEDRYLDSVTEGKLDISQDDSEITQMEHNLASRRSSDDCHDHQTTPSLGVRTIEIKPSNKDPFSGENITVKLGPWTELRQEEILVDNLLPNFESLESNGKSKSIEITFEKEALQEAKCLSIGESLTKLRSNLPAPSTKEYHVVVSGDTIKLPDISATYASSRFSDSGVESEPSSFATHPNTDLVFETVQGQGPCNSERLFPQLLMKPDYNVKFSLGNHCTESTSAISEIQSSLTSINSLPSDDELSPDENSKKSVVPECHLNDSKTVLNLGTTDLPKCDDTKKSSITLQQQSVVFSGNLDNETVAIHSLNSSIKDPLQFVFSDEETSSDVKSSCSSKPNLDTMCKGFQSPDKSNNSTGTAITLNSKLICLGTPCVISGSISSNTDVSEDRTMKKNSDVLNLTQMYSEIPTVESETHLGTSDPFSASTDIVKQGLVENYFGSQSSTDISDTCAVSYSNALSPQKETSEKEISNLQQEQDKEDEEEEQDQQMVQNGYYEETDYSALDGTINAHYTSRDELMEERLTKSEKINSDYLRDGINMPTVCTSGCLSFPSAPRESPCNVKYSSKSKFDAITKQPSSTSYNFTSSISWYESSPKPQIQAFLQAKEELKLLKLPGFMYSEVPLLASSVPYFSVEEEDGSEDGVHLIVCVHGLDGNSADLRLVKTYIELGLPGGRIDFLMSERNQNDTFADFDSMTDRLLDEIIQYIQIYSLTVSKISFIGHSLGNLIIRSVLTRPRFKYYLNKLHTFLSLSGPHLGTLYNSSALVNTGLWFMQKWKKSGSLLQLTCRDHSDPRQTFLYKLSNKAGLHYFKNVVLVGSLQDRYVPYHSARIEMCKTALKDKQSGQIYSEMIHNLLRPVLQSKDCNLVRYNVINALPNTADSLIGRAAHIAVLDSEIFLEKFFLVAALKYFQ

SEQ ID NO: 46185 - protein, 1509 aa, Homo sapiens
MVEFSVELNKFYNVDLFQRGFYQIRASMKIPSRIPHRVEASLLHATGMTLAFPASVHDSLICSKTFQILYKNEEVVLNDVMIFKVKMLLDERKIEETLEEMNFLLSLDLHFTDGDYSADDLNALQLISSRTLKLHFSPHRGLHHHVNVMFDYFHLSVVSVTVHASLVALHQPLISFPRPVKTTWLNRNAPAQNKDSVIPTLESVVFGINYTKQLSPDGCSFIIADSFLHHAYRFHYTLCATLLLAFKGLHSYFITVTEEIPSCQKLELEEMDVEARLTELCEEVKKIENPDELAELINMNLAQLCSLLMALWGQFLEVITLHEELRILLAQEHHTLRVRRFSEAFFCFEHPREAAIAYQELHAQSHLQMCTAIKNTSFCSSLPPLPIECSELDGDLNSLPIIFEDRYLDSVTEDLDAPWMGIQNLQRSESSKMDKYETEESSVAGLSSPELKVRPAGASSIWYTEGEKQLTKSLKGKNEESNKSKVKVTKLMKTMKSENTKKLIKQNSKDSVVLVGYKCLKSTASNDLIKCFEGNPSHSQKEGLDPTICGYNFDPKTYMRQTSQKEASCLPTNTERTEQKSPDIENVQPDQFDPLNSGNLNLCANLSISGKLDISQDDSEITQMEHNLASRRSSDDCHDHQTTPSLGVRTIEIKPSNKDPFSGENITVKLGPWTELRQEEILVDNLLPNFESLESNGKSKSIEITFEKEALQEAKCLSIGESLTKLRSNLPAPSTKEYHVVVSGDTIKLPDISATYASSRFSDSGVESEPSSFATHPNTDLVFETVQGQGPCNSERLFPQLLMKPDYNVKFSLGNHCTESTSAISEIQSSLTSINSLPSDDELSPDENSKKSVVPECHLNDSKTVLNLGTTDLPKCDDTKKSSITLQQQSVVFSGNLDNETVAIHSLNSSIKDPLQFVFSDEETSSDVKSSCSSKPNLDTMCKGFQSPDKSNNSTGTAITLNSKLICLGTPCVISGSISSNTDVSEDRTMKKNSDVLNLTQMYSEIPTVESETHLGTSDPFSASTDIVKQGLVENYFGSQSSTDISDTCAVSYSNALSPQKETSEKEISNLQQEQDKEDEEEEQDQQMVQNGYYEETDYSALDGTINAHYTSRDELMEERLTKSEKINSDYLRDGINMPTVCTSGCLSFPSAPRESPCNVKYSSKSKFDAITKQPSSTSYNFTSSISWYESSPKPQIQAFLQAKEELKLLKLPGFMYSEVPLLASSVPYFSVEEEDGSEDGVHLIVCVHGLDGNSADLRLVKTYIELGLPGGRIDFLMSERNQNDTFADFDSMTDRLLDEIIQYIQIYSLTVSKISFIGHSLGNLIIRSVLTRPRFKYYLNKLHTFLSLSGPHLGTLYNSSALVNTGLWFMQKWKKSGSLLQLTCRDHSDPRQTFLYKLSNKAGLHYFKNVVLVGSLQDRYVPYHSARIEMCKTALKDKQSGQIYSEMIHNLLRPVLQSKDCNLVRYNVINALPNTADSLIGRAAHIAVLDSEIFLEKFFLVAALKYFQ

SEQ ID NO: 46186 - protein, 1296 aa, Homo sapiens
MVEFSVELNKFYNVDLFQRGKTFQILYKNEEVVLNDVMIFKVKMLLDERKIEETLEEMNFLLSLDLHFTDGDYSADDLNALQLISSRTLKLHFSPHRGLHHHVNVMFDYFHLSVVSVTVHASLVALHQPLISFPRPVKTTWLNRNAPAQNKDSVIPTLESVVFGINYTKQLSPDGCSFIIADSFLHHAYRFHYTLCATLLLAFKGLHSYFITVTEEIPSCQKLELAKANMQLLYERLLRRKQLRTQKDNHLEEMDVEARLTELCEEVKKIENPDELAELINMNLAQLCSLLMALWGQFLEVITLHEELRILLAQEHHTLRVRRFSEAFFCFEHPREAAIAYQELHAQSHLQMCTAIKNTSFCSSLPPLPIECSELDGDLNSLPIIFEDRYLDSVTEGKLDISQDDSEITQMEHNLASRRSSDDCHDHQTTPSLGVRTIEIKPSNKDPFSGENITVKLGPWTELRQEEILVDNLLPNFESLESNGKSKSIEITFEKEALQEAKCLSIGESLTKLRSNLPAPSTKEYHVVVSGDTIKLPDISATYASSRFSDSGVESEPSSFATHPNTDLVFETVQGQGPCNSERLFPQLLMKPDYNVKFSLGNHCTESTSAISEIQSSLTSINSLPSDDELSPDENSKKSVVPECHLNDSKTVLNLGTTDLPKCDDTKKSSITLQQQSVVFSGNLDNETVAIHSLNSSIKDPLQFVFSDEETSSDVKSSCSSKPNLDTMCKGFQSPDKSNNSTGTAITLNSKLICLGTPCVISGSISSNTDVSEDRTMKKNSDVLNLTQMYSEIPTVESETHLGTSDPFSASTDIVKQGLVENYFGSQSSTDISDTCAVSYSNALSPQKETSEKEISNLQQEQDKEDEEEEQDQQMVQNGYYEETDYSALDGTINAHYTSRDELMEERLTKSEKINSDYLRDGINMPTVCTSGCLSFPSAPRESPCNVKYSSKSKFDAITKQPSSTSYNFTSSISWYESSPKPQIQAFLQAKEELKLLKLPGFMYSEVPLLASSVPYFSVEEEDGSEDGVHLIVCVHGLDGNSADLRLVKTYIELGLPGGRIDFLMSERNQNDTFADFDSMTDRLLDEIIQYIQIYSLTVSKISFIGHSLGNLIIRSVLTRPRFKYYLNKLHTFLSLSGPHLGTLYNSSALVNTGLWFMQKWKKSGSLLQLTCRDHSDPRQTFLYKLSNKAGLHYFKNVVLVGSLQDRYVPYHSARIEMCKTALKDKQSGQIYSEMIHNLLRPVLQSKDCNLVRYNVINALPNTADSLIGRAAHIAVLDSEIFLEKFFLVAALKYFQ

SEQ ID NO: 46187 - protein, 355 aa, Homo sapiens [sequence omitted]

SEQ ID NO: 46188 - protein, 382 aa, Homo sapiens
MQDMGNTKARLLYEANLPENFRRPQTDQAVEFFIRDKYEKKKYYDKNAIAITNISSSDAPLQPLVSSPSLQAAVDKNKLEKEKEKKKEEKKREKEPEKPAKPLTAEKLQKKDQQLEPKKSTSPKKAAEPTVDLLGLDGPAVAPVTNGNTTVPPLNDDLDIFGPMISNPLPATVMPPAQGTPSAPAAATLSTVTSGDLDLFTEQTTKSEEVAKKQLSKDSILSLYGTGTIQQQSTPGVFMGPTNIPFTSQAPAAFQGFPSMGVPVPAAPGLIGNVMGQSPSMMVGMPMPNGFMGNAQTGVMPLPQNVVGPQGGMVGQMGAPQSKFGLPQAQQPQWSLSQMNQQMAGMSISSATPTAGFGQPSSTTAGWSGSSSGQTLSTQLWK

SEQ ID NO: 46189 - protein, 110 aa, Homo sapiens [sequence omitted]

SEQ ID NO: 46190 - protein, 200 aa, Homo sapiens
MLLIGTVSFHLWIRRNRERNSRSGKTRCRSKRSEQSMDMGTSALSKKPWWTLPQNFHAPMVFHMEEDQEELIFGHGDTYLRCIEVHSHTLIQLESWFTATGQTRVTVVGPHRARQWLLHMFCCVGSQDSYHHARGLEMLERVRSQPLTNDDLVTSISVPPYTGDLSLAPRISGTVCLSVPQPSPYQVIGCSGFHLSSLYP

SEQ ID NO: 46191 - protein, 429 aa, Homo sapiens
MVDSNTTLEDNRTSKACPEHSAPIKVHHNQTGKKYQWDAETQGWILGSFFYGYIITQIPGGYVASKIGGKMLLGFGILGTAVLTLFTPIAADLGVGPLIVLRALEGLGEGVTFPAMHAMWSSWAPPLERSKLLSISYAGAQLGTVISLPLSGIICYYMNWTYVFYFFGTIGIFWFLLWIWLVSDTPQKHKRISHYEKEYILSSLRNQLSSQKSVPWVPILKSLPLWAIVVAHFSYNWTFYTLLTLLPTYMKEILRFNVQENGFLSSLPYLGSWLCMILSGQAADNLRAKWNFSTLCVRRIFSLIGMIGPAVFLVAAGFIGCDYSLAVAFLTISTTLGGFCSSGFSINHLDIAPSYAGILLGITNTFATIPGMVGPVIAKSLTPDNTVGEWQTVFYIAAAINVFGAIFFTLFAKGEVQNWALNDHHGHRH

SEQ ID NO: 46192 - protein, 49 aa, Homo sapiens
MLRNLLALRQIGQRTISTASRRHFKNKVPEKQKLFQVLKYFIGDVTCNY

SEQ ID NO: 46193 - protein, 1164 aa, Homo sapiens
MASGTVKRHLKTSGECERKTKKSLELSKEDLIQLLSIMEGELQAREDVIHMLKTEKTKPEVLEAHYGSAEPEKVLRVLHRDAILAQEKSIGEDVYEKPISELDRLEEKQKETYRRMLEQLLLAEKCHRRTVYELENEKHKHTDYMNKSDDFTNLLEQERERLKKLLEQEKAYQARKEKENAKRLNKLRDELVKLKSFALMLVDERQMHIEQLGLQSQKVQDLTQKLREEEEKLKAITSKSKEDRQKLLKLEVDFEHKASRFSQEHEEMNAKLANQESHNRQLRLKLVGLTQRIEELEETNKNLQKAEEELQELRDKIAKGECGNSSLMAEVENLRKRVLEMEGKDEEITKTESQCRELRKKLQEEEHHSKELRLEVEKLQKRMSELEKLEEAFSKSKSECTQLHLNLEKEKNLTKDLLNELEVVKSRVKELECSESRLEKAELSLKDDLTKLKSFTVMLVDERKNMMEKIKQEERKVDGLNKNFKVEQGKVMDVTEKLIEESKKLLKLKSEMEEKVYNLTRERDELIGKLKSEEEKSSELSCSVDLLKKRLDGIEEVEREITRGRSRKGSELTCPEDNKIKELTLEIERLKKRLQQLEVVEGDLMKTEDEYDQLEQKFRTEQDKANFLSQQLEEIKHQIAKNKAIEKGEVVSQEAELRHRFRLEEAKSRDLKAEVQALKEKIHELMNKEDQLSQLQVDYSVLQQRFMEEENKNKNMGQEVLNLTKELELSKRYSRALRPSVNGRRMVDVPVTSTGVQTDAVSGEAAEEETPAVFIRKSFQEENHIMSNLRQVGLKKPVERSSVLDRYPPAANELTMRKSWIPWMRKRENGPSITQEKGPRTNSSPGHPGEVVLSPKQGQPLHIRVTPDHENSTATLEITSPTSEEFFSSTTVIPTLGNQKPRITIIPSPNVMPQKQKSGDTTLGPERAMSPVTITTFSREKTPESGRGAFADRPTSPIQIMTVSTSAAPAEIAVSPESQEMPMGRTILKVTPEKQTVPTPVRKYNSNANIITTEDNKIHIHLGSQFKRSPGTSGEGVSPVITVRPVNVTAEKEVSTGTVLRSPRNHLSSRPGASKVTSTITITPVTTSSARGTQSVSGQDGSSQRPTPTRIPMSKGMKAGKPVVAAPGAGNLTKFEPRAETQSMKIELKKSAASSTTSLGGGKG

SEQ ID NO: 46194 - protein, 1649 aa, Homo sapiens
MKMHKRILGHLSSVYCVTFDRTGRRIFTGSDDCLVKIWATDDGRLLATLRGHAAEISDMAVNYENTMIAAGSCDKMIRVWCLRTCAPLAVLQGHSASITSLQFSPLCSGSKRYLSSTGADGTICFWLWDAGTLKINPRPAKFTERPRPGVQMICSSFSAGGMFLATGSTDHIIRVYFFGSGQPEKISELEFHTDKVDSIQFSNTSNRFVSGSRDGTARIWQFKRREWKSILLDMATRPAGQNLQGIEDKITKMKVTMVAWDRHDNTVITAVNNMTLKVWNSYTGQLIHVLMGHEDEVFVLEPHPFDPRVLFSAGHDGNVIVWDLARGVKIRSYFNMIEGQGHGAVFDCKCSPDGQHFACTDSHGHLLIFGFGSSSKYDKIADQMFFHSDYRPLIRDANNFVLDEQTQQAPHLMPPPFLVDVDGNPHPSRYQRLVPGRENCREEQLIPQMGVTSSGLNQVLSQQANQEISPLDSMIQRLQQEQDLRRSGEAVISNTSRLSRGSISSTSEVHSPPNVGLRRSGQIEGVRQMHSNAPRSEIATERDLVAWSRRVVVPELSAGVASRQEEWRTAKGEEEIKTYRSEEKRKHLTVPKENKIPTVSKNHAHEHFLDLGESKKQQTNQHNYRTRSALEETPRPSEEIENGSSSSDEGEVVAVSGGTSEEEERAWHSDGSSSDYSSDYSDWTADAGINLQPPKKVPKNKTKKAESSSDEEEESEKQKQKQIKKEKKKVNEEKDGPISPKKKKPKERKQKRLAVGELTENGLTLEEWLPSTWITDTIPRRCPFVPQMGDEVYYFRQGHEAYVEMARKNKIYSINPKKQPWHKMELREQELMKIVGIKYEVGLPTLCCLKLAFLDPDTGKLTGGSFTMKYHDMPDVIDFLVLRQQFDDAKYRRWNIGDRFRSVIDDAWWFGTIESQEPLQLEYPDSLFQCYNVCWDNGDTEKMSPWDMELIPNNAVFPEELGTSVPLTDGECRSLIYKPLDGEWGTNPRDEECERIVAGINQLMTLDIASAFVAPVDLQAYPMYCTVVAYPTDLSTIKQRLENRFYRRVSSLMWEVRYIEHNTRTFNEPGSPIVKSAKFVTDLLLHFIKDQTCYNIIPLYNSMKKKVLSDSEDEEKDADVPGTSTRKRKDHQPRRRLRNRAQSYDIQAWKKQCEELLNLIFQCEDSEPFRQPVDLLEYPDYRDIIDTPMDFATVRETLEAGNYESPMELCKDVRLIFSNSKAYTPSKRSRIYSMSLRLSAFFEEHISSVLSDYKSALRFHKRNTITKRRKKRNRSSSVSSSAASSPERKKRILKPQLKSESSTSAFSTPTRSIPPRHNAAQINGKTESSSVVRTRSNRVVVDPVVTEQPSTSSAAKTFITKANASAIPGKTILENSVKHSKALNTLSSPGQSSFSHGTRNNSAKENMEKEKPVKRKMKSSVLPKASTLSKSSAVIEQGDCKNNALVPGTIQVNGHGGQPSKLVKRGPGRKPKVEVNTNSGEIIHKKRGRKPKKLQYAKPEDLEQNNVHPIRDEVLPSSTCNFLSETNNVKEDLLQKKNRGGRKPKRKMKTQKLDADLLVPASVKVLRRSNRKKIDDPIDEEEEFEELKGSEPHMRTRNQGRRTAFYNEDDSEEEQRQLLFEDTSLTFGTSSRGRVRKLTEKAKANLIGW

SEQ ID NO: 46195 - protein, 501 aa, Homo sapiens [sequence omitted]

SEQ ID NO: 46196 - protein, 460 aa, Homo sapiens
MGLLAVLRSKQTKSTIGVMVTASHNPEEDNGVKLVDPLGEMLAPSWEEHATCLANAEEQDMQRVLIDISEKEAVNLQQDAFVVIGRDTRPSSEKLSQSVIDGVTVLGGQFHDYGLLTTPQLHYMVYCRNTGGRYGKATIEGYYQKLSKAFVELTKQASCSGDEYRSLKVDCANGIGALKLREMEHYFSQGLSVQLFNDGSKGKLNHLCGADFVKSHQKPPQGMEIKSNERCCSFDGDADRIVYYYHDADGHFHLIDGDKIATLISSFLKELLVEIGESLNIGVVQTAYANGSSTRYLEEVMKVPVYCTKTGVKHLHHKAQEFDIGVYFEANGHGTALFSTAVEMKIKQSAEQLEDKKRKAAKMLENIIDLFNQVADRRVISTTDAERQAVTPPGLQEAINDLVKKYKLSRAFVRPSGTEDVVRVYAEADSQESADHLAHEVSLAVFQLAGGIGERPQPGF

SEQ ID NO: 46197 - protein, 525 aa, Homo sapiens
MGLLAVLRSKQTKSTIGVMVTASHNPEEDNGVKLVDPLGEMLAPSWEEHATCLANAEEQDMQRVLIDISEKEAVNLQQDAFVVIGRDTRPSSEKLSQSVIDGVTVLGGQFHDYGLLTTPQLHYMVYCRNTGGRYGKATIEGYYQKLSKAFVELTKQASCSGDEYRSLKVDCANGIGALKLREMEHYFSQGLSVQLFNDGSKGKLNHLCGADFVKSHQKPPQGMEIKSNERCCSFDGDADRIVYYYHDADGHFHLIDGDKIATLISSFLKELLVEIGESLNIGVVQTAYANGSSTRYLEEVMKVPVYCTKTGVKHLHHKAQEFDIGVYFEANGHGTALFSTAVEMKIKQSAEQLEDKKRKAAKMLENIIDLFNQAAGDAISDMLVIEAILALKGLTVQQWDALYTDLPNRQLKVQVADRRVISTTDAERQAVTPPGLQEAINDLVKKYKLSRAFVRPSGTEDVVRVYAEADSQGSRLVVWIFIIWPLHILLKVCAKPGQSTVSALNRESGGDIWQLSCRSLSHLRV

SEQ ID NO: 46198 - protein, 475 aa, Homo sapiens
MPIVYTPTVGLACQQYSLVFRKPRGLFITIHDRGHIASVLNAWPEDVIKAIVVTDGERILGLGDLGCNGMGIPVGKLALYTACGGMNPQECLPVILDVGTENEELLKDPLYIGLRQRRVRGSEYDDFLDEFMEAVSSKYGMNCLIQFEDFANVNAFRLLNKYRNQYCTFNDDIQGTASVAVAGLLAALRITKNKLSDQTILFQGAGEAALGIAHLIVMALEKEGLPKEKAIKKIWLVDSKGLIVKGRASLTQEKEKFAHEHEEMKNLEAIVQEIKPTALIGVAAIGGAFSEQILKDMAAFNERPIIFALSNPTSKAECSAEQCYKITKGRAIFASGSPFDPVTLPNGQTLYPGQGNNSYVFPGVALGVVACGLRQITDNIFLTTAEVIAQQVSDKHLEEGRLYPPLNTIRDVSLKIAEKIVKDAYQEKTATVYPEPQNKEAFVRSQMYSTDYDQILPDCYSWPEEVQKIQTKVDQ

SEQ ID NO: 46199 - protein, 487 aa, Homo sapiens
MDWIRLTKSGKDLTGLKGRLIEVTEEELKKHNKKDDCWICIRGFVYNVSPYMEYHPGGEDELMRAAGSDGTELFDQVHRWVNYESMLKECLVGRMAIKPAVLKDYREEEKKVLNGMLPKSQVTDTLAKEGPSYPSYDWFQTDSLVTIAIYTKQKDINLDSIIVDHQNDSFRAETIIKDCLYLIHIGLSHEVQEDFSVRVVESVGKIEIVLQKKENTSWDFLGHPLKNHNSLIPRKDTGLYYRKCQLISKEDVTHDTRLFCLMLPPSTHLQVPIGQHVYLKLPITGTEIVKPYTPVSGSLLSEFKEPVLPNNKYIYFLIKIYPTGLFTPELDRLQIGDFVSVSSPEGNFKISKFQELEDLFLLAAGTGFTPMVKILNYALTDIPSLRKVKLMFFNKTEDDIIWRSQLEKLAFKDKRLDVEFVLSAPISEWNGKQGHISPALLSEFLKRNLDKSKVLVCICGPVPFTEQGVRLLHDLNFSKNEIHSFTA

SEQ ID NO: 46200 - protein, 1365 aa, Homo sapiens
MKKKDTVPWWITEDDFKDDGLLGTNVSYLKTKKTSQPVMEIEEESAEKIQFLKSSGTSLLSTDSLETNELVVSELNHSSLGVGLDTLEEQEEKEQFFARLEKGLTSSIDYSRLNKELDSNDSTHFKALHSNQANAELTDDEHENESKHEELAENYSDDFEDEYVGAPLTTKDEEMPSKENSKSEKISVPKQEEEKTGMLANVVLLDSLDSVAEVNLDEQDKITPKPRCLPEMTENEMTGTGVSYGQSSSDVEALHQAYCHIAHSLGDEDKQKIESNTVEDIKSSVKGHPQENEENSKNISTMESDLPTVEELMKPIRIDSFGISGFDLQPVSSEKVAERKETEFFSSLPLKMNPNILSQDSQHVNLFFDKNDENVILQKTTNESMENSCPQVTEVTATEEHVDKMYLNILRKKITVNSSSLSQDDKINKTYRSQLSSEEEGAVMGKQVPYKKARSAPPLLKRKPQSGLYASVRSSGYGKPSSPLKMFSTLEKKTSEDIIKSKNLRSISTSNQPRKKEILSGTKLIKPAALDKPAHKTESCLSTRKKSENPTETDSCIQFQTDSLGYCGENKEKKLLMFKRVQEAEDKWRGAQALIEQIKATFSEKEKELENKLEELKKQQEKELFKLNQDNYILQAKLSSFEETNKKQRWLHFGEAADPVTGEKLKQIQKEIQEQETLLQGYQQENERLYNQVKDLQEQNKKNEERMFKENQSLFSEVASLKEQMHKSRFLSQVVEDSEPTRNQNFTDLLAELRMAQKEKDSLLEDIKRLKQDKQALEVDFEKMKKERDQAKDQIAYVTGEKLYEIKILEETHKQEISRLQKRLQWYAENQELLDKDALRLREANEEIEKLKLEIEKLKAESGNPSIRQKIRLKDKAADAKKIQDLERQVKEMEGILKRRYPNSLPALILAASAAGDTVDKNTVEFMEKRIKKLEADLEGKDEDAKKSLRTMEQQFQKMKIQYEQRLEQQEQLLACKLNQHDSPRIKALEKELDDIKEAHQITVRNLEAEIDVLKHQNAELDVKKNDKDDEDFQSIEFQVEQAHAKAKLVRLNEELAAKKREIQDLSKTVERLQKDRRMMLSNQNSKGREEMSAKRAKKDVLHSSKGNANSFPGTLDSKLYQPHTFTDSHVSEVLQENYRLKNELEGLISEKNELKMKSEAVMNQFENSMRRVKEDTAAHIASLKASHQREIEKLLCQNAVENSSSKVAELNRKIATQEVLIRHFQSQVNELQSKQESLVVSEVREEILQKEITKLLEELREAKENHTPEMKHFVGLEKKIKQMEMRHAQREQELQQIIQQTHQVVETEQNKEVEKWKRLAQLKNRELEKFRTELDSILDVLRELHRQGVVVPVAFADEMNAPEY

SEQ ID NO: 46201 - protein, 219 aa, Homo sapiens
MRVKISGLDPHQQYYIAMDIVPVDNKRYRYVYHSSKWMVAGNADSPVPPRVYIHPDSPASGETWMRQVISFDKLKLTNNELDDQGHIILHSMHKYQPRVHVIRKDCGDDLSPIKPVPSGEGVKAFSFPETVFTTVTAYQNQQITRLKIDRNPFAKGFRDSGRNRMGLEALVESYAFWRPSLRTLTFEDIPGIPKQEYRDLKTDYIFPERDNLVSRETKL

SEQ ID NO: 46202 - protein, 124 aa, Homo sapiens
MGNLICDAMINNNLRHTDEMFWNHVSMCILNGGGIRSPIDERNNGTITWENLAAVLPFGGTFDLVQLKGSTLKKAFEHSVHRYGQSTGEFLQVGDLKECCPICINQDDSWKEQPTAQTYLNTWF

SEQ ID NO: 46203 - protein, 748 aa, Homo sapiens
MKHIEVIVKARQKVKNTEFLQQAALEEYGPELHVALRSRRDELHYLRKLTELLFPYILPPKATDCRSLTLLIREILSGSVFLPSLDFLADPDTVNHLLIIFIDDSPPEKATEPASPLVPFLQKFAEPRNKKPSVLKLELKQIREQQDLLFRFMNFLKQEGAVHVLQFCLTVEEFNDRILRPELSNDEMLSLHEELQKIYKTYCLDESIDKIRFDPFIVEEIQRIAEGPYIDVVKLQTMRCLFEAYEHVLSLLENVFTPMFCHSDEYFRQLLRGAESPTRNSKLNRGSLSLDDFRNTQKRGESFGISRIGSKIKGVFKSTTMEGAMLPNYGVAEGEDDFIEEGIVVMEDDSPVEAVSTPNTPRNLAAWKISIPYVDFFEDPSSERKEKKERIPVFCIDVERNDRRAVGHEPEHWSVYRRYLEFYVLESKLTEFHGAFPDAQLPSKRIIGPKNYEFLKSKREEFQEYLQKLLQHPELSNSQLLADFLSPNGGETQFLDKILPDVNLGKIIKSVPGKLMKEKGQHLEPFIMNFINSCESPKPKPSRPELTILSPTSENNKKLFNDLFKNNANRAENTERKQNQNYFMEVMTVEGVYDYLMYVGRVVFQVPDWLHHLLMGTRILFKNTLEMYTDYYLQCKLEQLFQEHRLVSLITLLRDAIFCENTEPRSLQDKQKGAKQTFEEMMNYIPDLLVKCIGEETKYESIRLLFDGLQQPVLNKQLTYVLLDIVIQELFPELNKVQKEVTSVTSWM

SEQ ID NO: 46204 - protein, 739 aa, Homo sapiens
MKHIEVIVKARQKVKNTEFLQQAALEEYGPELHVALRSRRDELHYLRKLTELLFPYILPPKATDCRSLTLLIREILSGSVFLPSLDFLADPDTVNHLLIIFIDDSPPEKATEPASPLVPFLQKFAEPRNKKPSVLKLELKQIREQQDLLFRFMNFLKQEGAVHVLQFCLTVEEFNDRILRPELSNDEMLSLHEELQKIYKTYCLDESIDKIRFDPFIVEEIQRIAEGPYIDVVKLQTMRCLFEAYEHVLSLLENVFTPMFCHSDEYFRQLLRGAESPTRNSKLNRNTQKRGESFGISRIGSKIKGVFKSTTMEGAMLPNYGVAEGEDDFIEEGIVVMEDDSPVEAVSTPNTPRNLAAWKISIPYVDFFEDPSSERKEKKERIPVFCIDVERNDRRAVGHEPEHWSVYRRYLEFYVLESKLTEFHGAFPDAQLPSKRIIGPKNYEFLKSKREEFQEYLQKLLQHPELSNSQLLADFLSPNGGETQFLDKILPDVNLGKIIKSVPGKLMKEKGQHLEPFIMNFINSCESPKPKPSRPELTILSPTSENNKKLFNDLFKNNANRAENTERKQNQNYFMEVMTVEGVYDYLMYVGRVVFQVPDWLHHLLMGTRILFKNTLEMYTDYYLQCKLEQLFQEHRLVSLITLLRDAIFCENTEPRSLQDKQKGAKQTFEEMMNYIPDLLVKCIGEETKYESIRLLFDGLQQPVLNKQLTYVLLDIVIQELFPELNKVQKEVTSVTSWM

SEQ ID NO: 46205 - protein, 265 aa, Homo sapiens
MRSDGTSLYATRDLAAAIDRMDKYNFDTMIYVTDKGQKKHFQQVFQMLKIMGYDWAERCQHVPFGVVQGMKTRRGDVTFLEDVLNEIQLRMLQNMASIKTTKELKNPQETAERVGLAALIIQDFKGLLLSDYKFSWDRVFQSRGDTGVFLQYTHARLHSLEETFGCGYLNDFNTACLQEPQSVSILQHLLRFDEVLYKSSQDFQPRHIVSYLLTLSHLAAVAHKTLQIKDSPPEVAGARLHLFKAVRSVLANGMKLLGITPVCRM

SEQ ID NO: 46206 - protein, 391 aa, Homo sapiens
MTFSTKTSKENEENIQCGENFMDIECFMVLNPSQQLAIAVLSLTLGTFTVLENLLVLCVILHSRSLRCRPSYHFIGSLAVADLLGSVIFVYSFIDFHVFHRKDSRNVFLFKLGGVTASFTASVGSLFLTAIDRYISIHRPLAYKRIVTRPKAVVAFCLMWTIAIVIAVLPLLGWNCEKLQSVCSDIFPHIDETYLMFWIGVTSVLLLFIVYAYMYILWKAHSHAVRMIQRGTQKSIIIHTSEDGKVQVTRPDQARMDIRLAKTLVLILVVLIICWGPLLAIMVYDVFGKMNKLIKTVFAFCSMLCLLNSTVNPIIYALRSKDLRHAFRSMFPSCEGTAQPLDNSMGDSDCLHKHANNAASVHRAAESCIKSTVKIAKVTMSVSTDTSAEAL

SEQ ID NO: 46207 - protein, 318 aa, Homo sapiens
MQAPINGCRCEPLINKLENQLEATVEEIKAELGSVQDKMNTKLGQMENKTQHQMRVLDKLMVERLSAERTECLNRLQQHSDTEKHEGEKRQISLVDELKTWCMLKIQNLEQKLSGDSRACRAKSTPSTCVDQLVVTAGPAAASDSSPPVVRPKEKALNSTATQRLQQELSSSDCTGSRLRNVKVQTALLPMNEAARSDQQAGPCVNRGTQTKKSGKSGPTRHRAQQPAASSTCGQPPPATGSEQTGPHIRDTSQALELTQYFFEAVSTQMEKWYERKIEEARSQANQKAQQDKATLKEHIKSLEEELAKLRTRVQKEN

SEQ ID NO: 46208 - protein, 729 aa, Homo sapiens
MRDELHVRGGRVNIVDLQQVINVDLIHIENRIGDIIKSEKHVQLVLGQLIDENYLDRLAEEVNDKLQESGQVTISELCKTYDLPGNFLTQALTQRLGRIISGHIDLDNRGVIFTEAFVARHKARIRGLFSAITRPTAVNSLISKYGFQEQLLYSVLEELVNSGRLRGTVVGGRQDKAVFVPDIYSRTQSTWVDSFFRQNGYLEFDALSRLGIPDAVSYIKKRYKTTQLLFLKAACVGQGLVDQVEASVEEAISSGTWVDIAPLLPTSLSVEDAAILLQQVMRAFSKQASTVVFSDTVVVSEKFINDCTELFRELMHQKAEKEMKNNPVHLITEEDLKQISTLESVSTSKKDKKDERRRKATEGSGSMRGGGGGNAREYKIKKVKKKGRKDDDSDDESQSSHTGKKKPEISFMFQDEIEDFLRKHIQDAPEEFISELAEYLIKPLNKTYLEVVRSVFMSSTTSASGTGRKRTIKDLQEEVSNLYNNIRLFEKGMKFFADDTQAALTKHLLKSVCTDITNLIFNFLASDLMMAVDDPAAITSEIRKKILSKLSEETKVALTKLHNSLNEKSIEDFISCLDSAAEACDIMVKRGDKKRERQILFQHRQALAEQLKVTEDPALILHLTSVLLFQFSTHSMLHAPGRCVPQIIAFLNSKIPEDQHALLVKYQGLVVKQLVSQSKKTGQGDYPLNNELDKEQEDVASTTRKELQELSSSIKDLVLKSRKSSVTEE

SEQ ID NO: 46209 - protein, 101 aa, Homo sapiens
MFQVKECHMSAFVPEVSMQSSGYLDECQLLHFPCVSCDHSIWEHPSKSSCILLRTPDLLKLHNSHLDVTGLSHVNSSDHVLLYMPSAPSQDSYKRRNDEHP

SEQ ID NO: 46210 - protein, 739 aa, Homo sapiens
MSTMESGPNNHGNFQGDSNFNRMWQPEWGMHQQPPHPPPDQPWMPPTPGPMDIVPPSEDSNSQDSGEFAPDNRHIFNQNNHNFGGPPDNFAVGPVNQFDYQHGAAFGPPQGGFHPPYWQPGPPGPPAPPQNRRERPSSFRDRQRSPIALPVKQEPPQIDAVKRRTLPAWIREGLEKMEREKQKKLEKERMEQQRSQLSKKEKKATEDAEGGDGPRLPQRSKFDSDEEEEDTENVEAASSGKVTRSPSPVPQEEHSDPEMTEEEKEYQMMLLTKMLLTEILLDVTDEEIYYVAKDAHRKATKAPAKQLAQSSALASLTGLGGLGGYGSGDSEDERSDRGSESSDTDDEELRHRIRQKQEAFWRKEKEQQLLHDKQMEEEKQQTERVTKEMNEFIHKEQNSLSLLEAREADGDVVNEKKRTPNETTSVLEPKKEHKEKEKQGRSRSGSSSSGSSSSNSRTSSTSSTVSSSSYSSSSGSSRTSSRSSSPKRKKRHSRSRSPTIKARRSRSRSYSRRIKIESNRARVKIRDRRRSNRNSIERERRRNRSPSRERRRSRSRSRDRRTNRASRSRSRDRRKIDDQRGNLSGNSHKHKGEAKEQERKKERSRSIDKDRKKKDKEREREQDKRKEKQKREEKDFKFSSQDDRLKRKRESERTFSRSGSISVKIIRHDSRQDSKKSTTKDSKKHSGSDSSGRSSSESPGSSKEKKAKKPKHSRSRSVEKSQRSGKKASRKHKSKSRSR

SEQ ID NO: 46211 - protein, 35 aa, Homo sapiens
MSTMESGPNNHGNFQGDSNFNRMWQPGLLFMFSQF

SEQ ID NO: 46212 - protein, 649 aa, Homo sapiens
MKLCEEKCETDEIQKGGKCRNLSVRGITNLGNTCFFNAVMQNLAQTYTLTDLMNEIKESSTKLKIFPSSDSQLDPLVVELSRPGPLTSALFLFLHSMKETEKGPLSPKVLFNQLCQKAPRFKDFQQQDSQELLHYLLDAVRTEETKRIQASILKAFNNPTTKTADDETRKKVKAYGKEGVKMNFIDRIFIGELTSTVMCEECANISTVKDPFIDISLPIIEERVSKPLLWGRMNKYRSLRETDHDRYSGNVTIENIHQPRAAKKHSSSKDKSQLIHDRKCIRKLSSGETVTYQKNENLEMNGDSLMFASLMNSESRLNESPTDDSEKEASHSESNVDADSEPSESESASKQTGLFRSSSGSGVQPDGPLYPLSAGKLLYTKETDSGDKEMAEAISELRLSSTVTGDQDFDRENQPLNISNNLCFLEGKHLRSYSPQNAFQTLSQSYITTSKECSIQSCLYQFTSMELLMGNNKLLCENCTKNKQKYQEETSFAEKKVEGVYTNARKQLLISAVPAVLILHLKRFHQAGLSLRKVNRHVDFPLMLDLAPFCSATCKNASVGDKVLYGLYGIVEHSGSMREGHYTAYVKVRTPSRKLSEHNTKKKNVPGLKAADNESAGQWVHVSDTYLQVVPESRALSAQAYLLFYERVL

SEQ ID NO: 46213 - protein, 2140 aa, Homo sapiens
MQSINEDLKDILHAAKQIVGTDNGREAIESGAAFLFMTFHLKDSVGHKETKAIKQMFGPFPSSSATAACNATNRIISHFSQDDLTALVQMTEKEHGDRVFFGKNLAFSFDMHDLDHFDELPINGETQKTISLDYKKFLNEHLQEACTPELKPVEKTNGSFLWCEVEKYLNSTLKEMTEVPRVEDLCCTLYDMLASIKSGDELQDELFELLGPEGLELIEKLLQNRITIVDRFLNSSNDHRFQALQDNCKKILGENAKPNYGCQVTIQSEQEKQLMKQYRREEKRIARREKKAGEDLEVSEGLMCFDPKELRIQREQALLNARSVPILSRQRDADVEKIHYPHVYDSQAEAMKTSAFIAGAKMILPEGIQRENNKLYEEVRIPYSEPMPLSFEEKPVYIQDLDEIGQLAFKGMKRLNRIQSIVFETAYNTNENMLICAPTGAGKTNIAMLTVLHEIRQHFQQGVIKKNEFKIVYVAPMKALAAEMTDYFSRRLEPLGIIVKELTGDMQLSKSEILRTQMLVTTPEKWDVVTRKSVGDVALSQIVRLLILDEVHLLHEDRGPVLESIVARTLRQVESTQSMIRILGLSATLPNYLDVATFLHVNPYIGLFFFDGRFRPVPLGQTFLGIKCANKMQQLNNMDEVCYENVLKQVKAGHQVMVFVHARNATVRTAMSLIERAKNCGHIPFFFPTQGHDYVLAEKQVQRSRNKQVRELFPDGFSIHHAGMLRQDRNLVENLFSNGHIKVLVCTATLAWGVNLPAHAVIIKGTQIYAAKRGSFVDLGILDVMQIFGRAGRPQFDKFGEGIIITTHDKLSHYLTLLTQRNPIESQFLESLADNLNAEIALGTVTNVEEAVKWISYTYLYVRMRANPLAYGISHKAYQIDPTLRKHREQLVIEVGRKLDKAQMIRFEERTGYFSSTDLGRTASHYYIKYNTIETFNELFDAHKTEGDIFAIVSKAEEFDQIKVREEEIEELDTLLSNFCELSTPGGVENSYGKINILLQTYISRGEMDSFSLISDSAYVAQNAARIVRALFEIALRKRWPTMTYRLLNLSKVIDKRLWGWASPLRQFSILPPHILTRLEEKKLTVDKLKDMRKDEIGHILHHVNIGLKVKQCVHQIPSVMMEASIQPITRTVLRVTLSIYADFTWNDQVHGTVGEPWWIWVEDPTNDHIYHSEYFLALKKQVISKEAQLLVFTIPIFEPLPSQYYIRAVSDRWLGAEAVCIINFQHLILPERHPPHTELLDLQPLPITALGCKAYEALYNFSHFNPVQTQIFHTLYHTDCNVLLGAPTGSGKTVAAELAIFRVFNKYPTSKAVYIAPLKALVRERMDDWKVRIEEKLGKKVIELTGDVTPDMKSIAKADLIVTTPEKWDGVSRSWQNRNYVQQVTILIIDEIHLLGEERGPVLEVIVSRTNFISSHTEKPVRIVGLSTALANARDLADWLNIKQMGLFNFRPSVRPVPLEVHIQGFPGQHYCPRMASMNKPAFQAIRSHSPAKPVLIFVSSRRQTRLTALELIAFLATEEDPKQWLNMDEREMENIIATVRDSNLKLTLAFGIGMHHAGLHERDRKTVEELFVNCKVQVLIATSTLAWGVNFPAHLVIIKGTEYYDGKTRRYVDFPITDVLQMMGRAGRPQFDDQGKAVILVHDIKKDFYKKFLYEPFPVESSLLGVLSDHLNAEIAGGTITSKQDALDYITWTYFFRRLIMNPSYYNLGDVSHDSVNKFLSHLIEKSLIELELSYCIEIGEDNRSIEPLTYGRIASYYYLKHQTVKMFKDRLKPECSTEELLSILSDAEEYTDLPVRHNEDHMNSELAKCLPIESNPHSFDSPHTKAHLLLQAHLSRAMLPCPDYDTDTKTVLDQALRVCQAMLDVAANQGWLVTVLNITNLIQMVIQGRWLKDSSLLTLPNIENHHLHLFKKWKPIMKGPHARGRTSIESLPELIHACGGKDHVFSSMVESELHAAKTKQAWNFLSHLPVINVGISVKGSWDDLVEGHNELSVSTLTADKRDDNKWIKLHADQEYVLQVSLQRVHFGFHKGKPESCAVTPRFPKSKDEGWFLILGEVDKRELIALKRVGYIRNHHVASLSFYTPEIPGRYIYTLYFMSDCYLGLDQQYDIYLNVTQASLSAQVNTKVSDSLTDLALK

SEQ ID NO: 46214 - protein, 289 aa, Homo sapiens
MLTLGCTLYIVWATLYRCALDIMIWNSVFLGVNILHLSYLLYKKRPVKIEKELSGMYRRLFEPLRVPPDLFRRLTGQFCMIQTLKKGQTYAAEDKTSVDDRLSILLKGKMKVSYRGHFLHNIYPCAFIDSPEFRSTQMHKGEKFQVTIIADDNCRFLCWSRERLTYFLESEPFLYEIFRYLIGKDITNKLYSLNDPTLNDKKAKKLEHQLSLCTQISMLEMRNSIASSSDSDDGLHQFLRGTSSMSSLHVSSPHQRASAKMKPIEEGAEDDDDVFEPASPNTLKVHQLP

SEQ ID NO: 46215 - protein, 147 aa, Homo sapiens [sequence omitted]

SEQ ID NO: 46216 - protein, 437 aa, Homo sapiens
MLKGYIPPYNATVVQKLLDQGALLMGKTNLDEFAMGSGSTDGVFGPVKNPWSYSKQYREKRKQNPHSENEDSDWLITGGSSGGSAAAVSAFTCYAALGSDTGGSTRNPAAHCGLVGFKPSYGLVSRHGLIPLVNSMDVPGILTRCVDDAAIVLGALAGPDPRDSTTVHEPINKPFMLPSLADVSKLCIGIPKEYLVPELSSEVQSLWSKAADLFESEGAKVIEVSLPHTSYSIVCYHVLCTSEVASNMARFDGLQYGHRCDIDVSTEAMYAATRREGFNDVVRGRILSGNFFLLKENYENYFVKAQKVRRLIANDFVNAFNSGVDVLLTPTTLSEAVPYLEFIKEDNRTRSAQDDIFTQAVNMAGLPAVSIPVALSNQGLPIGLQFIGRAFCDQQLLTVAKWFEKQVQFPVIQLQELMDDCSAVLENEKLASVSLKQ

SEQ ID NO: 46217 - protein, 43 aa, Homo sapiens [sequence omitted]

SEQ ID NO: 46218 - protein, 333 aa, Homo sapiens
MSLRCLLSDELSNIAMQVRKLVGTQHPLLTTARGLVHDSWNSLQLRGLVVLLISKAAGPSSVNTSCQNYDMVSGIYSCQRSLAEITELIHIALLVHRGIVNLNELQSSDGPLKDMQFGNKIAILSGDFLLANACNGLALLQNTKVVELLASALMDLVQGVYHENSTSKESYITDDIGISTWKEQTFLSHGALLAKSCQAAMELAKHDAEVQNMAFQYGKHMAMSHKINSDVQPFIKEKTSDSMTFNLNSAPVVLHQEFLGRDLWIKQIGEAQEKGRLDYAKLRERIKAGKGVTSAIDLCRYHGNKALEALESFPPSEARSALENIVFAVTRFS

SEQ ID NO: 46219 - protein, 174 aa, Homo sapiens
MSLRCLLSDELSNIAMQVRKLVGTQHPLLTTARGLVHDSWNSLQLRGLVVLLISKAAGPSSVNTSCQNYDMVSGIYSCQRSLAEITELIHIALLVHRGIVNLNELQSSDGPLKDMQFGNKIAILSGDFLLANACNGLALLQNTKSFSFNGPIAIYQMGDCESAWILSKHPRALS

SEQ ID NO: 46220 - protein, 835 aa, Homo sapiens
MNELLGWYGYDKVELKDGEDIEFRSYPTDGESRQHISVLKENSLPKPKLPEDSVISPYNISTGYSGLATGNGLSDSPAGSKDHGSVPIIVPLIPPPFIKPPAEDDVSNVQIMCAWCQKVGIKRYSLSMGSEVKSFCSEKCFAACRRAYFKRNKARDEDGHAENFPQQHYAKETPRLAFKNNCELLVCDWCKHIRHTKEYLDFGDGERRLQFCSAKCLNQYKMDIFYKETQANLPAGLCSTLHPPMENKAEGTGVQLLTPDSWNIPLTDARRKAPSPVATAGQSQGPGPSASTTVSPSDTANCSVTKIPTPVPKSIPISETPNIPPVSVQPPASIGPPLGVPPRSPPMVMTNRGPVPLPIFMEQQIMQQIRPPFIRGPPHHASNPNSPLSNPMLPGIGPPPGGPRNLGPTSSPMHRPMLSPHIHPPSTPTMPGNPPGLLPPPPPGAPLPSLPFPPVSMMPNGPMPVPQMMNFGLPSLAPLVPPPTLLVPYPVIVPLPVPIPIPIPIPHVSDSKPPNGFSSNGENFIPNAPGDSAAAGGKPSGHSLSPRDSKQGSSKSADSPPGCSGQALSLAPTPAEHGRSEVVDLTRRAGSPPGPPGAGGQLGFPGVLQGPQDGVIDLTVGHRARLHNVIHRALHAHVKAEREPSAAERRTCGGCRDGHCSPPAAGDPGPGAPAGPEAAAACNVIVNGTRGAAAEGAKSAEPPPEQPPPPPPPAPPKKLLSPEEPAVSELESVKENNCASNCHLDGEAAKKLMGEEALAGGDKSDPNLNNPADEDHAYALRMLPKTGCVIQPVPKPAEKAAMAPCIISSPMLSAGPEDLEPPLKRRCLRIRNQNK

SEQ ID NO: 46221 - protein, 620 aa, Homo sapiens
MFMRIAKAYAALTDEESRKNWEEFGNPDGPQATSFGIALPAWIVDQKNSILVLLVYGLAFMVILPVVVGSWWYRSIRYSGDQILIRTTQIYTYFVYKTRNMDMKRLIMVLAGASEFDPQYNKDATSRPTDNILIPQLIREIGSINLKKNEPPLTCPYSLKARVLLLSHLARMKIPETLEEDQQFMLKKCPALLQEMVNVICQLIVMARNREEREFRAPTLASLENCMKLSQMAVQGLQQFKSPLLQLPHIEEDNLRRVSNHKKYKIKTIQDLVSLKESDRHTLLHFLEDEKYEEVMAVLGSFPYVTMDIKSQVLDDEDSNNITVGSLVTVLVKLTRQTMAEVFEKEQSICAAEEQPAEDGQGETNKNRTKGGWQQKSKGPKKTAKSKKKKPLKKKPTPVLLPQSKQQKQKQANGVVGNEAAVKEDEEEVSDKGSDSEEEETNRDSQSEKDDGSDRDSDREQDEKQNKDDEAEWQELQQSIQRKERALLETKSKITHPVYSLYFPEEKQEWWWLYIADRKEQTLISMPYHVCTLKDTEEVELKFPAPGKPGNYQYTVFLRSDSYMGLDQIKPLKLEVHEAKPVPENHPQWDTAIEGDEDQEDSEGFEDSFEEEEEEEEDDD

SEQ ID NO: 46222 - protein, 187 aa, Homo sapiens
MADRMQIVVILSEFFNTTWQEANCANCLTNNSEELSNSTVYFLNLFNHTLTCFEHNLQGNAHSLLQTKNYSEVCKNCREAYKTLSSLYSEMQKMNELENKAEPGTHLCIDVEDAMNITRKLWSRTFNCSVPCSDTVPVIAVSVFILFLPVVFYLSSFLHSEQKKRKLILPKRLKSSTSFANIQENSN

SEQ ID NO: 46223 - protein, 336 aa, Homo sapiens [sequence omitted]

SEQ ID NO: 46224 - protein, 860 aa, Homo sapiens
MLGKLDPFYQPSVSKQKTSAEIISEARNALRTVRTQRPFTPQEAQRKLFGPASSRTSENRPPSSFSLHASSFESSDSRPISGTRLSPLELKPKVPASPTREEDSCFSFPKPPVDPAKIRRVSNARARLFRAASQRALLPDRSLPPSDSKKTVESKETVMMGDSMVKINGIYLTKSNAICHLKSHPLQLTDDGGFSEIKEQEMFKGTTSLPSHLKNGGDQGKRHARASSCPSSSDLSRLQTKAVPKADLQEEDAEIEVDEVFWNTRIVPILRELEKEENIETVCAACTQLHHALEEGNMLGNKFKGRSILLKTLCKLVDVGSDSLSLKLAKIILALKVSRKNLLNVCKLIFKISRNEKNDSLIQNDSILESLLEVLRSEDLQTNMEAFLYCMGSIKFISGNLGFLNEMISKGAVEILINLIKQINENIKKCGTFLPNSGHLLVQVTATLRNLVDSSLVRSKFLNISALPQLCTAMEQYKGDKDVCTNIARIFSKLTSYRDCCTALASYSRCYALFLNLINKYQKKQDLVVRVVFILGNLTAKNNQAREQFSKEKGSIQTLLSLFQTFHQLDLHSQKPVGQRGEQHRAQRPPSEAEDVLIKLTRVLANIAIHPGVGPVLAANPGIVGLLLTTLEYKSLDDCEELVINATATINNLSYYQVKNSIIQDKKLYIAELLLKLLVSNNMDGILEAVRVFGNLSQDHDVCDFIVQNNVHRFMMALLDAQHQDICFSACGVLLNLTVDKDKRVILKEGGGIKKLVDCLRDLGPTDWQLACLVCKTLWNFSENITNASSCFGNEDTNTLLLLLSSFLDEELALDGSFDPDLKNYHKLHWETEFKPVAQQLLNRIQRHHTFLEPLPIPSF

SEQ ID NO: 46225 - protein, 405 aa, Homo sapiens [sequence omitted]

SEQ ID NO: 46226 - protein, 394 aa, Homo sapiens [sequence omitted]

SEQ ID NO: 46227 - protein, 329 aa, Homo sapiens
MGFARLFNSPLKPLADLDPVVVTFWYRAPELLLGARHYTKAIDIWAIGCIFAELLTSEPIFHCRQEDIKTSNPFHHDQLDRIFSVMGFPADKDWEDIRKMPEYPTLQKDFRRTTYANSSLIKYMEKHKVKPDSKVFLLLQKLLTMDPTKRITSEQALQDPYFQEDPLPTLDVFAGCQIPYPKREFLNEDDPEEKGDKNQQQQQNQHQQPTAPPQQAAAPPQAPPPQQNSTQTNGTAGGAGAGVGGTGAGLQHSQDSSLNQVPPNKKPRLGPSGANSGGPVMPSDYQHSSSRLNYQSSVQGSSQSQSTLGYSSSSQQSSQYHPSHQAHRY

SEQ ID NO: 46228 - protein, 216 aa, Homo sapiens
MFGSHNKKRPNNLVIGRMYDYHVLDMIELGIENFVSLKDIKNSKCPEGTKPMLIFAGDDFDVTEDYRRLKSLLIDFFRGPTVSNIRLAGLEYVLHFTALNGKIYFRSYKLLLKKSGCRTPRIELEEMGPSLDLVLRRTHLASDDLYKLSMKMPKALKPKKKKNISHDTFGTTYGRIHMQKQDLSKLQTRKMKGLKKRPAERITEDHEKKSKRIKKN

SEQ ID NO: 46229 - protein, 3008 aa, Homo sapiens
MKIYLYNPTMVKRICELLQSGAIMNKFYQPHEAHIPYLLQLFIDYNLYGMNLINLAAVKFRKARRKSNTLHATGSCKNHLSGNSLADTLFRWEQDEIPSSLILEGVEPQSTCELEVDAVAADILNRLDIEAQIGGNPGLQAIWEDEKQRRRNRNETSQMSQPESQDHRFVPATESEKKFQKRLQEILKQNDFSVTLSGSVDYSDGSQEFSAELTLHSEVLSPEMLQCTPANMVEVHKDKESSKGHTRHKVEEALINEEAILNLMENSQTFQPLTQRLSESPVFMDSSPDEALVHLLAGLESDGYRGERNRMPSPCRSFGNNKYPQNSDDEENEPQIEKEEMELSLVMSQRWDSNIEEHCAKKRSLCRNTHRSSTEDDDSSSGEEMEWSDNSLLLASLSIPQLDGTADENSDNPLNNENSRTHSSVIATSKLSVKPSIFHKDAATLEPSSSAKITFQCKHTSALSSHVLNKEDLIEDLSQTNKNTEKGLDNSVTSFTNESTYSMKYPGSLSSTVHSENSHKENSKKEILPVSSCESSIFDYEEDIPSVTRQVPSRKYTNIRKIEKDSPFIHMHRHPNENTLGKNSFNFSDLNHSKNKVSSEGNEKGNSTALSSLFPSSFTENCELLSCSGENRTMVHSLNSTADESGLNKLKIRYEEFQEHKTEKPSLSQQAAHYMFFPSVVLSNCLTRPQKLSPVTYKLQPGNKPSRLKLNKRKLAGHQETSTKSSETGSTKDNFIQNNPCNSNPEKDNALASDLTKTTRGAFENKTPTDGFIDCHFGDGTLETEQSFGLYGNKYTLRAKRKVNYETEDSESSFVTHNSKISLPHPMEIGESLDGTLKSRKRRKMSKKLPPVIIKYIIINRFRGRKNMLVKLGKIDSKEKQVILTEEKMELYKKLAPLKDFWPKVPDSPATKYPIYPLTPKKSHRRKSKHKSAKKKTGKQQRTNNENIKRTLSFRKKRSHAILSPPSPSYNAETEDCDLNYSDVMSKLGFLSERSTSPINSSPPRCWSPTDPRAEEIMAAAEKEAMLFKGPNVYKKTVNSRIGKTSRARAQIKKSKAKLANPSIVTKKRNKRNQTNKLVDDGKKKPRAKQKTNEKGTSRKHTTLKDEKIKSQSGAEVKFVLKHQNVSEFASSSGGSQLLFKQKDMPLMGSAVDHPLSASLPTGINAQQKLSGCFSSFLESKKSVDLQTFPSSRDDLHPSVVCNSIGPGVSKINVQRPHNQSAMFTLKESTLIQKNIFDLSNHLSQVAQNTQISSGMSSKIEDNANNIQRNYLSSIGKLSEYRNSLESKLDQAYTPNFLHCKDSQQQIVCIAEQSKHSETCSPGNTASEESQMPNNCFVTSLRSPIKQIAWEQKQRGFILDMSNFKPERVKPRSLSEAISQTKALSQCKNRNVSTPSAFGEGQSGLAVLKELLQKRQQKAQNANTTQDPLSNKHQPNKNISGSLEHNKANKRTRSVTSPRKPRTPRSTKQKEKIPKLLKVDSLNLQNSSQLDNSVSDDSPIFFSDPGFESCYSLEDSLSPEHNYNFDINTIGQTGFCSFYSGSQFVPADQNLPQKFLSDAVQDLFPGQAIEKNEFLSHDNQKCDEDKHHTTDSASWIRSGTLSPEIFEKSTIDSNENRRHNQWKNSFHPLTTRSNSIMDSFCVQQAEDCLSEKSRLNRSSVSKEVFLSLPQPNNSDWIQGHTRKEMGQSLDSANTSFTAILSSPDGELVDVACEDLELYVSRNNDMLTPTPDSSPRSTSSPSQSKNGSFTPRTANILKPLMSPPSREEIMATLLDHDLSETIYQEPFCSNPSDVPEKPREIGGRLLMVETRLANDLAEFEGDFSLEGLRLWKTAFSAMTQNPRPGSPLRSGQGVVNKGSSNSPKMVEDKKIVIMPCKCAPSRQLVQVWLQAKEEYERSKKLPKTKPTGVVKSAENFSSSVNPDDKPVVPPKMDVSPCILPTTAHTKEDVDNSQIALQAPTTGCSQTASESQMLPPVASASDPEKDEDDDDNYYISYSSPDSPVIPPWQQPISPDSKALNGDDRPSSPVEELPSLAFENFLKPIKDGIQKSPCSEPQEPLVISPINTRARTGKCESLCFHSTPIIQRKLLERLPEAPGLSPLSTEPKTQKLSNKKGSNTDTLRRVLLTQAKNQFAAVNTPQKETSQIDGPSLNNTYGFKVSIQNLQEAKALHEIQNLTLISVELHARTRRDLEPDPEFDPICALFYCISSDTPLPDTEKTELTGVIVIDKDKTVFSQDIRYQTPLLIRSGITGLEVTYAADEKALFHEIANIIKRYDPDILLGYEIQMHSWGYLLQRAAALSIDLCRMISRVPDDKIENRFAAERDEYGSYTMSEINIVGRITLNLWRIMRNEVALTNYTFENVSFHVLHQRFPLFTFRVLSDWFDNKTDLYRWKMVDHYVSRVRGNLQMLEQLDLIGKTSEMARLFGIQFLHVLTRGSQYRVESMMLRIAKPMNYIPVTPSVQQRSQMRAPQCVPLIMEPESRFYSNSVLVLDFQSLYPSIVIAYNYCFSTCLGHVENLGKYDEFKFGCTSLRVPPDLLYQVRHDITVSPNGVAFVKPSVRKGVLPRMLEEILKTRFMVKQSMKAYKQDRALSRMLDARQLGLKLIANVTFGYTSANFSGRMPCIEVGDSIVHKARETLERAIKLVNDTKKWGARVVYGDTDSMFVLLKGATKEQSFKIGQEIAEAVTATNPKPVKLKFEKVYLPCVLQTKKRYVGYMYETLDQKDPVFDAKGIETVRRDSCPAVSKILERSLKLLFETRDISLIKQYVQRQCMKLLEGKASIQDFIFAKEYRGSFSYKPGACVPALELTRKMLTYDRRSEPQVGERVPYVIIYGTPGVPLIQLVRRPVEVLQDPTLRLNATYYITKQILPPLARIFSLIGIDVFSWYHELPRIHKATSSSRSEPEGRKGTISQYFTTLHCPVCDDLTQHGICSKCRSQPQHVAVILNQEIRELERQQEQLVKICKNCTGCFDRHIPCVSLNCPVLFKLSRVNRELSKAPYLRQLLDQF

SEQ ID NO: 46230 - protein, 1558 aa, Homo sapiens
MDCPTISCDKCVWDLTDDLRLAALSIEEGKSGVLSVSSGAAAHRHVNEINATIYLLKTKLSERENQYALRKIQINNAENTMKSLLSDVEELVEKENQASRKGQLVQKESMDTINHASQLVEQAHDMRDKIQEINNKMLYYGEEHELSPKEISEKLVLAQKMLEEIRSRQPFFTQRELVDEEADEAYELLSQAESWQRLHNETRTLFPVVLEQLDDYNAKLSDLQEALDQALNYVRDAEDMNRATAARQRDHEKQQERVREQMEVVNMSLSTSADSLTTPRLTLSELDDIIKNASGIYAEIDGAKSELQVKLSNLSNLSHDLVQEAIDHAQDLQQEANELSRKLHSSDMNGLVQKALDASNVYENIVNYVSEANETAEFALNTTDRIYDAVSGIDTQIIYHKDESENLLNQARELQAKAESSSDEAVADTSRRVGGALARKSALKTRLSDAVKQLQAAERGDAQQRLGQSRLITEEANRTTMEVQQATAPMANNLTNWSQNLQHFDSSAYNTAVNSARDAVRNLTEVVPQLLDQLRTVEQKRPASNVSASIQRIRELIAQTRSVASKIQVSMMFDGQSAVEVHSRTSMDDLKAFTSLSLYMKPPVKRPELTETADQFILYLGSKNAKKEYMGLAIKNDNLVYVYNLGTKDVEIPLDSKPVSSWPAYFSIVKIERVGKHGKVFLTVPSLSSTAEEKFIKKGEFSGDDSLLDLDPEDTVFYVGGVPSNFKLPTSLNLPGFVGCLELATLNNDVISLYNFKHIYNMDPSTSVPCARDKLAFTQSRAASYFFDGSGYAVVRDITRRGKFGQVTRFDIEVRTPADNGLILLMVNGSMFFRLEMRNGYLHVFYDFGFSGGPVHLEDTLKKAQINDAKYHEISIIYHNDKKMILVVDRRHVKSMDNEKMKIPFTDIYIGGAPPEILQSRALRAHLPLDINFRGCMKGFQFQKKDFNLLEQTETLGVGYGCPEDSLISRRAYFNGQSFIASIQKISFFDGFEGGFNFRTLQPNGLLFYYASGSDVFSISLDNGTVIMDVKGIKVQSVDKQYNDGLSHFVISSVSPTRYELIVDKSRVGSKNPTKGKIEQTQASEKKFYFGGSPISAQYANFTGCISNAYFTRVDRDVEVEDFQRYTEKVHTSLYECPIESSPLFLLHKKGKNLSKPKASQNKKGGKSKDAPSWDPVALKLPERNTPRNSHCHLSNSPRAIEHAYQYGGTANSRQEFEHLKGDFGAKSQFSIRLRTRSSHGMIFYVSDQEENDFMTLFLAHGRLVYMFNVGHKKLKIRSQEKYNDGLWHDVIFIRERSSGRLVIDGLRVLEESLPPTEATWKIKGPIYLGGVAPGKAVKNVQINSIYSFSGCLSNLQLNGASITSASQTFSVTPCFEGPMETGTYFSTEGGYVVLDESFNIGLKFEIAFEVRPRSSSGTLVHGHSVNGEYLNVHMKNGQVIVKVNNGIRDFSTSVTPKQSLCDGRWHRITVIRDSNVVQLDVDSEVNHVVGPLNPKPIDHREPVFVGGVPESLLTPRLAPSKPFTGCIRHFVIDGHPVSFSKAALVSGAVSINSCPAA

SEQ ID NO: 46231 - protein, 272 aa, Homo sapiens [sequence omitted]

SEQ ID NO: 46232 - protein, 277 aa, Homo sapiens
MIPFTNANYDSHPMLYFSRAEVAELQLRAASSHEHIAARLTEAVHTMLSSPLEYLPPWDPKDYSARWNEIFGNNLGALAMFCVLYPENIEARDMAKDYMERMAAQPSWLVKDAPWDEVPLAHSLVGFATAYDFLYNYLSKTQQEKFLEVIANASGYMYETSYRRGWGFQYLHNHQPTNCMALLTGSLVLMNQGYLQEAYLWTKQVLTIMEKSLVLLREVTDGSLYEGVAYGSYTTRSLFQYMFLVQRHFNINHFGHPWLKQHFAFMYRTILPGMMAA

SEQ ID NO: 46233 - protein, 197 aa, Homo sapiens
MIPFTNANYDSHPMLYFSRAEVAELQLRAASSHEHIAARLTEAVHTMLSSPLEYLPPWDPKDYSARWNEIFGNNLGALAMFCVLYPENIEARDMAKDYMERMAAQPSWLVKDAPWDEVPLAHSLVGFATAYDFLYNYLSKTQQEKFLEVIANASGYMYETSYRRGWGFQYLHNHQPTNCMALLTGSLVLMNQGMMAA

SEQ ID NO: 46234 - protein, 220 aa, Homo sapiens
MFCVLYPENIEARDMAKDYMERMAAQPSWLVKDAPWDEVPLAHSLVGFATAYDFLYNYLSKTQQEKFLEVIANASGYMYETSYRRGWGFQYLHNHQPTNCMALLTGSLVLMNQGYLQEAYLWTKQVLTIMEKSLVLLREVTDGSLYEGVAYGSYTTRSLFQYMFLVQRHFNINHFGHPWLKQHFAFMYRTILPGVGLDLDSSCYHHSSDFYICHPMPISS

SEQ ID NO: 46235 - protein, 613 aa, Homo sapiens
MGISIPAQSSAHQLYGFAHGKPSPDESRYDGSLKSVPPPDFGTPTLHYFEDWGVVTYGSALPAEINRSFLSFKSGKLGGRAIYDIVHRNKYKDWIKGWRNFNAGHEHPDQNSFTFAPNGVPFITEALYGPKYTFFNNVLMFSPAVSKSCFSPWVGQVTEDCSSKWSKYKHDLAASCQGRVVAAEEKNGVVFIRGEGVGAYNPQLNLKNVQRNLILLHPQLLLLVDQIHLGEESPLETAASFFHNVDVPFEETVVDGVHGAFIRQRDGLYKMYWMDDTGYSEKATFASVTYPRGYPYNGTNYVNVTMHLRSPITRAAYLFIGPSIDVQSFTVHGDSQQLDVFIATSKHAYATYLWTGEATGQSAFAQVIADRHKILFDRNSAIKSSIVPEVKDYAAIVEQNLQHFKPVFQLLEKQILSRVRNTASFRKTAERLLRFSDKRQTEEAIDRIFAISQQQQQQSKSKKNRRAGKRYKFVDAVPDIFAQIEVNEKKIRQKAQILAQKELPIDEDEEMKDLLDFADVTYEKHKNGGLIKGRFGQARMVTTTHSRAPSLSASYTRLFLILNIAIFFVMLAMQLTYFQRAQSLHGQRCLYAVLLIDSCILLWLYSSCSQSQC

SEQ ID NO: 46236 - protein, 145 aa, Homo sapiens [sequence omitted]

SEQ ID NO: 46237 - protein, 554 aa, Homo sapiens
MESEIICPFCKLSGVNYDEMCFHIETAHFEQNTLERNFERINTVQYGTSDNKKDNTLQCGMEVNSSILSGCASNHPKNSAQNLTKDSTLKHEGFYSENLTESRKFLKSREKQSSLTEIKGSVYETTYSPPECPFCGKIEEHSEDMETHVKTKHANLLDIPLEDCDQPLYDCPMCGLICTNYHILQEHVDLHLEENSFQQGMDRVQCSGDLQLAHQLQQEEDRKRRSEESRQEIEEFQKLQRQYGLDNSGGYKQQQLRNMEIEVNRGRMPPSEFHRRKADMMESLALGFDDGKTKTSGIIEALHRYYQNAATDVRRVWLSSVVDHFHSSLGDKGWGCGYRNFQMLLSSLLQNDAYNDCLKGMLIPCIPKIQSMIEDAWKEGFDPQGASQLNNRLQGTKAWIGACEVYILLTSLRVKCHIVDFHKSTGPLGTHPRLFEWILNYYSSEGEGSPKVVCTSKPPIYLQHQGHSRTVIGIEEKKNRTLCLLILDPGCPSREMQKLLKQDIEASSLKQLRKSMGNLKHKQYQILAVEGALSLEEKLARRQASQVFTAEKIP

SEQ ID NO: 46238 - protein, 487 aa, Homo sapiens
MTSKNYPGTYPNHTVCEKTITVPKGKRLILRLGDLDIESQTCASDYLLFTSSSDQYGPYCGSMTVPKELLLNTSEVTVRFESGSHISGRGFLLTYASSDHPDLITCLERASHYLKTEYSKFCPAGCRDVAGDISGNMVDGYRDTSLLCKAAIHAGIIADELGGQISVLQRKGISRYEGILANGVLSRDGSLSDKRFLFTSNGCSRSLSFEPDGQIRASSSWQSVNESGDQVHWSPGQARLQDQGPSWASGDSSNNHKPREWLEIDLGEKKKITGIRTTGSTQSNFNFYVKSFVMNFKNNNSKWKTYKGIVNNEEKVFQGNSNFRDPVQNNFIPPIVARYVRVVPQTWHQRIALKVELIGCQITQGNDSLVWRKTSQSTSVSTKKEDETITRPIPSEETSTGINITTVAIPLVLLVVLVFAGMGIFAAFRKKKKKGSPYGSAEAQKTDCWKQIKYPFARHQSAEFTISYDNEKEMTQKLDLITSDMAG

SEQ ID NO: 46239 - protein, 998 aa, Homo sapiens
MCNKCKHVFVIKADFEQYYTFCRPSSCPSLESCDSSKFTCLSGLSSSPTRCRDYQEIKIQEQVQRLSVGSIPRSMKVILEDDLVDSCKSGDDLTIYGIVMQRWKPFQQDVRCEVEIVLKANYIQVNNEQSSGIIMDEEVQKEFEDFWEYYKSDPFAGRNVILASLCPQVFGMYLVKLAVAMVLAGGIQRTDATGTRVRGESHLLLVGDPGTGKSQFLKYAAKITPRSVLTTGIGSTSAGLTVTAVKDSGEWNLEAGALVLADAGLCCIDEFNSLKEHDRTSIHEAMEQQTISVAKAGLVCKLNTRTTILAATNPKGQYDPQESVSVNIALGSPLLSRFDLILVLLDTKNEDWDRIISSFILENKGYPSKSEKLWSMEKMKTYFCLIRNLQPTLSDVGNQVLLRYYQMQRQSDCRNAARTTIRLLESLIRLAEAHARLMFRDTVTLEDAITVVSVMESSMQGGALLGGVNALHTSFPENPGEQYQRQCELILEKLELQSLLSEELRRLERLQNQSVHQSQPRVLEVETTPGSLRNGPGEESNFRTSSQQEINYSTHIFSPGGSPEGSPVLDPPPHLEPNRSTSRKHSAQHKNNRDDSLDWFDFMATHQSEPKNTVVVSPHPKTSGENMASKISNSTSQGKEKSEPGQRSKVDIGLLPSPGETGVPWRADNVESNKKKRLALDSEAAVSADKPDSVLTHHVPRNLQKLCKERAQKLCRNSTRVPAQCTVPSHPQSTPVHSPDRMLDSPKRKRPKSLAQVEEPAIENVKPPGSPVAKLAKFTFKQKSKLIHSFEDHSHVSPGATKIAVHSPKISQRRTRRDAALPVKRPGKLTSTPGNQISSQPQGETKEVSQQPPEKHGPREKVMCAPEKRIIQPELELGNETGCAHLTCEGDKKEEVSGSNKSGKVHACTLARLANFCFTPPSESKSKSPPPERKNRGERGPSSPPTTTAPMRVSKRKSFQLRGSTEKLIVSKESLFTLPELGDEAFDCDWDEEMRKKS

SEQ ID NO: 46240 - protein, 115 aa, Homo sapiens
MLSEEEKEELKAELVQLEDEITTLRQVLSAKERHLVEIKQKLGMNLMNELKQNFSKSWHDMQTTTAYKKTHETLSHAGQKATAAFSNVGTAISKKFGDMSYSIRHSISMPAMRRK

SEQ ID NO: 46241 - protein, 684 aa, Homo sapiens
MFDPHKSDPLVIENGCEEYGLICPMEEVVSIALYNDISHMKIKDALPSPGEWEDLASEKDINPFSKFKSINKEKRQQNGEKIMTSDSRPIVPLEKSTGHTPTKPSGSSVSEKLKKLDSSRETSHGSPTVTKLSKEPSDTSSAFESTAKENFLGEDDDFVDLEELSSQTGGGMHKKDTLKECLSLDPEERKKAESQINNSAVEMQVQSALAFLGTENDVELKGALDLETCEKQDIMPEVDKQSGSPESRVENTLNIHEDLDKVKLIEYYLTKNKEGPQVSENLQKTELSDGKSIEPGGIDITLSSSLSQAGDPITEGNKEPDKTWVKKGEPLPVKLNSSTEANVIKEALDSSLESTLDNSCQGAQMDNKSEVQLWLLKRIQVPIEDILPSKEEKSKTPPMFLCIKVGKPMRKSFATHTAAMVQQYGKRRKQPEYWFAVPRERVDHLYTFFVQWSPDVYGKDAKEQGFVVVEKEELNMIDNFFSEPTTKSWEIITVEEAKRRKSTCSYYEDEDEEVLPVLRPHSALLENMHIEQLARRLPARVQGYPWRLAYSTLEHGTSLKTLYRKSASLDSPVLLVIKDMDNQIFGAYATHPFKFSDHYYGTGETFLYTFSPHFKVFKWSGENSYFINGDISSLELGGGGGRFGLWLDADLYHGRSNSCSTFNNDILSKKEDFIVQDLEVWAFD

SEQ ID NO: 46242 - protein, 695 aa, Homo sapiens
MFDPHKSDPLVIENGCEEYGLICPMEEVVSIALYNDISHMKIKDALPSDLPQDLCPLYRPGEWEDLASEKDINPFSKFKSINKEKRQQNGEKIMTSDSRPIVPLEKSTGHTPTKPSGSSVSEKLKKLDSSRETSHGSPTVTKLSKEPSDTSSAFESTAKENFLGEDDDFVDLEELSSQTGGGMHKKDTLKECLSLDPEERKKAESQINNSAVEMQVQSALAFLGTENDVELKGALDLETCEKQDIMPEVDKQSGSPESRVENTLNIHEDLDKVKLIEYYLTKNKEGPQVSENLQKTELSDGKSIEPGGIDITLSSSLSQAGDPITEGNKEPDKTWVKKGEPLPVKLNSSTEANVIKEALDSSLESTLDNSCQGAQMDNKSEVQLWLLKRIQVPIEDILPSKEEKSKTPPMFLCIKVGKPMRKSFATHTAAMVQQYGKRRKQPEYWFAVPRERVDHLYTFFVQWSPDVYGKDAKEQGFVVVEKEELNMIDNFFSEPTTKSWEIITVEEAKRRKSTCSYYEDEDEEVLPVLRPHSALLENMHIEQLARRLPARVQGYPWRLAYSTLEHGTSLKTLYRKSASLDSPVLLVIKDMDNQIFGAYATHPFKFSDHYYGTGETFLYTFSPHFKVFKWSGENSYFINGDISSLELGGGGGRFGLWLDADLYHGRSNSCSTFNNDILSKKEDFIVQDLEVWAFD

SEQ ID NO: 46243 - protein, 3058 aa, Homo sapiens [sequence omitted]

SEQ ID NO: 46244 - protein, 618 aa, Homo sapiens
MNQESTTIKVMEKPPFDRSISQDSLDELSMEDYWIELENIKKSSENSQEDQEVVVVKEPDEGELEEEWLKEAGLSNLFGESAGDPQESIVFLSTLTRTQAAAVQKRVETVSQTLRKKNKQYQIPDVRDIFAQQRESKETAPGGTESQSLRTNENKYQGRDDEASNLVGEEKLIPPEETPAPETDINLEVSFAEQALNQKESSKEKIQKSKGDDATLPSFRLPKDKTGTTRIGDLAPQDMKKVCHLALIELTALYDVLGIELKQQKAVKIKTKDSGLFCVPLTALLEQDQRKVPGMRIPLIFQKLISRIEERGLETEGLLRIPGAAIRIKNLCQELEAKFYEGTFNWESVKQHDAASLLKLFIRELPQPLLSVEYLKAFQAVQNLPTKKQQLQALNLLVILLPDANRDTLKALLEFLQRVIDNKEKNKMTVMNVAMVMAPNLFMCHALGLKSSEQREFVMAAGTANTMHLLIKYQKLLWTIPKFIVNQVRKQNTENHKKDKRAMKKLLKKMAYDREKYEKQDKSTNDADVPQGVIRVQAPHLSKVSMAIQLTEELKASDVLARFLSQESGVAQTLKKGEVFLYEIGGNIGERCLDDDTYMKDLYQLNPNAEWVIKSKPL

SEQ ID NO: 46245 - protein, 843 aa, Homo sapiens
MQPTELVSKEREEKVKETQEDKLEGGAAKRETKEVQTNELKAEKASQKVTKKTKTVQCKVTLLDGTEYSCDLEKHAKGQVLFDKVCEHLNLLEKDYFGLLFQESPEQKNWLDPAKEIKRQLRNLPWLFTFNVKFYPPDPSQLTEDITRYFLCLQLRQDIASGRLPCSFVTHALLGSYTLQAELGDYDPEEHGSIDLSEFQFAPTQTKELEEKVAELHKTHRGLSPAQADSQFLENAKRLSMYGVDLHHAKDSEGVDIKLGVCANGLLIYKDRLRINRFAWPKILKISYKRSNFYIKVRPAELEQFESTIGFKLPNHRAAKRLWKVCVEHHTFYRLVSPEQPPKAKFLTLGSKFRYSGRTQAQTRQASTLIDRPAPHFERTSSKRVSRSLDGAPIGVMDQSLMKDFPGAAGEISAYGPGLVSIAVVQDGDGRREVRSPTKAPHLQLIEGKKNSLRVEGDNIYVRHSNLMLEELDKAQEDILKHQASISELKRNFMESTPEPRPNEWEKRRITPLSLQTQGSSHETLNIVEEKKRAEVGKDERVITEEMNGKEISPGSGPGEIRKVEPVTQKDSTSLSSESSSSSSESEEEDVGEYRPHHRVTEGTIREEQEYEEEVEEEPRPAAKVVEREEAVPEASPVTQAGASVITVETVIQENVGAQKIPGEKSVHEGALKQDMGEEAEEEPQKVNGEVSHVDIDVLPQIICCSEPPVVKTEMVTISDASQRTEISTKEVPIVQTETKTITYESPQIDGGAGGDSGTLLTAQTITSESVSTTTTTHITKTVKGGISETRIEKRIVITGDGDIDHDQALAQAIREAREQHPDMSVTRVVVHKETELAEEGED

SEQ ID NO: 46246 - protein, 690 aa, Homo sapiens
MQPTELVSKEREEKVKETQEDKLEGGAAKRETKEVQTNELKAEKASQKVTKKTKTVQCKVTLLDGTEYSCDLEKHAKGQVLFDKVCEHLNLLEKDYFGLLFQESPEQKNWLDPAKEIKRQLRNLPWLFTFNVKFYPPDPSQLTEDITRYFLCLQLRQDIASGRLPCSFVTHALLGSYTLQAELGDYDPEEHGSIDLSEFQFAPTQTKELEEKVAELHKTHRGLSPAQADSQFLENAKRLSMYGVDLHHAKDSEGVDIKLGVCANGLLIYKDRLRINRFAWPKILKISYKRSNFYIKVRPAELEQFESTIGFKLPNHRAAKRLWKVCVEHHTFYRLVSPEQPPKAKFLTLGSKFRYSGRTQAQTRQASTLIDRPAPHFERTSSKRVSRSLDGAPIGVMDQSLMKDFPGAAGEISAYGPGLVSIAVVQDGDGRREVRSPTKAPHLQLIEGKSSHETLNIVEEKKRAEVGKDERVITEEMNGKEISPGSGPGEIRKVEPVTQKDSTSLSSESSSSSSESEEEDVGEYRPHHRVTEGTIREEQEYEEEVEEEPRPAAKPPVVKTEMVTISDASQRTEISTKEVPIVQTETKTITYESPQIDGGAGGDSGTLLTAQTITSESVSTTTTTHITKTVKGGISETRIEKRIVITGDGDIDHDQALAQAIREAREQHPDMSVTRVVVHKETELAEEGED

SEQ ID NO: 46247 - protein, 773 aa, Homo sapiens
MQPTELVSKEREEKVKETQEDKLEGGAAKRETKEVQTNELKAEKASQKVTKKTKTVQCKVTLLDGTEYSCDLEKHAKGQVLFDKVCEHLNLLEKDYFGLLFQESPEQKNWLDPAKEIKRQLRNLPWLFTFNVKFYPPDPSQLTEDITRYFLCLQLRQDIASGRLPCSFVTHALLGSYTLQAELGDYDPEEHGSIDLSEFQFAPTQTKELEEKVAELHKTHRGLSPAQADSQFLENAKRLSMYGVDLHHAKDSEGVDIKLGVCANGLLIYKDRLRINRFAWPKILKISYKRSNFYIKVRPAELEQFESTIGFKLPNHRAAKRLWKVCVEHHTFYRLVSPEQPPKAKFLTLGSKFRYSGRTQAQTRQASTLIDRPAPHFERTSSKRVSRSLDGAPIGVMDQSLMKDFPGAAGEISAYGPGLVSIAVVQDGDGRREVRSPTKAPHLQLIEGKSSHETLNIVEEKKRAEVGKDERVITEEMNGKEISPGSGPGEIRKVEPVTQKDSTSLSSESSSSSSESEEEDVGEYRPHHRVTEGTIREEQEYEEEVEEEPRPAAKVVEREEAVPEASPVTQAGASVITVETVIQENVGAQKIPGEKSVHEGALKQDMGEEAEEEPQKVNGEVSHVDIDVLPQIICCSEPPVVKTEMVTISDASQRTEISTKEVPIVQTETKTITYESPQIDGGAGGDSGTLLTAQTITSESVSTTTTTHITKTVKGGISETRIEKRIVITGDGDIDHDQALAQAIREAREQHPDMSVTRVVVHKETELAEEGED

SEQ ID NO: 46248 - protein, 438 aa, Homo sapiens
MRVLRLLRLPPPLLPLPRGLRLGKLRASAGLASAARAPAACRWTPRRPSAPPSGPEPRPGLRLGLASSPGTRPATAAAASPDAPPACAATMERPEAGGINSNECENVSRKKKMSEEFEANTMDSLVDMPFATVDIQDDCGITDEPQINLKRSQENEWVKSDQVKKRKKKRKDYQPNYFLSIPITNKEIIKGIKILQNAIIQQDERLAKAMVSDGSFHITLLVMQLLNEDEVNIGIDALLELKPFIEELLQGKHLTLPFQGIGTFGNQVGFVKLAEGDHVNSLLEIAETANRTFQEKGILVGESRSFKPHLTFMKLSKSPWLRKNGVKKIDPDLYEKFISHRFGEEILYRIDLCSMLKKKQSNGYYHCESSIVIGEKNGGEPDDAELVRLSKRLVENAVLKAVQQYLEETQNKNKPGEGSSVKTEAADQNGNDNENNRK

SEQ ID NO: 46249 - protein, 873 aa, Homo sapiens
MDVGEEPLEKAARARTAKDPNTYKVLSLVLSVCVLTTILGCIFGLKPSCAKEVKSCKGRCFERTFGNCRCDAACVELGNCCLDYQETCIEPEHIWTCNKFRCGEKRLTRSLCACSDDCKDKGDCCINYSSVCQGEKSWVEEPCESINEPQCPAGFETPPTLLFSLDGFRAEYLHTWGGLLPVISKLKKCGTYTKNMRPVYPTKTFPNHYSIVTGLYPESHGIIDNKMYDPKMNASFSLKSKEKFNPEWYKGEPIWVTAKYQGLKSGTFFWPGSDVEINGIFPDIYKMYNGSVPFEERILAVLQWLQLPKDERPHFYTLYLEEPDSSGHSYGPVSSEVIKALQRVDGMVGMLMDGLKELNLHRCLNLILISDHGMEQGSCKKYIYLNKYLGDVKNIKVIYGPAARLRPSDVPDKYYSFNYEGIARNLSCREPNQHFKPYLKHFLPKRLHFAKSDRIEPLTFYLDPQWQLALNPSERKYCGSGFHGSDNVFSNMQALFVGYGPGFKHGIEADTFENIEVYNLMCDLLNLTPAPNNGTHGSLNHLLKNPVYTPKHPKEVHPLVQCPFTRNPRDNLGCSCNPSILPIEDFQTQFNLTVAEEKIIKHETLPYGRPRVLQKENTICLLSQHQFMSGYSQDILMPLWTSYTVDRNDSFSTEDFSNCLYQDFRIPLSPVHKCSFYKNNTKVSYGFLSPPQLNKNSSGIYSEALLTTNIVPMYQSFQVIWRYFHDTLLRKYAEERNGVNVVSGPVFDFDYDGRCDSLENLRQKRRVIRNQEILIPTHFFIVLTSCKDTSQTPLHCENLDTLAFILPHRTDNSESCVHGKHDSSWVEELLMLHRARITDVEHITGLSFYQQRKEPVSDILKLKTHLPTFSQED

SEQ ID NO: 46250 - protein, 585 aa, Homo sapiens
MQDLASPHTLVGGGDTPGSSKLEKSNLSSTSVTTNGTGVSLLAVKTEPLNSSETTATTGDGALDTFTGSVITSSGYSPRSAHQYSPQLYPSKPYPHILSTPAAQTMSAYAGQTQYSGMQQPAVYTAYSQTGQPYSLPTYDLGVMLPAIKTESGLSQTQSPLQSGCLSYSPGFSTPQPGQTPYSYQMPGSSFAPSSTIYANNSVSNSTNFSGSQQDYPSYTAFGQNQYAQYYSASTYGAYMTSNNTADGTPSSTSTYQLQESLPGLTNQPGEFDTMQSPSTPIKDLDERTCRSSGSKSRGRGRKNNPSPPPDSDLERVFVWDLDETIIVFHSLLTGSYAQKYGKDPPMAVTLGLRMEEMIFNLADTHLFFNDLEECDQVHIDDVSSDDNGQDLSTYSFATDGFHAAASSANLCLPTGVRGGVDWMRKLAFRYRRVKELYNTYKNNVGGLLGPAKRDAWLQLRAEIEGLTDSWLTNALKSLSIISTRSNCINVLVTTTQLIPALAKVLLYSLGGAFPIENIYSATKIGKESCFERIMQRFGRKVVYVVIGDGVEEEQAAKKHNMPFWRISSHSDLLALHQALELEYL

SEQ ID NO: 46251 - protein, 442 aa, Homo sapiens
MQGALARARLESLLRPRHKKRAEAQKRSESFLLSGLAFMKQRRMGLNDFIQKIANNSYACKHPEVQSILKISQPQEPELMNANPSPPPSPSQQINLGPSSNPHAKPSDFHFLKVIGKGSFGKVLLARHKAEEVFYAVKVLQKKAILKKKEEKHIMSERNVLLKNVKHPFLVGLHFSFQTADKLYFVLDYINGGELFYHLQRERCFLEPRARFYAAEIASALGYLHSLNIVYRDLKPENILLDSQGHIVLTDFGLCKENIEHNSTTSTFCGTPEYLAPEVLHKQPYDRTVDWWCLGAVLYEMLYGLPPFYSRNTAEMYDNILNKPLQLKPNITNSARHLLEGLLQKDRTKRLGAKDDFMEIKSHVFFSLINWDDLINKKITPPFNPNVSGPNDLRHFDPEFTEEPVPNSIGKSPDSVLVTASVKEAAEAFLGFSYAPPTDSFL

SEQ ID NO: 46252 - protein, 402 aa, Homo sapiens [sequence omitted]

SEQ ID NO: 46253 - protein, 22 aa, Homo sapiens
MLCILSPLHKAERCLQLRVKQK

SEQ ID NO: 46254 - protein, 425 aa, Homo sapiens [sequence omitted]

SEQ ID NO: 46255 - protein, 457 aa, Homo sapiens
MIRMVKLVWKSKSELQATKQRGILDNEDALRSFPGDIRLRGQTGVRAERRGSYPFIDFRLLNSTTYSGEIGTKKKVKRLLSFQRYFHASRLLRGIIPQAPLHLLDEDYLGQARHMLSKVGMWDFDIFLFDRLTNGNSLVTLLCHLFNTHGLIHHFKLDMVTLHRFLVMVQEDYHSQNPYHNAVHAADVTQAMHCYLKEPKLASFLTPLDIMLGLLAAAAHDVDHPGVNQPFLIKTNHHLANLYQNMSVLENHHWRSTIGMLRESRLLAHLPKEMTQDIEQQLGSLILATDINRQNEFLTRLKAHLHNKDLRLEDAQDRHFMLQIALKCADICNPCRIWEMSKQWSERVCEEFYRQGELEQKFELEISPLCNQQKDSIPSIQIGFMSYIVEPLFREWAHFTGNSTLSENMLGHLAHNKAQWKSLLPRQHRSRGSSGSGPDHDHAGQGTESEEQEGDSP

SEQ ID NO: 46256 - protein, 501 aa, Homo sapiens
MLSTVHSAKNTPSQHSHSIQHSPERSGSGSVGNGSSRYSPSQNSPIHHIPSRRSPAKTIAPQNAPRDESRGRSSFYPDGGDQETAKTGKFLKSPPLHKNLDAREKSTFREESPLRIKMIASDSHRPEVKLKMAPVPLDDSNRPASLTKDRLLASTLVHSVKKEQEFRSIFDHIKLPQASKSTSESFIQHIVSLVHHVKEQYFKSAAMTLNERFTSYQKATEEHSTRQKSPEIHRRIDISPSTLRKHTRLAGEERVFKEENQKGDKKLRCDSADLRHDIDRRRKERSKERGDSKGSRESSGSRKQEKTPKDYKEYKSYKDDSKHKREQDHSRSSSSSASPSSPSSREEKESKKEREEEFKTHHEMKEYSGFAGVSRPRGTFFRIRGRGRARGVFAGTNTGPNNSNTTFQKRPKEEEWDPEYTPKSKKYFLHDDRDDGVDYWAKRGRGRGTFQRGRGRFNFKKSGSSPKWTHDKYQGDGIVEDEEETMENNEEKKDRRKEEKE

SEQ ID NO: 46257 - protein, 1198 aa, Homo sapiens
MANNIILYCDTNSDSLQSLKEIICQKNTMCTGNYTFVPYMITPHNKVYCCDSSFMKGLTELMQPNFELLLGPICLPLVDRFIQLLKVAQASSSQYFRESILNDIRKARNLYTGKELAAELARIRQRVDNIEVLTADIVINLLLSYRDIQDYDSIVKLVETLEKLPTFDLASHHHVKFHYAFALNRRNLPGDRAKALDIMIPMVQSEGQVASDMYCLVGRIYKDMFLDSNFTDTESRDHGASWFKKAFESEPTLQSGINYAVLLLAAGHQFESSFELRKVGVKLSSLLGKKGNLEKLQSYWEVGFFLGASVLANDHMRVIQASEKLFKLKTPAWYLKSIVETILIYKHFVKLTTEQPVAKQELVDFWMDFLVEATKTDVTVVRFPVLILEPTKIYQPSYLSINNEVEEKTISIWHVLPDDKKGIHEWNFSASSVRGVSISKFEERCCFLYVLHNSDDFQIYFCTELHCKKFFEMVNTITEEKGRSTEEGDCESDLLEYDYEYDENGDRVVLGKGTYGIVYAGRDLSNQVRIAIKEIPERDSRYSQPLHEEIALHKHLKHKNIVQYLGSFSENGFIKIFMEQVPGGSLSALLRSKWGPLKDNEQTIGFYTKQILEGLKYLHDNQIVHRDIKGDNVLINTYSGVLKISDFGTSKRLAGINPCTETFTGTLQYMAPEIIDKGPRGYGKAADIWSLGCTIIEMATGKPPFYELGEPQAAMFKVGMFKVHPEIPESMSAEAKAFILKCFEPDPDKRACANDLLVDEFLKVSSKKKKTQPKLSALSAGSNEYLRSISLPVPVLVEDTSSSSEYGSVSPDTELKVDPFSFKTRAKSCGERDVKGIRTLFLGIPDENFEDHSAPPSPEEKDSGFFMLRKDSERRATLHRILTEDQDKIVRNLMESLAQGAEEPKLKWEHITTLIASLREFVRSTDRKIIATTLSKLKLELDFDSHGISQVQVVLFGFQDAVNKVLRNHNIKPHWMFALDSIIRKAVQTAITILVPELRPHFSLASESDTADQEDLDVEDDHEEQPSNQTVRRPQAVIEDAVATSGVSTLSSTVSHDSQSAHRSLNVQLGRMKIETNRLLEELVRKEKELQALLHRAIEEKDQEIKHLKLKSQPIEIPELPVFHLNSSGTNTEDSELTDWLRVNGADEDTISRFLAEDYTLLDVLYYVTRDDLKCLRLRGGMLCTLWKAIIDFRNKQT

SEQ ID NO: 46258 - protein, 125 aa, Homo sapiens
MEYAWGRAAAAMLFCGFIILVICFILSFFALCGPQMLVFLRVIGGLLALAAVFQIISLVIYPVKYTQTFTLHANPAVTYIYNWAYGFGWAATIILIGCAFFFCCLPNYEDDLLGNAKPRYFYTSA

SEQ ID NO: 46259 - protein, 1306 aa, Homo sapiens [sequence omitted]

SEQ ID NO: 46260 - protein, 717 aa, Homo sapiens
MELCGATRLGYFGRSQFYIALKLVAVAQSGFPLRVESINTVKDLPLPRFVASKNEQESRHAASYSSDSENQGSYSGVIPPPPGRGQVKKGSVSHDTVQPRTSADAQEPASPVVSPQQSPPTSPHTWRKHSRHPSGGNSERPLAGPGPFWSPFGEAQSGSSAGDAVWSGHSPPPPQENWVSFADTPPTSTLLTMHPASVQDQTTVRTVASATTAIEIRRQSSSYDDPWKITDEQRQYYVNQFKTIQPDLNGFIPGSAAKEFFTKSKLPILELSHIWELSDFDKDGALTLDEFCAAFHLVVARKNGYDLPEKLPESLMPKLIDLEDSADVGDQPGEVGYSGSPAEAPPSKSPSMPSLNQTWPELNQSSEDTAIVHPVPIRMTPSKIHMQEMELKRTGSDHTNPTSPLLVKPSDLLEENKINSSVKFASGNTVADGYSSSDSFTSDPEQIGSNVTRQRSHSGTSPDNTAPPPPPPRPQPSHSRSSSLDMNRTFTVTTGQQQAGVVAHPPAVPPRPQPSQAPGPAVHRPVDADGLITHTSTSPQQIPEQPNFADFSQFEVFAASNVNDEQDDEAEKHPEVLPAEKASDPASSLRVAKTDSKTEEKTAASAPANVSKGTTPLAPPPKPVRRRLKSEDELRPEVDEHTQKTGVLAAVLASQPSIPRSVGKDKKAIQASIRRNKETNTVLARLNSELQQQLKDVLEERISLEVQLEQLRPFSHL

SEQ ID NO: 46261 - protein, 1126 aa, Homo sapiens
MWTLRAPTGYIIQITFNDFDIEEAPNCIYDSLSLDNGESQTKFCGATAKGLSFNSSANEMHVSFSSDFSIQKKGFNASYIRVAVSLRNQKVILPQTSDAYQVSVAKSISIPELSAFTLCFEATKVGHEDSDWTAFSYSNASFTQLLSFGKAKSGYFLSISDSKCLLNNALPVKEKEDIFAESFEQLCLVWNNSLGSIGVNFKRNYETVPCDSTISKVIPGNGKLLLGSNQNEIVSLKGDIYNFRLWNFTMNAKILSNLSCNVKGNVVDWQNDFWNIPNLALKAESNLSCGSYLIPLPAAELASCADLGTLCQDGIIYRISVVIQNILRHPEVKVQSKVAEWLNSTFQNWNYTVYVVNISFHLSAGEDKIKVKRSLEDEPRLVLWALLVYNATNNTNLEGKIIQQKLLKNNESLDEGLRLHTVNVRQLGHCLAMEEPKGYYWPSIQPSEYVLPCPDKPGFSASRICFYNATNPLVTYWGPVDISNCLKEANEVANQILNLTADGQNLTSANITNIVEQVKRIVNKEENIDITLGSTLMNIFSNILSSSDSDLLESSSEALKTIDELAFKIDLNSTSHVNITTRNLALSVSSLLPGTNAISNFSIGLPSNNESYFQMDFESGQVDPLASVILPPNLLENLSPEDSVLVRRAQFTFFNKTGLFQDVGPQRKTLVSYVMACSIGNITIQNLKDPVQIKIKHTRTQEVHHPICAFWDLNKNKSFGGWNTSGCVAHRDSDASETVCLCNHFTHFGVLMDLPRSASQLDARNTKVLTFISYIGCGISAIFSAATLLTYVAFEKLRRDYPSKILMNLSTALLFLNLLFLLDGWITSFNVDGLCIAVAVLLHFFLLATFTWMGLEAIHMYIALVKVFNTYIRRYILKFCIIGWGLPALVVSVVLASRNNNEVYGKESYGKEKGDEFCWIQDPVIFYVTCAGYFGVMFFLNIAMFIVVMVQICGRNGKRSNRTLREEVLRNLRSVVSLTFLLGMTWGFAFFAWGPLNIPFMYLFSIFNSLQGLFIFIFHCAMKENVQKQWRQHLCCGRFRLADNSDWSKTATNIIKKSSDNLGKSLSSSSIGSNSTYLTSKSKSSSTTYFKRNSHTDNVSYEHSFNKSGSLRQCFHGQVLVKTGPC

SEQ ID NO: 46262 - protein, 2337 aa, Homo sapiens
MHSTKPHQSLEGPPWLFPGPLPSVASEDLFPFPIHGHSGGYPRKKISSLNPAYSQYSQKSIEQAEEAHKKEHKPKKPGKYICPYCSRACAKPSVLKKHIRSHTGERPYPCIPCGFSFKTKSNLYKHRKSHAHAIKAGLVPFTESAVSKLDLEAGFIDVEAEIHSDGEQSTDTDEESSLFAEASDKMSPGPPIPLDIASRGGYHGSLEESLGGPMKVPILIIPKSGIPLPNESSQYIGPDMLPNPSLNTKADDSHTVKQKLALRLSEKKGQDSEPSLNLLSPHSKGSTDSGYFSRSESAEQQISPPNTNAKSYEEIIFGKYCRLSPRNALSVTTTSQERAAMGRKGIMEPLPHVNTRLDVKMFEDPVSQLIPSKGDVDPSQTSMLKSTKFNSESRQPQIIPSSIRNEGKLYPANFQGSNPVLLEAPVDSSPLIRSNSVPTSSATNLTIPPSLRGSHSFDERMTGSDDVFYPGTVGIPPQRMLRRQAAFELPSVQEGHVEVEHHGRMLKGISSSSLKEKKLSPGDRVGYDYDVCRKPYKKWEDSETPKQNYRDISCLSSLKHGGEYFMDPVVPLQGVPSMFGTTCENRKRRKEKSVGDEEDTPMICSSIVSTPVGIMASDYDPKLQMQEGVRSGFAMAGHENLSHGHTERFDPCRPQLQPGSPSLVSEESPSAIDSDKMSDLGGRKPPGNVISVIQHTNSLSRPNSFERSESAELVACTQDKAPSPSETCDSEISEAPVSPEWAPPGDGAESGGKPSPSQQVQQQSYHTQPRLVRQHNIQVPEIRVTEEPDKPEKEKEAQSKEPEKPVEEFQWPQRSETLSQLPAEKLPPKKKRLRLADMEHSSGESSFESTGTGLSRSPSQESNLSHSSSFSMSFEREETSKLSALPKQDEFGKHSEFLTVPAGSYSLSVPGHHHQKEMRRCSSEQMPCPHPAEVPEVRSKSFDYGNLSHAPVSGAAASTVSPSRERKKCFLVRQASFSGSPEISQGEVGMDQSVKQEQLEHLHAGLRSGWHHGPPAVLPPLQQEDPGKQVAGPCPPLSSGPLHLAQPQIMHMDSQESLRNPLIQPTSYMTSKHLPEQPHLFPHQETIPFSPIQNALFQFQYPTVCMVHLPAQQPPWWQAHFPHPFAQHPQKSYGKPSFQTEIHSSYPLEHVAEHTGKKPAEYAHTKEQTYPCYSGASGLHPKNLLPKFPSDQSSKSTETPSEQVLQEDFASANAGSLQSLPGTVVPVRIQTHVPSYGSVMYTSISQILGQNSPAIVICKVDENMTQRTLVTNAAMQGIGFNIAQVLGQHAGLEKYPIWKAPQTLPLGLESSIPLCLPSTSDSVATLGGSKRMLSPASSLELFMETKQQKRVKEEKMYGQIVEELSAVELTNSDIKKDLSRPQKPQLVRQGCASEPKDGLQSGSSSFSSLSPSSSQDYPSVSPSSREPFLPSKEMLSGSRAPLPGQKSSGPSESKESSDELDIDETASDMSMSPQSSSLPAGDGQLEEEGKGHKRPVGMLVRMASAPSGNVADSTLLLTDMADFQQILQFPSLRTTTTVSWCFLNYTKPNYVQQATFKSSVYASWCISSCNPNPSGLNTKTTLALLRSKQKITAEIYTLAAMHRPGTGKLTSSSAWKQFTQMKPDASFLFGSKLERKLVGNILKERGKGDIHGDKDIGSKQTEPIRIKIFEGGYKSNEDYVYVRGRGRGKYICEECGIRCKKPSMLKKHIRTHTDVRPYVCKLCNFAFKTKGNLTKHMKSKAHMKKCLELGVSMTSVDDTETEEAENLEDLHKAAEKHSMSSISTDHQFSDAEESDGEDGDDNDDDDEDEDDFDDQGDLTPKTRSRSTSPQPPRFSSLPVNVGAVPHGVPSDSSLGHSSLISYLVTLPSIRVTQLMTPSDSCEDTQMTEYQRLFQSKSTDSEPDKDRLDIPSCMDEECMLPSEPSSSPRDFSPSSHHSSPGYDSSPCRDNSPKRYLIPKGDLSPRRHLSPRRDLSPMRHLSPRKEAALRREMSQRDVSPRRHLSPRRPVSPGKDITARRDLSPRRERRYMTTIRAPSPRRALYHNPPLSMGQYLQAEPIVLGPPNLRRGLPQVPYFSLYGDQEGAYEHPGSSLFPEGPNDYVFSHLPLHSQQQVRAPIPMVPVGGIQMVHSMPPALSSLHPSPTLPLPMEGFEEKKGASGESFSKDPYVLSKQHEKRGPHALQSSGPPSTPSSPRLLMKQSTSEDSLNATEREQEENIQTCTKAIASLRIATEEAALLGPDQPARVQEPHQNPLGSAHVSIRHFSRPEPGQPCTSATHPDLHDGEKDNFGTSQTPLAHSTFYSKSCVDDKQLDFHSSKELSSSTEESKDPSSEKSQLH

SEQ ID NO: 46263 - protein, 307 aa, Homo sapiens [sequence omitted]

SEQ ID NO: 46264 - protein, 361 aa, Homo sapiens
MLGYKRHLALHAASSGDLTCGVCALELGSTEVLLDHLKAHAEEKPPSGTKEKKHQCDHCERCFYTRKDVRRHLVVHTGCKDFLCQFCAQRFGRKDHLTRHTKKTHSQELMKESLQTGDLLSTFHTISPSFQLKAAALPPFPLGASAQNGLASSLPAEVHSLTLSPPEQAAQPMQPLPESLASLHPSVSPGSPPPPLPNHKYNTTSTSYSPLASLPLKADTKGFCNISLFEDLPLQEPQSPQKLNPGFDLAKGNAGKVNLPKELPADAVNLTIPASLDLSPLLGFWQLPPPATQNTFGNSTLALGPGESLPHRLSCLGQQQQEPPLAMGTVSLGQLPLPPIPHVFSAGTGSAILPHFHHAFR

SEQ ID NO: 46265 - protein, 43 aa, Homo sapiens
MGHFDLLNYFAIAENESKARVRFNLMEKMLQPCGPPADKPEEN

SEQ ID NO: 46266 - skipped

SEQ ID NO: 46267 - protein, 1199 aa, Homo sapiens
MGILDGSLGNIDDLAQQYADYYNTCFSDVCERMEELRKRRVSQDLEVEKPDASPTSLQLRSQIEESLGFCSAVSTPEVERKNPLHKSNSEDSSVGKGDWKKKNKYFWQNFRKNQKGIMRQTSKGEDVGYVASEITMSDEERIQLMMMVKEKMITIEEALARLKEYEAQHRQSAALDPADWPDGSYPTFDGSSNCNSREQSDDETEESVKFKRLHKLVNSTRRVRKKLIRVEEMKKPSTEGGEEHVFENSPVLDERSALYSGVHKKPLFFDGSPEKPPEDDSDSLTTSPSSSSLDTWGAGRKLVKTFSKGESRGLIKPPKKMGTFFSYPEEEKAQKVSRSLTEGEMKKGLGSLSHGRTCSFGGFDLTNRSLHVGSNNSDPMGKEGDFVYKEVIKSPTASRISLGKKVKSVKETMRKRMSKKYSSSVSEQDSGLDGMPGSPPPSQPDPEHLDKPKLKAGGSVESLRSSLSGQSSMSGQTVSTTDSSTSNRESVKSEDGDDEEPPYRGPFCGRARVHTDFTPSPYDTDSLKLKKGDIIDIISKPPMGTWMGLLNNKVGTFKFIYVDVLSEDEEKPKRPTRRRRKGRPPQPKSVEDLLDRINLKEHMPTFLFNGYEDLDTFKLLEEEDLDELNIRDPEHRAVLLTAVELLQEYDSNSDQSGSQEKLLVDSQGLSGCSPRDSGCYESSENLENGKTRKASLLSAKSSTEPSLKSFSRNQLGNYPTLPLMKSGDALKQGQEEGRLGGGLAPDTSKSCDPPGVTGLNKNRRSLPVSICRSCETLEGPQTVDTWPRSHSLDDLQVEPGAEQDVPTEVTEPPPQIVPEVPQKTTASSTKAQPLEQDSAVDNALLLTQSKRFSEPQKLTTKKLEGSIAASGRGLSPPQCLPRNYDAQPPGAKHGLARTPLEGHRKGHEFEGTHHPLGTKEGVDAEQRMQPKIPSQPPPVPAKKSRERLANGLHPVPMGPSGALPSPDAPCLPVKRGSPASPTSPSDCPPALAPRPLSGQAPGSPPSTRPPPWLSELPENTSLQEHGVKLGPALTRKVSCARGVDLETLTENKLHAEGIDLTEEPYSDKHGRCGIPEALVQRYAEDLDQPERDVAANMDQIRVKQLRKQHRMAIPSGGLTEICRKPVSPGCISSVSDWLISIGLPMYAGTLSTAGFSTLSQVPSLSHTCLQEAGITEERHIRKLLSAARLFKLPPGPEAM

SEQ ID NO: 46268 - protein, 355 aa, Homo sapiens
MATLLVFCLGSLLYQLSGGPPRFLLDLRQYLGNSTYLDDHGPPPSKVLPFPSQVVYNRVGKCGSRTVVLLLRILSEKHGFNLVTSDIHNKTRLTKNEQMELIKNISTAEQPYLFTRHVHFLNFSRFGGDQPVYINIIRDPVNRFLSNYFFRRFGDWRGEQNHMIRTPSMRQEERYLDINECILENYPECSNPRLFYIIPYFCGQHPRCREPGEWALERAKLNVNENFLLVGILEELEDVLLLLERFLPHYFKGVLSIYKDPEHRKLGNMTVTVKKTVPSPEAVQILYQRMRYEYEFYHYVKEQFHLLKRKFGLKSHVSKPPLRPHFFIPTPLETEEPIDDEEQDDEKWLEDIYKR

SEQ ID NO: 46269 - protein, 619 aa, Homo sapiens
MTSLNLDLQSQNIYHHGREGSRMNGSRTLTHSISDGQLQGGQSNSELFQQEPQTAPAQVPQGFNVFGMSSSSGASNSAPHLGFHLGSKGTSSLSQQTPRFNPIMVTLAPNIQTGRNTPTSLHIHGVPPPVLNSPQGNSIYIRPYITTPGGTTRQTQQHSGWVSQFNPMNPQQVYQPSQPGPWTTCPASNPLSHTSSQQPNQQGHQTSHVYMPISSPTTSQPPTIHSSGSSQSSAHSQYNIQNISTGPRKNQIEIKLEPPQRNNSSKLRSSGPRTSSTSSSVNSQTLNRNQPTVYIAASPPNTDELMSRSQPKVYISANAATGDEQVMRNQPTLFISTNSGASAASRNMSGQVSMGPAFIHHHPPKSRAIGNNSATSPRVVVTQPNTKYTFKITVSPNKPPAVSPGVVSPTFELTNLLNHPDHYVETENIQHLTDPTLAHVDRISETRKLSMGSDDAAYTQALLVHQKARMERLQRELEIQKKKLDKLKSEVNEMENNLTRRRLKRSNSISQIPSLEEMQQLRSCNRQLQIDIDCLTKEIDLFQARGPHFNPSAIHNFYDNIGFVGPVPPKPKDQRSIIKTPKTQDTEDDEGAQWNCTACTFLNHPALIRCEQCEMPRHF

SEQ ID NO: 46270 - protein, 117 aa, Homo sapiens
MWEVHFHPSNPEHLFTCSEDGSLWHWDASTDVPEKSSLFHQGGRSSTFLSHSISNQANVHQSVISSWLSTDPAKDRIEITSLLPSRSLSVNTLDVLGPCLVCGTDAEAIYVTRHLFS

SEQ ID NO: 46271 - protein, 207 aa, Homo sapiens
MDLQFFDQERIVAASSTGCVTVFLHHPNNQTLSVNQQWTTAHYHTGPGSPSYSSAPCTGVVCNNPEIVTVGEDGRINLFRADHKEAVRTIVWEVHFHPSNPEHLFTCSEDGSLWHWDASTDVPEKSSLFHQGGRSSTFLSHSISNQANVHQSVISSWLSTDPAKDRIEITSLLPSRSLSVNTLDVLGPCLVCGTDAEAIYVTRHLFS

SEQ ID NO: 46272 - protein, 165 aa, Homo sapiens
MQEINQNLAEEAGLNITHICLPPDSSEAEIIDEILKINEDTRVHGLALQISENLFSNKVLNALKPEKDVDGVTDINLGKLVRGDAHECFVSPVAKAVIELLEKSGVNLDGKKILVVGAHGSLEAALQCLFQRKGSMTMSIQWKTRQLQSKTESRSVTRLECRRVI

SEQ ID NO: 46273 - protein, 868 aa, Homo sapiens
MQEINQNLAEEAGLNITHICLPPDSSEAEIIDEILKINEDTRVHGLALQISENLFSNKVLNALKPEKDVDGVTDINLGKLVRGDAHECFVSPVAKAVIELLEKSGVNLDGKKILVVGAHGSLEAALQCLFQRKGSMTMSIQWKTRQLQSKLHEADIVVLGSPKPEEIPLTWIQPGTTVLNCSHDFLSGKVGCGSPRIHFGGLIEEDDVILLAAALRIQNMVSSGRRWLREQQHRRWRLHCLKLQPLSPVPSDIEISRGQTPKAVDVLAKEIGLLADEIEIYGKSKAKVRLSVLERLKDQADGKYVLVAGITPTPLGEGKSTVTIGLVQALTAHLNVNSFACLRQPSQGPTFGVKGGAAGGGYAQVIPMEEFNLHLTGDIHAITAANNLLAAAIDTRILHENTQTDKALYNRLVPLVNGVREFSEIQLARLKKLGINKTDPSTLTEEEVSKFARLDIDPSTITWQRVLDTNDRFLRKITIGQGNTEKGHYRQAQFDIAVASEIMAVLALTDSLADMKARLGRMVVASDKSGQPVTADDLGVTGALTVLMKDAIKPNLMQTLEGTPVFVHAGPFANIAHGNSSVLADKIALKLVGEEGFVVTEAGFGADIGMEKFFNIKCRASGLVPNVVVLVATVRALKMHGGGPSVTAGVPLKKEYTEENIQLVADGCCNLQKQIQITQLFGVPVVVALNVFKTDTRAEIDLVCELAKRAGAFDAVPCYHWSVGGKGSVDLARAVREAASKRSRFQFLYDVQVPIVDKIRTIAQAVYGAKDIELSPEAQAKIDRYTQQGFGNLPICMAKTHLSLSHQPDKKGVPRDFILPISDVRASIGAGFIYPLVGTMSTMPGLPTRPCFYDIDLDTETEQVKGLF

SEQ ID NO: 46274 - protein, 869 aa, Homo sapiens
MQEINQNLAEEAGLNITHICLPPDSSEAEIIDEILKINEDTRVHGLALQISENLFSNKVLNALKPEKDVDGVTDINLGKLVRGDAHECFVSPVAKAVIELLEKSVGVNLDGKKILVVGAHGSLEAALQCLFQRKGSMTMSIQWKTRQLQSKLHEADIVVLGSPKPEEIPLTWIQPGTTVLNCSHDFLSGKVGCGSPRIHFGGLIEEDDVILLAAALRIQNMVSSGRRWLREQQHRRWRLHCLKLQPLSPVPSDIEISRGQTPKAVDVLAKEIGLLADEIEIYGKSKAKVRLSVLERLKDQADGKYVLVAGITPTPLGEGKSTVTIGLVQALTAHLNVNSFACLRQPSQGPTFGVKGGAAGGGYAQVIPMEEFNLHLTGDIHAITAANNLLAAAIDTRILHENTQTDKALYNRLVPLVNGVREFSEIQLARLKKLGINKTDPSTLTEEEVSKFARLDIDPSTITWQRVLDTNDRFLRKITIGQGNTEKGHYRQAQFDIAVASEIMAVLALTDSLADMKARLGRMVVASDKSGQPVTADDLGVTGALTVLMKDAIKPNLMQTLEGTPVFVHAGPFANIAHGNSSVLADKIALKLVGEEGFVVTEAGFGADIGMEKFFNIKCRASGLVPNVVVLVATVRALKMHGGGPSVTAGVPLKKEYTEENIQLVADGCCNLQKQIQITQLFGVPVVVALNVFKTDTRAEIDLVCELAKRAGAFDAVPCYHWSVGGKGSVDLARAVREAASKRSRFQFLYDVQVPIVDKIRTIAQAVYGAKDIELSPEAQAKIDRYTQQGFGNLPICMAKTHLSLSHQPDKKGVPRDFILPISDVRASIGAGFIYPLVGTMSTMPGLPTRPCFYDIDLDTETEQVKGLF

SEQ ID NO: 46275 - protein, 421 aa, Homo sapiens
MLKPLKEFENTTCSTLTIRQSLDLFLPDKTASGLNKSQILEMNQKKSDTSMLSPLNAARCQDEKAHLPTMKSFGTHRRVTHKPNLLGSKWFIKILKRHFSSVSTETFVPKQDFPQVKRPLKASRTRQPSRTNLPVLSVNEDLMHCTAFATADEYHLGNLSQDLASHGYVEVTSLPRDAANILVMGVENSAKEGDPGTIFFFREGAAVFWNVKDKTMKHVMKVLEKHEIQPYEIALVHWENEELNYIKIEGQSKLHRGEIKLNSELDLDDAILEKFAFSNALCLSVKLAIWEASLDKFIESIQSIPEALKAGKKVKLSHEEVMQKIGELFALRHRINLSSDFLITPDFYWDRENLEGLYDKTCQFLSIGRRVKVMNEKLQHCMELTDLMRNHLNEKRALRLEWMIVILITIEVMFELGRVFF

SEQ ID NO: 46276 - protein, 8741 aa, Homo sapiens
MKDGVKLLALLEVLSGQKLPCEQGRRMKRIHAVANIGTALKFLEGRKIKLVNINSTDIADGRPSIVLGLMWTIILYFQIEELTSNLPQLQSLSSSASSVDSIVSSETPSPPSKRKVTTKIQGNAKKALLKWVQYTAGKQTGIEVKDFGKSWRSGVAFHSVIHAIRPELVDLETVKGRSNRENLEDAFTIAETELGIPRLLDPEDVDVDKPDEKSIMTYVAQFLKHYPDIHNASTDGQEDDEILPGFPSFANSVQNFKREDRVIFKEMKVWIEQFERDLTRAQMVESNLQDKYQSFKHFRVQYEMKRKQIEHLIQPLHRDGKLSLDQALVKQSWDRVTSRLFDWHIQLDKSLPAPLGTIGAWLYRAEVALREEITVQQVHEETANTIQRKLEQHKDLLQNTDAHKRAFHEIYRTRSVNGIPVPPDQLEDMAERFHFVSSTSELHLMKMEFLELKYRLLSLLVLAESKLKSWIIKYGRRESVEQLLQNYVSFIENSKFFEQYEVTYQILKQTAEMYVKADGSVEEAENVMKFMNETTAQWRNLSVEVRSVRSMLEEVISNWDRYGNTVASLQAWLEDAEKMLNQSENAKKDFFRNLPHWIQQHTAMNDAGNFLIETCDEMVSRDLKQQLLLLNGRWRELFMEVKQYAQADEMDRMKKEYTDCVVTLSAFATEAHKKLSEPLEVSFMNVKLLIQDLEDIEQRVPVMDAQYKIITKTAHLITKESPQEEGKEMFATMSKLKEQLTKVKECYSPLLYESQQLLIPLEELEKQMTSFYDSLGKINEIITVLEREAQSSALFKQKHQELLACQENCKKTLTLIEKGSQSVQKFVTLSNVLKHFDQTRLQRQIADIHVAFQSMVKKTGDWKKHVETNSRLMKKFEESRAELEKVLRIAQEGLEEKGDPEELLRRHTEFFSQLDQRVLNAFLKACDELTDILPEQEQQGLQEAVRKLHKQWKDLQGEAPYHLLHLKIDVEKNRFLASVEECRTELDRETKLMPQEGSEKIIKEHRVFFSDKGPHHLCEKRLQLIEELCVKLPVRDPVRDTPGTCHVTLKELRAAIDSTYRKLMEDPDKWKDYTSRFSEFSSWISTNETQLKGIKGEAIDTANHGEVKRAVEEIRNGVTKRGETLSWLKSRLKVLTEVSSENEAQKQGDELAKLSSSFKALVTLLSEVEKMLSNFGDCVQYKEIVKNSLEELISGSKEVQEQAEKILDTENLFEAQQLLLHHQQKTKRISAKKRDVQQQIAQAQQGEGGLPDRGHEELRKLESTLDGLERSRERQERRIQVTLRKWERFETNKETVVRYLFQTGSSHERFLSFSSLESLSSELEQTKEFSKRTESIAVQAENLVKEASEIPLGPQNKQLLQQQAKSIKEQVKKLEDTLEEDIKTMEMVKTKWDHFGSNFETLSVWITEKEKELNALETSSSAMDMQISQIKVTIQEIESKLSSIVGLEEEAQSFAQFVTTGESARIKAKLTQIRRYGEELREHAQCLEGTILGHLSQQQKFEENLRKIQQSVSEFEDKLAVPIKICSSATETYKVLQEHMDLCQALESLSSAITAFSASARKVVNRDSCVQEAAALQQQYEDILRRAKERQTALENLLAHWQRLEKELSSFLTWLERGEAKASSPEMDISADRVKVEGELQLIQALQNEVVSQASFYSKLLQLKESLFSVASKDDVKMMKLHLEQLDERWRDLPQIINKRINFLQSVVAEHQQFDELLLSFSVWIKLFLSELQTTSEISIMDHQVALTRHKDHAAEVESKKGELQSLQGHLAKLGSLGRAEDLHLLQGKAEDCFQLFEEASQVVERRQLALSHLAEFLQSHASLSGILRQLRQTVEATNSMNKNESDLIEKDLNDALQNAKALESAAVSLDGILSKAQYHLKIGSSEQRTSCRATADQLCGEVERIQNLLGTKQSEADALAVLKKAFQDQKEELLKSIEDIEERTDKERLKEPTRQALQQRLRVFNQLEDELNSHEHELCWLKDKAKQIAQKDVAFAPEVDREINRLEVTWDDTKRLIHENQGQCCGLIDLMREYQNLKSAVSKVLENASSVIVTRTTIKDQEDLKWAFSKHETAKNKMNYKQKDLDNFTSKGKHLLSELKKIHSSDFSLVKTDMESTVDKWLDVSEKLEENMDRLRVSLSIWDDVLSTRDEIEGWSNNCVPQMAENISNLDNHLRAEELLKEFESEVKNKALRLEELHSKVNDLKELTKNLETPPDLQFIEADLMQKLEHAKEITEVAKGTLKDFTAQSTQVEKFINDITTWFTKVEESLMNCAQNETCEALKKVKDIQKELQSQQSNISSTQENLNSLCRKYHSAELESLGRAMTGLIKKHEAVSQLCSKTQASLQESLEKHFSESMQEFQEWFLGAKAAAKESSDRTGDSKVLEAKLHDLQNILDSVSDGQSKLDAVTQEGQTLYAHLSKQIVSSIQEQITKANEEFQAFLKQCLKDKQALQDCASELGSFEDQHRKLNLWIHEMEERFNTENLGESKQHIPEKKNEVHKVEMFLGELLAARESLDKLSQRGQLLSEEGHGAGQEGRLCSQLLTSHQNLLRMTKEKLRSCQVALQEHEALEEALQSMWFWVKAIQDRLACAESTLGSKDTLEKRLSQIQDILLMKGEGEVKLNMAIGKGEQALRSSNKEGQRVIQTQLETLKEVWADIMSSSVHAQSTLESVISQWNDYVERKNQLEQWMESVDQKIEHPLQPQPGLKEKFVLLDHLQSILSEAEDHTRALHRLIAKSRELYEKTEDESFKDTAQEELKTQFNDIMTVAKEKMRKVEEIVKDHLMYLDAVHEFTDWLHSAKEELHRWSDMSGDSSATQKKLSKIKELIDSREIGASRLSRVESLAPEVKQNTTASGCELMHTEMQALRADWKQWEDSVFQTQSCLENLVSQMALSEQEFSGQVAQLEQALEQFSALLKTWAQQLTLLEGKNTDEEIVECWHKGQEILDALQKAEPRTEDLKSQLNELCRFSRDLSTYSGKVSGLIKEYNCLCLQASKGCQNKEQILQQRFRKAFRDFQQWLVNAKITTAKCFDIPQNISEVSTSLQKIQEFLSESENGQHKLNMMLSKGELLSTLLTKEKAKGIQAKVTAAKEDWKNFHSNLHQKESALENLKIQMKDFEVSAEPIQDWLSKTEKMVHESSNRLYDLPAKRREQQKLQSVLEEIHCYEPQLNRLKEKAQQLWEGQAASKSFRHRVSQLSSQYLALSNLTKEKVSRLDRIVAEHNQFSLGIKELQDWMTDAIHMLDSYCHPTSDKSVLDSRTLKLEALLSVKQEKEIQMKMIVTRGESVLQNTSPEGIPTIQQQLQSVKDMWASLLSAGIRCKSQLEGALSKWTSYQDGVRQFSGWMDSMEANLNESERQHAELRDKTTMLGKAKLLNEEVLSYSSLLETIEVKGAGMTEHYVTQLELQDLQERYRAIQERAKEAVTKSEKLVRLHQEYQRDLKAFEVWLGQEQEKLDQYSVLEGDAHTHETTLRDLQELQVHCAEGQALLNSVLHTREDVIPSGIPQAEDRALESLRQDWQAYQHRLSETRTQFNNVVNKLRLMEQKFQQVDEWLKTAEEKVSPRTRRQSNRATKEIQLHQMKKWHEEVTAYRDEVEEVGARAQEILDESHVNSRMGCQATQLTSRYQALLLQVLEQIKFLEEEIQSLEESESSLSSYSDWYGSTHKNFKNVATKIDKVDTVMMGKKLKTLEVLLKDMEKGHSLLKSAREKGERAVKYLEEGEAERLRKEIHDHMEQLKELTSTVRKEHMTLEKGLHLAKEFSDKCKALTQWIAEYQEILHVPEEPKMELYEKKAQLSKYKSLQQTVLSHEPSVKSVREKGEALLELVQDVTLKDKIDQLQSDYQDLCSIGKEHVFSLEAKVKDHEDYNSELQEVEKWLLQMSGRLVAPDLLETSSLETITQQLAHHKAMMEEIAGFEDRLNNLQMKGDTLIGQCADHLQAKLKQNVHAHLQGTKDSYSAICSTAQRMYQSLEHELQKHVSRQDTLQQCQAWLSAVQPDLEPSPQPPLSRAEAIKQVKHFRALQEQARTYLDLLCSMCDLSNASVKTTAKDIQQTEQTIEQKLVQAQNLTQGWEEIKHLKSELWIYLQDADQQLQNMKRRHSELELNIAQNMVSQVKDFVKKLQSKQASVNTIIEKVNKLTKKEESPEHKEINHLNDQWLDLCRQSNNLCLQREEDLQRTRDYHDCMNVVEVFLEKFTTEWDNLARSDAESTAVHLEALKKLALALQERKYAIEDLKDQKQKMIEHLNLDDKELVKEQTSHLEQRWFQLEDLIKRKIQVSVTNLEELNVVQSRFQELMEWAEEQQPNIAEALKQSPPPDMAQNLLMDHLAICSELEAKQMLLKSLIKDADRVMADLGLNERQVIQKALSDAQSHVNCLSDLVGQRRKYLNKALSEKTQFLMAVFQATSQIQQHERKIMFREHICLLPDDVSKQVKTCKSAQASLKTYQNEVTGLWAQGRELMKEVTEQEKSEVLGKLQELQSVYDSVLQKCSHRLQELEKNLVSRKHFKEDFDKACHWLKQADIVTFPEINLMNESSELHTQLAKYQNILEQSPEYENLLLTLQRTGQTILPSLNEVDHSYLSEKLNALPRQFNVIVALAKDKFYKVQEAILARKEYASLIELTTQSLSELEAQFLRMSKVPTDLAVEEALSLQDGCRAILDEVAGLGEAVDELNQKKEGFRSTGQPWQPDKMLHLVTLYHRLKRQTEQRVSLLEDTTSAYQEHEKMCQQLERQLKSVKEEQSKVNEETLPAEEKLKMYHSLAGSLQDSGIVLKRVTIHLEDLAPHLDPLAYEKARHQIQSWQGELKLLTSAIGETVTECESRMVQSIDFQTEMSRSLDWLRRVKAELSGPVYLDLNLQDIQEEIRKIQIHQEEVQSSLRIMNALSHKEKEKFTKAKELISADLEHSLAELSELDGDIQEALRTRQATLTEIYSQCQRYYQVFQAANDWLEDAQELLQLAGNGLDVESAEENLKSHMEFFSTEDQFHSNLEELHSLVATLDPLIKPTGKEDLEQKVASLELRSQRMSRDSGAQVDLLQRCTAQWHDYQKAREEVIELMNDTEKKLSEFSLLKTSSSHEAEEKLSEHKALVSVVNSFHEKIVALEEKASQLEKTGNDASKATLSRSMTTVWQRWTRLRAVAQDQEKILEDAVDEWTGFNNKVKKATEMIDQLQDKLPGSSAEKASKAELLTLLEYHDTFVLELEQQQSALGMLRQQTLSMLQDGAAPTPGEEPPLMQEITAMQDRCLNMQEKVKTNGKLVKQELKDREMVETQINSVKCWVQETKEYLGNPTIEIDAQLEELQILLTEATNHRQNIEKMAEEQKEKYLGLYTILPSELSLQLAEVALDLKIRDQIQDKIKEVEQSKATSQELSRQIQKLAKDLTTILTKLKAKTDNVVQAKTDQKVLGEELDGCNSKLMELDAAVQKFLEQNGQLGKPLAKKIGKLTELHQQTIRQAENRLSKLNQAASHLEEYNEMLELILKWIEKAKVLAHGTIAWNSASQLREQYILHQTLLEESKEIDSELEAMTEKLQYLTSVYCTEKMSQQVAELGRETEELRQMIKIRLQNLQDAAKDMKKFEAELKKLQAALEQAQATLTSPEVGRLSLKEQLSHRQHLLSEMESLKPKVQAVQLCQSALRIPEDVVASLPLCHAALRLQEEASRLQHTAIQQCNIMQEAVVQYEQYEQEMKHLQQLIEGAHREIEDKPVATSNIQELQAQISRHEELAQKIKGYQEQIASLNSKCKMLTMKAKHATMLLTVTEVEGLAEGTEDLDGELLPTPSAHPSVVMMTAGRCHTLLSPVTEESGEEGTNSEISSPPACRSPSPVANTDASVNQDIAYYQALSAERLQTDAAKIHPSTSASQEFYEPGLEPSATAKLGDLQRSWETLKNVISEKQRTLYEALERQQKYQDSLQSISTKMEAIELKLSESPEPGRSPESQMAEHQALMDEILMLQDEINELQSSLAEELVSESCEADPAEQLALQSTLTVLAERMSTIRMKASGKRQLLEEKLNDQLEEQRQEQALQRYRCEADELDSWLLSTKATLDTALSPPKEPMDMEAQLMDCQNMLVEIEQKVVALSELSVHNENLLLEGKAHTKDEAEQLAGKLRRLKGSLLELQRALHDKQLNMQGTAQEKEESDVDLTATQSPGVQEWLAQARTTWTQQRQSSLQQQKELEQELAEQKSLLRSVASRGEEILIQHSAAETSGDAGEKPDVLSQELGMEGEKSSAEDQMRMKWESLHQEFSTKQKLLQNVLEQEQEQVLYSRPNRLLSGVPLYKGDVPTQDKSAVTSLLDGLNQAFEEVSSQSGGAKRQSIHLEQKLYDGVSATSTWLDDVEERLFVATALLPEETETCLFNQEILAKDIKEMSEEMDKNKNLFSQAFPENGDNRDVIEDTLGCLLGRLSLLDSVVNQRCHQMKERLQQILNFQNDLKVLFTSLADNKYIILQKLANVFEQPVAEQIEAIQQAEDGLKEFDAGIIELKRRGDKLQVEQPSMQELSKLQDMYDELMMIIGSRRSGLNQNLTLKSQYERALQDLADLLETGQEKMAGDQKIIVSSKEEIQQLLDKHKEYFQGLESHMILTETLFRKIISFAVQKETQFHTELMAQASAVLKRAHKRGVELEYILETWSHLDEDQQELSRQLEVVESSIPSVGLVEENEDRLIDRITLYQHLKSSLNEYQPKLYQVLDDGKRLLISISCSDLESQLNQLGECWLSNTNKMSKELHRLETILKHWTRYQSESADLIHWLQSAKDRLEFWTQQSVTVPQELEMVRDHLNAFLEFSKEVDAQSSLKSSVLSTGNQLLRLKKVDTATLRSELSRIDSQWTDLLTNIPAVQEKLHQLQMDKLPSRHAISEVMSWISLMENVIQKDEDNIKNSIGYKAIHEYLQKYKGFKIDINCKQLTVDFVNQSVLQISSQDVESKRSDKTDFAEQLGAMNKSWQILQGLVTEKIQLLEGLLESWSEYENNVQCLKTWFETQEKRLKQQHRIGDQASVQNALKDCQDLEDLIKAKEKEVEKIEQNGLALIQNKKEDVSSIVMSTLRELGQTWANLDHMVGQLKILLKSVLDQWSSHKVAFDKINSYLMEARYSLSRFRLLTGSLEAVQVQVDNLQNLQDDLEKQERSLQKFGSITNQLLKECHPPVTETLTNTLKEVNMRWNNLLEEIAEQLQSSKALLQLWQRYKDYSKQCASTVQQQEDRTNELLKAATNKDIADDEVATWIQDCNDLLKGLGTVKDSLFFLHELGEQLKQQVDASAASAIQSDQLSLSQHLCALEQALCKQQTSLQAGVLDYETFAKSLEALEAWIVEAEEILQGQDPSHSSDLSTIQERMEELKGQMLKFSSMAPDLDRLNELGYRLPLNDKEIKRMQNLNRHWSLISSQTTERFSKLQSFLLQHQTFLEKCETWMEFLVQTEQKLAVEISGNYQHLLEQQRAHELFQAEMFSRQQILHSIIIDGQRLLEQGQVDDRDEFNLKLTLLSNQWQGVIRRAQQRRGIIDSQIRQWQRYREMAEKLRKWLVEVSYLPMSGLGSVPIPLQQARTLFDEVQFKEKVFLRQQGSYILTVEAGKQLLLSADSGAEAALQAELAEIQEKWKSASMRLEEQKKKLAFLLKDWEKCEKGIADSLEKLRTFKKKLSQSLPDHHEELHAEQMRCKELENAVGSWTDDLTQLSLLKDTLSAYISADDISILNERVELLQRQWEELCHQLSLRRQQIGERLNEWAVFSEKNKELCEWLTQMESKVSQNGDILIEEMIEKLKKDYQEEIAIAQENKIQLQQMGERLAKASHESKASEIEYKLGKVNDRWQHLLDLIAARVKKLKETLVAVQQLDKNMSSLRTWLAHIESELAKPIVYDSCNSEEIQRKLNEQQELQRDIEKHSTGVASVLNLCEVLLHDCDACATDAECDSIQQATRNLDRRWRNICAMSMERRLKIEETWRLWQKFLDDYSRFEDWLKSSERTAAFPSSSGVIYTVAKEELKKFEAFQRQVHECLTQLELINKQYRRLARENRTDSACSLKQMVHEGNQRWDNLQKRVTSILRRLKHFIGQREEFETARDSILVWLTEMDLQLTNIEHFSECDVQAKIKQLKAFQQEISLNHNKIEQIIAQGEQLIEKSEPLDAAIIEEELDELRRYCQEVFGRVERYHKKLIRLPLPDDEHDLSDRELELEDSAALSDLHWHDRSADSLLSPQPSSNLSLSLAQPLRSERSGRDTPASVDSIPLEWDHDYDLSRDLESAMSRALPSEDEEGQDDKDFYLRGAVGLSGDHSALESQIRQLGKALDDSRFQIQQTENIIRSKTPTGPELDTSYKGYMKLLGECSSSIDSVKRLEHKLKEEEESLPGFVNLHSTETQTAGVIDRWELLQAQALSKELRMKQNLQKWQQFNSDLNSIWAWLGDTEEELEQLQRLELSTDIQTIELQIKKLKELQKAVDHRKAIILSINLCSPEFTQADSKESRDLQDRLSQMNGRWDRVCSLLEEWRGLLQDALMQCQGFHEMSHGLLLMLENIDRRKNEIVPIDSNLDAEILQDHHKQLMQIKHELLESQLRVASLQDMSCQLLVNAEGTDCLEAKEKVHVIGNRLKLLLKEVSRHIKELEKLLDVSSSQQDLSSWSSADELDTSGSVSPTSGRSTPNRQKTPRGKCSLSQPGPSVSSPHSRSTKGGSDSSLSEPGPGRSGRGFLFRVLRAALPLQLLLLLLIGLACLVPMSEEDYSCALSNNFARSFHPMLRYTNGPPPL

SEQ ID NO: 46277 - protein, 8693 aa, Homo sapiens
MKDGVKLLALLEVLSGQKLPCEQGRRMKRIHAVANIGTALKFLEGRKSMHRGSPIKLVNINSTDIADGRPSIVLGLMWTIILYFQIEELTSNLPQLQSLSSSASSVDSIVSSETPSPPSKRKVTTKIQGNAKKALLKWVQYTAGKQTGIEVKDFGKSWRSGVAFHSVIHAIRPELVDLETVKGRSNRENLEDAFTIAETELGIPRLLDPEDVDVDKPDEKSIMTYVAQFLKHYPDIHNASTDGQEDDEILPGFPSFANSVQNFKREDRVIFKEMKVWIEQFERDLTRAQMVESNLQDKYQSFKHFRVQYEMKRKQIEHLIQPLHRDGKLSLDQALVKQSWDRVTSRLFDWHIQLDKSLPAPLGTIGAWLYRAEVALREEITVQQVHEETANTIQRKLEQHKDLLQNTDAHKRAFHEIYRTRSVNGIPVPPDQLEDMAERFHFVSSTSELHLMKMEFLELKYRLLSLLVLAESKLKSWIIKYGRRESVEQLLQNYVSFIENSKFFEQYEVTYQILKQTAEMYVKADGSVEEAENVMKFMNETTAQWRNLSVEVRSVRSMLEEVISNWDRYGNTVASLQAWLEDAEKMLNQSENAKKDFFRNLPHWIQQHTAMNDAGNFLIETCDEMVSRDLKQQLLLLNGRWRELFMEVKQYAQADEMDRMKKEYTDCVVTLSAFATEAHKKLSEPLEVSFMNVKLLIQDLEDIEQRVPVMDAQYKIITKTAHLITKESPQEEGKEMFATMSKLKEQLTKVKECYSPLLYESQQLLIPLEELEKQMTSFYDSLGKINEIITVLEREAQSSALFKQKHQELLACQENCKKTLTLIEKGSQSVQKFVTLSNVLKHFDQTRLQRQIADIHVAFQSMVKKTGDWKKHVETNSRLMKKFEESRAELEKVLRIAQEGLEEKGDPEELLRRHTEFFSQLDQRVLNAFLKACDELTDILPEQEQQGLQEAVRKLHKQWKDLQGEAPYHLLHLKIDVEKNRFLASVEECRTELDRETKLMPQEGSEKIIKEHRVFFSDKGPHHLCEKRLQLIEELCVKLPVRDPVRDTPGTCHVTLKELRAAIDSTYRKLMEDPDKWKDYTSRFSEFSSWISTNETQLKGIKGEAIDTANHGEVKRAVEEIRNGVTKRGETLSWLKSRLKVLTEVSSENEAQKQGDELAKLSSSFKALVTLLSEVEKMLSNFGDCVQYKEIVKNSLEELISGSKEVQEQAEKILDTENLFEAQQLLLHHQQKTKRISAKKRDVQQQIAQAQQGEGGLPDRGHEELRKLESTLDGLERSRERQERRIQVTLRKWERFETNKETVVRYLFQTGSSHERFLSFSSLESLSSELEQTKEFSKRTESIAVQAENLVKEASEIPLGPQNKQLLQQQAKSIKEQVKKLEDTLEEDIKTMEMVKTKWDHFGSNFETLSVWITEKEKELNALETSSSAMDMQISQIKVTIQEIESKLSSIVGLEEEAQSFAQFVTTGESARIKAKLTQIRRYGEELREHAQCLEGTILGHLSQQQKFEENLRKIQQSVSEFEDKLAVPIKICSSATETYKVLQEHMDLCQALESLSSAITAFSASARKVVNRDSCVQEAAALQQQYEDILRRAKERQTALENLLAHWQRLEKELSSFLTWLERGEAKASSPEMDISADRVKVEGELQLIQALQNEVVSQASFYSKLLQLKESLFSVASKDDVKMMKLHLEQLDERWRDLPQIINKRINFLQSVVAEHQQFDELLLSFSVWIKLFLSELQTTSEISIMDHQVALTRHKDHAAEVESKKGELQSLQGHLAKLGSLGRAEDLHLLQGKAEDCFQLFEEASQVVERRQLALSHLAEFLQSHASLSGILRQLRQTVEATNSMNKNESDLIEKDLNDALQNAKALESAAVSLDGILSKAQYHLKIGSSEQRTSCRATADQLCGEVERIQNLLGTKQSEADALAVLKKAFQDQKEELLKSIEDIEERTDKERLKEPTRQALQQRLRVFNQLEDELNSHEHELCWLKDKAKQIAQKDVAFAPEVDREINRLEVTWDDTKRLIHENQGQCCGLIDLMREYQNLKSAVSKVLENASSVIVTRTTIKDQEDLKWAFSKHETAKNKMNYKQKDLDNFTSKGKHLLSELKKIHSSDFSLVKTDMESTVDKWLDVSEKLEENMDRLRVSLSIWDDVLSTRDEIEGWSNNCVPQMAENISNLDNHLRAEELLKEFESEVKNKALRLEELHSKVNDLKELTKNLETPPDLQFIEADLMQKLEHAKEITEVAKGTLKDFTAQSTQVEKFINDITTWFTKVEESLMNCAQNETCEALKKVKDIQKELQSQQSNISSTQENLNSLCRKYHSAELESLGRAMTGLIKKHEAVSQLCSKTQASLQESLEKHFSESMQEFQEWFLGAKAAAKESSDRTGDSKVLEAKLHDLQNILDSVSDGQSKLDAVTQEGQTLYAHLSKQIVSSIQEQITKANEEFQAFLKQCLKDKQALQDCASELGSFEDQHRKLNLWIHEMEERFNTENLGESKQHIPEKKNEVHKVEMFLGELLAARESLDKLSQRGQLLSEEGHGAGQEGRLCSQLLTSHQNLLRMTKEKLRSCQVALQEHEALEEALQSMWFWVKAIQDRLACAESTLGSKDTLEKRLSQIQDILLMKGEGEVKLNMAIGKGEQALRSSNKEGQRVIQTQLETLKEVWADIMSSSVHAQSTLESVISQWNDYVERKNQLEQWMESVDQKIEHPLQPQPGLKEKFVLLDHLQSILSEAEDHTRALHRLIAKSRELYEKTEDESFKDTAQEELKTQFNDIMTVAKEKMRKVEEIVKDHLMYLDAVHEFTDWLHSAKEELHRWSDMSGDSSATQKKLSKIKELIDSREIGASRLSRVESLAPEVKQNTTASGCELMHTEMQALRADWKQWEDSVFQTQSCLENLVSQMALSEQEFSGQVAQLEQALEQFSALLKTWAQQLTLLEGKNTDEEIVECWHKGQEILDALQKAEPRTEDLKSQLNELCRFSRDLSTYSGKVSGLIKEYNCLCLQASKGCQNKEQILQQRFRKAFRDFQQWLVNAKITTAKCFDIPQNISEVSTSLQKIQEFLSESENGQHKLNMMLSKGELLSTLLTKEKAKGIQAKVTAAKEDWKNFHSNLHQKESALENLKIQMKDFEVSAEPIQDWLSKTEKMVHESSNRLYDLPAKRREQQKLQSVLEEIHCYEPQLNRLKEKAQQLWEGQAASKSFRHRVSQLSSQYLALSNLTKEKVSRLDRIVAEHNQFSLGIKELQDWMTDAIHMLDSYCHPTSDKSVLDSRTLKLEALLSVKQEKEIQMKMIVTRGESVLQNTSPEGIPTIQQQLQSVKDMWASLLSAGIRCKSQLEGALSKWTSYQDGVRQFSGWMDSMEANLNESERQHAELRDKTTMLGKAKLLNEEVLSYSSLLETIEVKGAGMTEHYVTQLELQDLQERYRAIQERAKEAVTKSEKLVRLHQEYQRDLKAFEVWLGQEQEKLDQYSVLEGDAHTHETTLRDLQELQVHCAEGQALLNSVLHTREDVIPSGIPQAEDRALESLRQDWQAYQHRLSETRTQFNNVVNKLRLMEQKFQQVDEWLKTAEEKKWHEEVTAYRDEVEEVGARAQEILDESHVNSRMGCQATQLTSRYQALLLQVLEQIKFLEEEIQSLEESESSLSSYSDWYGSTHKNFKNVATKIDKVDTVMMGKKLKTLEVLLKDMEKGHSLLKSAREKGERAVKYLEEGEAERLRKEIHDHMEQLKELTSTVRKEHMTLEKGLHLAKEFSDKCKALTQWIAEYQEILHVPEEPKMELYEKKAQLSKYKSLQQTVLSHEPSVKSVREKGEALLELVQDVTLKDKIDQLQSDYQDLCSIGKAMMEEIAGFEDRLNNLQMKGDTLIGQCADHLQAKLKQNVHAHLQGTKDSYSAICSTAQRMYQSLEHELQKHVSRQDTLQQCQAWLSAVQPDLEPSPQPPLSRAEAIKQVKHFRALQEQARTYLDLLCSMCDLSNASVKTTAKDIQQTEQTIEQKLVQAQNLTQGWEEIKHLKSELWIYLQDADQQLQNMKRRHSELELNIAQNMVSQVKDFVKKLQSKQASVNTIIEKVNKLTKKEESPEHKEINHLNDQWLDLCRQSNNLCLQREEDLQRTRDYHDCMNVVEVFLEKFTTEWDNLARSDAESTAVHLEALKKLALALQERKYAIEDLKDQKQKMIEHLNLDDKELVKEQTSHLEQRWFQLEDLIKRKIQVSVTNLEELNVVQSRFQELMEWAEEQQPNIAEALKQSPPPDMAQNLLMDHLAICSELEAKQMLLKSLIKDADRVMADLGLNERQVIQKALSDAQSHVNCLSDLVGQRRKYLNKALSEKTQFLMAVFQATSQIQQHERKIMFREHICLLPDDVSKQVKTCKSAQASLKTYQNEVTGLWAQGRELMKEVTEQEKSEVLGKLQELQSVYDSVLQKCSHRLQELEKNLVSRKHFKEDFDKACHWLKQADIVTFPEINLMNESSELHTQLAKYQNILEQSPEYENLLLTLQRTGQTILPSLNEVDHSYLSEKLNALPRQFNVIVALAKDKFYKVQEAILARKEYASLIELTTQSLSELEAQFLRMSKVPTDLAVEEALSLQDGCRAILDEVAGLGEAVDELNQKKEGFRSTGQPWQPDKMLHLVTLYHRLKRQTEQRVSLLEDTTSAYQEHEKMCQQLERQLKSVKEEQSKVNEETLPAEEKLKMYHSLAGSLQDSGIVLKRVTIHLEDLAPHLDPLAYEKARHQIQSWQGELKLLTSAIGETVTECESRMVQSIDFQTEMSRSLDWLRRVKAELSGPVYLDLNLQDIQEEIRKIQIHQEEVQSSLRIMNALSHKEKEKFTKAKELISADLEHSLAELSELDGDIQEALRTRQATLTEIYSQCQRYYQVFQAANDWLEDAQELLQLAGNGLDVESAEENLKSHMEFFSTEDQFHSNLEELHSLVATLDPLIKPTGKEDLEQKVASLELRSQRMSRDSGAQVDLLQRCTAQWHDYQKAREEVIELMNDTEKKLSEFSLLKTSSSHEAEEKLSEHKALVSVVNSFHEKIVALEEKASQLEKTGNDASKATLSRSMTTVWQRWTRLRAVAQDQEKILEDAVDEWTGFNNKVKKATEMIDQLQDKLPGSSAEKASKAELLTLLEYHDTFVLELEQQQSALGMLRQQTLSMLQDGAAPTPGEEPPLMQEITAMQDRCLNMQEKVKTNGKLVKQELKDREMVETQINSVKCWVQETKEYLGNPTIEIDAQLEELQILLTEATNHRQNIEKMAEEQKEKYLGLYTILPSELSLQLAEVALDLKIRDQIQDKIKEVEQSKATSQELSRQIQKLAKDLTTILTKLKAKTDNVVQAKTDQKVLGEELDGCNSKLMELDAAVQKFLEQNGQLGKPLAKKIGKLTELHQQTIRQAENRLSKLNQAASHLEEYNEMLELILKWIEKAKVLAHGTIAWNSASQLREQYILHQTLLEESKEIDSELEAMTEKLQYLTSVYCTEKMSQQVAELGRETEELRQMIKIRLQNLQDAAKDMKKFEAELKKLQAALEQAQATLTSPEVGRLSLKEQLSHRQHLLSEMESLKPKVQAVQLCQSALRIPEDVVASLPLCHAALRLQEEASRLQHTAIQQCNIMQAAVVQYEQYEQEMKHLQQLIEGAHREIEDKPVATSNIQELQAQISRHEELAQKIKGYQEQIASLNSKCKMLTMKAKHATMLLTVTEVEGLAEGTEDLDGELLPTPSAHPSVVMMTAGRCHTLLSPVTEESGEEGTNSEISSPPACRSPSPVANTDASVNQDIAYYQALSAERLQTDAAKIHPSTSASQEFYEPGLEPSATAKLGDLQRSWETLKNVISEKQRTLYEALERQQKYQDSLQSISTKMEAIELKLSESPEPGRSPESQMAEHQALMDEILMLQDEINELQSSLAEELVSESCEADPAEQLALQSTLTVLAERMSTIRMKASGKRQLLEEKLNDQLEEQRQEQALQRYRCEADELDSWLLSTKATLDTALSPPKEPMDMEAQLMDCQNMLVEIEQKVVALSELSVHNENLLLEGKAHTKDEAEQLAGKLRRLKGSLLELQRALHDKQLNMQGTAQEKEESDVDLTATQSPGVQEWLAQARTTWTQQRQSSLQQQKELEQELAEQKSLLRSVASRGEEILIQHSAAETSGDAGEKPDVLSQELGMEGEKSSAEDQMRMKWESLHQEFSTKQKLLQNVLEQEQEQVLYSRPNRLLSGVPLYKGDVPTQDKSAVTSLLDGLNQAFEEVSSQSGGAKRQSIHLEQKLYDGVSATSTWLDDVEERLFVATALLPEETETCLFNQEILAKDIKEMSEEMDKNKNLFSQAFPENGDNRDVIEDTLGCLLGRLSLLDSVVNQRCHQMKERLQQILNFQNDLKVLFTSLADNKYIILQKLANVFEQPVAEQIEAIQQAEDGLKEFDAGIIELKRRGDKLQVEQPSMQELSKLQDMYDELMMIIGSRRSGLNQNLTLKSQYERALQDLADLLETGQEKMAGDQKIIVSSKEEIQQLLDKHKEYFQGLESHMILTETLFRKIISFAVQKETQFHTELMAQASAVLKRAHKRGVELEYILETWSHLDEDQQELSRQLEVVESSIPSVGLVEENEDRLIDRITLYQHLKSSLNEYQPKLYQVLDDGKRLLISISCSDLESQLNQLGECWLSNTNKMSKELHRLETILKHWTRYQSESADLIHWLQSAKDRLEFWTQQSVTVPQELEMVRDHLNAFLEFSKEVDAQSSLKSSVLSTGNQLLRLKKVDTATLRSELSRIDSQWTDLLTNIPAVQEKLHQLQMDKLPSRHAISEVMSWISLMENVIQKDEDNIKNSIGYKAIHEYLQKYKGFKIDINCKQLTVDFVNQSVLQISSQDVESKRSDKTDFAEQLGAMNKSWQILQGLVTEKIQLLEGLLESWSEYENNVQCLKTWFETQEKRLKQQHRIGDQASVQNALKDCQDLEDLIKAKEKEVEKIEQNGLALIQNKKEDVSSIVMSTLRELGQTWANLDHMVGQLKILLKSVLDQWSSHKVAFDKINSYLMEARYSLSRFRLLTGSLEAVQVQVDNLQNLQDDLEKQERSLQKFGSITNQLLKECHPPVTETLTNTLKEVNMRWNNLLEEIAEQLQSSKALLQLWQRYKDYSKQCASTVQQQEDRTNELLKAATNKDIADDEVATWIQDCNDLLKGLGTVKDSLFFLHELGEQLKQQVDASAASAIQSDQLSLSQHLCALEQALCKQQTSLQAGVLDYETFAKSLEALEAWIVEAEEILQGQDPSHSSDLSTIQERMEELKGQMLKFSSMAPDLDRLNELGYRLPLNDKEIKRMQNLNRHWSLISSQTTERFSKLQSFLLQHQTFLEKCETWMEFLVQTEQKLAVEISGNYQHLLEQQRAHELFQAEMFSRQQILHSIIIDGQRLLEQGQVDDRDEFNLKLTLLSNQWQGVIRRAQQRRGIIDSQIRQWQRYREMAEKLRKWLVEVSYLPMSGLGSVPIPLQQARTLFDEVQFKEKVFLRQQGSYILTVEAGKQLLLSADSGAEAALQAELAEIQEKWKSASMRLEEQKKKLAFLLKDWEKCEKGIADSLEKLRTFKKKLSQSLPDHHEELHAEQMRCKELENAVGSWTDDLTQLSLLKDTLSAYISADDISILNERVELLQRQWEELCHQLSLRRQQIGERLNEWAVFSEKNKELCEWLTQMESKVSQNGDILIEEMIEKLKKDYQEEIAIAQENKIQLQQMGERLAKASHESKASEIEYKLGKVNDRWQHLLDLIAARVKKLKETLVAVQQLDKNMSSLRTWLAHIESELAKPIVYDSCNSEEIQRKLNEQQELQRDIEKHSTGVASVLNLCEVLLHDCDACATDAECDSIQQATRNLDRRWRNICAMSMERRLKIEETWRLWQKFLDDYSRFEDWLKSSERTAAFPSSSGVIYTVAKEELKKFEAFQRQVHECLTQLELINKQYRRLARENRTDSACSLKQMVHEGNQRWDNLQKRVTSILRRLKHFIGQREEFETARDSILVWLTEMDLQLTNIEHFSECDVQAKIKQLKAFQQEISLNHNKIEQIIAQGEQLIEKSEPLDAAIIEEELDELRRYCQEVFGRVERYHKKLIRLPLPDDEHDLSDRELELEDSAALSDLHWHDRSADSLLSPQPSSNLSLSLAQPLRSERSGRDTPASVDSIPLEWDHDYDLSRDLESAMSRALPSEDEEGQDDKDFYLRGAVGLSDVMIPESPEAYVKLTENAIKNTSGDHSALESQIRQLGKALDDSRFQIQQTENIIRSKTPTGPELDTSYKGYMKLLGECSSSIDSVKRLEHKLKEEEESLPGFVNLHSTETQTAGVIDRWELLQAQALSKELRMKQNLQKWQQFNSDLNSIWAWLGDTEEELEQLQRLELSTDIQTIELQIKKLKELQKAVDHRKAIILSINLCSPEFTQADSKESRDLQDRLSQMNGRWDRVCSLLEEWRGLLQDALMQCQGFHEMSHGLLLMLENIDRRKNEIVPIDSNLDAEILQDHHKQLMQIKHELLESQLRVASLQDMSCQLLVNAEGTDCLEAKEKVHVIGNRLKLLLKEVSRHIKELEKLLDVSSSQQDLSSWSSADELDTSGSVSPTSGRSTPNRQKTPRGKCSLSQPGPSVSSPHSRSTKGGSDSSLSEPGPGRSGRGFLFRVLRAALPLQLLLLLLIGLACLVPMSEEDYSCALSNNFARSFHPMLRYTNGPPPL

SEQ ID NO: 46278 - protein, 1322 aa, Homo sapiens
MRRISDWTGSLSRKKRKLQEPRSKEGSDYFDSRSDGLNTDVQGSSQASAFLWSGGSTQILSQRSESTHAIGSDPLRQNIYENFMRELEMSRTNTENIETSTETAESSSESLSSLEQLDLLFEKEQGVVRKAGWLFFKPLVTVQKERKLELVARRKWKQYWVTLKGCTLLFYETYGKNSMDQSSAPRCALFAEDSIVQSVPEHPKKENVFCLSNSFGDVYLFQATSQTDLENWVTAVHSACASLFAKKHGKEDTLRLLKNQTKNLLQKIDMDSKMKKMAELQLSVVSDPKNRKAIENQIQQWEQNLEKFHMDLFRMRCYLASLQGGELPNPKSLLAAASRPSKLALGRLGILSVSSFHALVCSRDDSALRKRTLSLTQRGRNKKGIFSSLKGLDTLARKGKEKRPSITQVDELLHIYGSTVDGVPRDNAWEIQTYVHFQDNHGVTVGIKPEHRVEDILTLACKMRQLEPSHYGLQLRKLVDDNVEYCIPAPYEYMQQQVYDEIEVFPLNVYDVQLTKTGSVCDFGFAVTAQVDERQHLSRIFISDVLPDGLAYGEGLRKGNEIMTLNGEAVSDLDLKQMEALFSEKSVGLTLIARPPDTKATLCTSWSDSDLFSRDQKSLLPPPNQSQLLEEFLDNFKKNTANDFSNVPDITTGLKRSQTDGTLDQVSHREKMEQTFRSAEQITALCRSFNDSQANGMEGPRENQDPPPRSLARHLSDADRLRKVIQELVDTEKSYVKDLSCLFELYLEPLQNETFLTQDEMESLFGSLPEMLEFQKVFLETLEDGISASSDFNTLETPSQFRKLLFSLGGSFLYYADHFKLYSGFCANHIKVQKVLERAKTDKAFKAFLDARNPTKQHSSTLESYLIKPVQRVLKYPLLLKELVSLTDQESEEHYHLTEALKAMEKVASHINEMQKIYEDYGTVFDQLVAEQSGTEKEVTELSMGELLMHSTVSWLNPFLSLGKARKDLELTVFVFKRAVILVYKENCKLKKKLPSNSRPAHNSTDLDPFKFRWLIPISALQVRLGNPAGTENNSIWELIHTKSEIEGRPETIFQLCCSDSESKTNIVKVIRSILRENFRRHIKCELPLEKTCKDRLVPLKNRVPVSAKLASSRSLKVLKNSSSNEWTGETGKGTLLDSDEGSLSSGTQSSGCPTAEGRQDSKSTSPGKYPHPGLADFADNLIKESDILSDEDDDHRQTVKQGSPTKDIEIQFQRLRISEDPDVHPEAEQQPGPESGEGQKGGEQPKLVRGHFCPIKRKANSTKRDRGTLLKAQIRHQSLDSQSENATIDLNSVLEREFSVQSLTSVVSEECFYETESHGKS

SEQ ID NO: 46279 - protein, 251 aa, Homo sapiens
MLSDAAPGKLRIVHGDVLTFKVEKAFSESLKRPWEDDPPNVHIIGNLPFSVSTPLIIKWLENISCRDGPFVYGRTQMTLTFQKEVAERLAANTGSKQRSRLSVMAQYLCNVRHIFTIPGQAFVPKPEVDVGVVHFTPLIQPKIEQPFKLVEKVVQNVFQFRRKYCHRGLRMLFPEAQRLESTGRLLELADIDPTLRPRQLSISHFKSLCDVYRKMCDEDPQLFAYNFREELKRRKSKNEEKEEDDAENYRL

SEQ ID NO: 46280 - protein, 2178 aa, Homo sapiens
METGLLPNHKLKTVGEAPAAPPHQQHHHHHHAHHHHHHAHHLHHHHALQQQLNQFQQQQQQQQQQQQQQQQQQHPISNNNSLGGAGGGAPQPGPDMEQPQHGGAKDSAAGGQADPPGPPLLSKPGDEDDAPPKMGEPAGGRYEHPGLGALGTQQPPVAVPGGGGGPAAVPEFNNYYGSAAPASGGPGGRAGPCFDQHGGQQSPGMGMMHSASAAAAGAPGSMDPLQNSHEGYPNSQCNHYPGYSRPGAGGGGGGGGGGGGGSGGGGGGGGAGAGGAGAGAVAAAAAAAAAAAGGGGGGGYGGSSAGYGVLSSPRQQGGGMMMGPGGGGAASLSKAAAGSAAGGFQRFAGQNQHPSGATPTLNQLLTSPSPMMRSYGGSYPEYSSPSAPPPPPSQPQSQAAAAGAAAGGQQAAAGMGLGKDMGAQYAAASPAWAAAQQRSHPAMSPGTPGPTMGRSQGSPMDPMVMKRPQLYGMGSNPHSQPQQSSPYPGGSYGPPGPQRYPIGIQGRTPGAMAGMQYPQQQMPPQYGQQGVSGYCQQGQQPYYSQQPQPPHLPPQAQYLPSQSQQRYQPQQDMSQEGYGTRSQPPLAPGKPNHEDLNLIQQERPSSLPDLSGSIDDLPTGTEATLSSAVSASGSTSSQGDQSNPAQSPFSPHASPHLSSIPGGPSPSPVGSPVGSNQSRSGPISPASIPGSQMPPQPPGSQSESSSHPALSQSPMPQERGFMAGTQRNPQMAQYGPQQTGPSMSPHPSPGGQMHAGISSFQQSNSSGTYGPQMSQYGPQGNYSRPPAYSGVPSASYSGPGPGMGISANNQMHGQGPSQPCGAVPLGRMPSAGMQNRPFPGNMSSMTPSSPGMSQQGGPGMGPPMPTVNRKAQEAAAAVMQAAANSAQSRQGSFPGMNQSGLMASSSPYSQPMNNSSSLMNTQAPPYSMAPAMVNSSAASVGLADMMSPGESKLPLPLKADGKEEGTPQPESKSKKSSSSTTTGEKITKVYELGNEPERKLWVDRYLTFMEERGSPVSSLPAVGKKPLDLFRLYVCVKEIGGLAQVNKNKKWRELATNLNVGTSSSAASSLKKQYIQYLFAFECKIERGEEPPPEVFSTGDTKKQPKLQPPSPANSGSLQGPQTPQSTGSNSMAEVPGDLKPPTPASTPHGQMTPMQGGRSSTISVHDPFSDVSDSSFPKRNSMTPNAPYQQGMSMPDVMGRMPYEPNKDPFGGMRKVPGSSEPFMTQGQMPNSSMQDMYNQSPSGAMSNLGMGQRQQFPYGASYDRRHEPYGQQYPGQGPPSGQPPYGGHQPGLYPQQPNYKRHMDGMYGPPAKRHEGDMYNMQYSSQQQEMYNQYGGSYSGPDRRPIQGQYPYPYSRERMQGPGQIQTHGIPPQMMGGPLQSSSSEGPQQNMWAARNDMPYPYQNRQGPGGPTQAPPYPGMNRTDDMMVPDQRINHESQWPSHVSQRQPYMSSSASMQPITRPPQPSYQTPPSLPNHISRAPSPASFQRSLENRMSPSKSPFLPSMKMQKVMPTVPTSQVTGPPPQPPPIRREITFPPGSVEASQPVLKQRRKITSKDIVTPEAWRVMMSLKSGLLAESTWALDTINILLYDDSTVATFNLSQLSGFLELLVEYFRKCLIDIFGILMEYEVGDPSQKALDHNAARKDDSQSLADDSGKEEEDAECIDDDEEDEEDEEEDSEKTESDEKSSIALTAPDAAADPKEKPKQASKFDKLPIKIVKKNNLFVVDRSDKLGRVQEFNSGLLHWQLGGGDTTEHIQTHFESKMEIPPRRRPPPPLSSAGRKKEQEGKGDSEEQQEKSIIATIDDVLSARPGALPEDANPGPQTESSKFPFGIQQAKSHRNIKLLEDEPRSRDETPLCTIAHWQDSLAKRCICVSNIVRSLSFVPGNDAEMSKHPGLVLILGKLILLHHEHPERKRAPQTYEKEEDEDKGVACSKDEWWWDCLEVLRDNTLVTLANISGQLDLSAYTESICLPILDGLLHWMVCPSAEAQDPFPTVGPNSVLSPQRLVLETLCKLSIQDNNVDLILATPPFSRQEKFYATLVRYVGDRKNPVCREMSMALLSNLAQGDALAARAIAVQKGSIGNLISFLEDGVTMAQYQQSQHNLMHMQPPPLEPPSVDMMCRAAKALLAMARVDENRSEFLLHEGRLLDISISAVLNSLVASVICDVLFQIGQL

SEQ ID NO: 46281 - protein, 178 aa, Homo sapiens
MAQYGPQQTGPSMSPHPSPGGQMHAGISSFQQSNSSGTYGPQMSQYGPQGNYSRPPAYSGVPSASYSGPGPGMGISANNQMHGQGPSQPCGAVPLGRMPSAGMQNRPFPGNMSSMTPSSPGMSQQGGPGMGPPMPTVNRKAQEAAAAVMQAAANSAQSRYATQEHAPGRYAVCLPVTT

SEQ ID NO: 46282 - protein, 1472 aa, Homo sapiens
MGISANNQMHGQGPSQPCGAVPLGRMPSAGMQNRPFPGNMSSMTPSSPGMSQQGGPGMGPPMPTVNRKAQEAAAAVMQAAANSAQSRPPYIRSPAYPSQSGAGGRPMFSSQHPNYGNSQAPMVHQPDQYGQGSFPGMNQSGLMASSSPYSQPMNNSSSLMNTQAPPYSMAPAMVNSSAASVGLADMMSPGESKLPLPLKADGKEEGTPQPESKSKDSYSSQGISQPPTPGNLPVPSPMSPSSASISSFHGDESDSISSPGWPKTPSSPKSSSSTTTGEKITKVYELGNEPERKLWVDRYLTFMEERGSPVSSLPAVGKKPLDLFRLYVCVKEIGGLAQVNKNKKWRELATNLNVGTSSSAASSLKKQYIQYLFAFECKIERGEEPPPEVFSTGDTKKQPKLQPPSPANSGSLQGPQTPQSTGSNSMAEVPGDLKPPTPASTPHGQMTPMQGGRSSTISVHDPFSDVSDSSFPKRNSMTPNAPYQQGMSMPDVMGRMPYEPNKDPFGGMRKVPGSSEPFMTQGQMPNSSMQDMYNQSPSGAMSNLGMGQRQQFPYGASYDRRHEPYGQQYPGQGPPSGQPPYGGHQPGLYPQQPNYKRHMDGMYGPPAKRHEGDMYNMQYSSQQQEMYNQYGGSYSGPDRRPIQGQYPYPYSRERMQGPGQIQTHGIPPQMMGGPLQSSSSEGPQQNMWAARNDMPYPYQNRQGPGGPTQAPPYPGMNRTDDMMVPDQRINHESQWPSHVSQRQPYMSSSASMQPITRPPQPSYQTPPSLPNHISRAPSPASFQRSLENRMSPSKSPFLPSMKMQKVMPTVPTSQVTGPPPQPPPIRREITFPPGSVEASQPVLKQRRKITSKDIVTPEAWRVMMSLKSGLLAESTWALDTINILLYDDSTVATFNLSQLSGFLELLVEYFRKCLIDIFGILMEYEVGDPSQKALDHNAARKDDSQSLADDSGKEEEDAECIDDDEEDEEDEEEDSEKTESDEKSSIALTAPDAAADPKEKPKQASKFDKLPIKIVKKNNLFVVDRSDKLGRVQEFNSGLLHWQLGGGDTTEHIQTHFESKMEIPPRRRPPPPLSSAGRKKEQEGKGDSEEQQEKSIIATIDDVLSARPGALPEDANPGPQTESSKFPFGIQQAKSHRNIKLLEDEPRSRDETPLCTIAHWQDSLAKRCICVSNIVRSLSFVPGNDAEMSKHPGLVLILGKLILLHHEHPERKRAPQTYEKEEDEDKGVACSKDEWWWDCLEVLRDNTLVTLANISGQLDLSAYTESICLPILDGLLHWMVCPSAEAQDPFPTVGPNSVLSPQRLVLETLCKLSIQDNNVDLILATPPFSRQEKFYATLVRYVGDRKNPVCREMSMALLSNLAQGDALAARAIAVQKGSIGNLISFLEDGVTMAQYQQSQHNLMHMQPPPLEPPSVDMMCRAAKALLAMARVDENRSEFLLHEGRLLDISISAVLNSLVASVICDVLFQIGQL

SEQ ID NO: 46283 - protein, 465 aa, Homo sapiens [sequence omitted]

SEQ ID NO: 46284 - protein, 588 aa, Homo sapiens
MYDFAAEPGNNELTVNEGEIITITNPDVGGGWLEGRNIKGERGLVPTDYVEILPSDGKDQFSCGNSVADQAFLDSLSASTAQASSSAASNNHQVGSGNDPWSAWSASKSGNWESSEGWGAQPEGAGAQRNTNTPNNWDTAFGHPQAYQGPATGDDDDWDEDWDGPKSSSYFKDSESADAGGAQRGNSRASSSSMKIPLNKFPGFAKPGTEQYLLAKQLAKPKEKIPIIVGDYGPMWVYPTSTFDCVVADPRKGSKMYGLKSYIEYQLTPTNTNRSVNHRYKHFDWLYERLLVKFGSAIPIPSLPDKQVTGRFEEEFIKMRMERLQAWMTRMCRHPVISESEVFQQFLNFRDEKEWKTGKRKAERDELAGVMIFSTMEPEAPDLDLVEIEQKCEAVGKFTKAMDDGVKELLTVGQEHWKRCTGPLPKEYQKIGKALQSLATVFSSSGYQGETDLNDAITEAGKTYEEIASLVAEQPKKDLHFLMECNHEYKGFLGCFPDIIGTHKGAIEKVKESDKLVATSKITLQDKQNMVKRVSIMSYALQAEMNHFHSNRIYDYNSVIRLYLEQQVQFYETIAEKLRQALSRFPVM

SEQ ID NO: 46285 - protein, 584 aa, Homo sapiens
MKSYIYVHTVSLDKGENHGIAWQARKELHKAVRKVLATSAKILRNPFADPFSTVDIEDHECAVWLLLRKSKSDDKTTRLEAVREMSETHHWHDYQYRIIAQACDPKTLIGLARSEESDLRFFLLPPPLPSLKEDSSTEEELRQLLASLPQTELDECIQYFTSLALSESSQSLAAQKGGLWCFGGNGLPYAESFGEVPSATVEMFCLEAIVKHSEISTHCDKIEANGGLQLLQRLYRLHKDCPKVQRNIMRVIGNMALNEHLHSSIVRSGWVSIMAEAMKSPHIMESSHAARILANLDRETVQEKYQDGVYVLHPQYRTSQPIKADVLFIHGLMGAAFKTWRQQDSEQAVIEKPMEDEDRYTTCWPKTWLAKDCPALRIISVEYDTSLSDWRARCPMERKSIAFRSNELLRKLRAAGVGDRPVVWISHSMGGLLVKKMLLEASTKPEMSTVINNTRGIIFYSVPHHGSRLAEYSVNIRYLLFPSLEVKELSKDSPALKTLQDDFLEFAKDKNFQVLNFVETLPTYIGSMIKLHVVPVESADLGIGDLIPVDVNHLNICKPKKKDAFLYQRTLQFIREALAKDLEN

SEQ ID NO: 46286 - protein, 366 aa, Homo sapiens
MYIHNKVHNRTRTLTCAGKCAEIIVAHLGYLNYTQYTVIVGFEHLKLPIKGMNFTWKTYNPAFSRLEIWFRFFFVVLTFIVTCLFAHSLRKFSMRDWGIEQKWMSVLLPLLLLYNDPFFPLSFLVNSWLPGMLDDLFQSMFLCALLLFWLCVYHGIRVQGERKCLTFYLPKFFIVGLLWLASVTLGIWQTVNELHDPMYQYRVDTGNFQGMKVFFMVVAAVYILYLLFLIVRACSELRHMPYVDLRLKFLTALTFVVLVISIAILYLRFGAQVLQDNFVAELSTHYQNSAEFLSFYGLLNFYLYTLAFVYSPSKNALYESQLKDNPAFSMLNDSDDDVIYGSDYEEMPLQNGQAIRAKYKEESDSD

SEQ ID NO: 46287 - protein, 1690 aa, Homo sapiens
MNYVPLTRDERTHEIKKLASESVYVVSLQSMNSQGRSQPVYRAALTKRKISEEDELDVPDDISVRVMSSQSVLVSWVDPVLEKQKKVVASRQYTVRYREKGELARWDYKQIANRRVLIENLIPDTVYEFAVRISQGERDGKWSTSVFQRTPESAPTTAPENLNVWPVNGKPTVVAASWDALPETEGKVKEYILSYAPALKPFGAKSLTYPGDTTSALVDGLQPGERYLFKIRATNRRGLGPHSKAFIVAMPTTSKADVEQNTEDNGKPEKPEPSSPSPRAPASSQHPSVPASPQGRNAKDLLLDLKNKILANGGAPRKPQLRAKKAEELDLQSTEITGEEELGSREDSPMSPSDTQDQKRTLRPPSRHGHSVVAPGRTAVRARMPALPRREGVDKPGFSLATQPRPGAPPSASASPAHHASTQGTSHRPSLPASLNDNDLVDSDEDERAVGSLHPKGAFAQPRPALSPSRQSPSSVLRDRSSVHPGAKPASPARRTPHSGAAEEDSSASAPPSRLSPPHGGSSRLLPTQPHLSSPLSKGGKDGEDAPATNSNAPSRSTMSSSVSSHLSSRTQVSEGAEASDGESHGDGDREDGGRQAEATAQTLRARPASGHFHLLRHKPFAANGRSPSRFSIGRGPRLQPSSSPQSTVPSRAHPRVPSHSDSHPKLSSGIHGDEEDEKPLPATVVNDHVPSSSRQPISRGWEDLRRSPQRGASLHRKEPIPENPKSTGADTHPQGKYSSLASKAQDVQQSTDADTEGHSPKAQPGSTDRHASPARPPAARSQQHPSVPRRMTPGRAPQQQPPPPVATSQHHPGPQSRDAGRSPSQPRLSLTQAGRPRPTSQGRSHSSSDPYTASSRGMLPTALQNQDEDAQGSYDDDSTEVEAQDVRAPAHAARAKEAAASLPKHQQVESPTGAGAGGDHRSQRGHAASPARPSRPGGPQSRARVPSRAAPGKSEPPSKRPLSSKSQQSVSAEDDEEEDAGFFKGGKEDLLSSSVPKWPSSSTPRGGKDADGSLAKEEREPAIALAPRGGSLAPVKRPLPPPPGSSPRASHVPSRLPPRSAATVSPVAGTHPWPQYTTRAPPGHFSTTPMLSLRQRMMHARFRNPLSRQPARPSYRQGYNGRPNVEGKVLPGSNGKPNGQRIINGPQGTKWVVDLDRGLVLNAEGRYLQDSHGNPLRIKLGGDGRTIVDLEGTPVVSPDGLPLFGQGRHGTPLANAQDKPILSLGGKPLVGLEVIKKTTHPPTTTMQPTTTTTPLPTTTTPRPTTATTRRTTTTRRTTTRRPTTTVRTTTRTTTTTTPTPTTPIPTCPPGTLERHDDDGNLIMSSNGIPECYAEEDEFSGLETDTAVPTEEAYVIYDEDYEFETSRPPTTTEPSTTATTPRVIPEEGAISSFPEEEFDLAGRKRFVAPYVTYLNKDPSAPCSLTDALDHFQVDSLDEIIPNDLKKSDLPPQHAPRNITVVAVEGCHSFVIVDWDKATPGDVVTGYLVYSASYEDFIRNKWSTQASSVTHLPIENLKPNTRYYFKVQAQNPHGYGPISPSVSFVTESDNPLLVVRPPGGEPIWIPFAFKHDPSYTDCHGRQYVKRTWYRKFVGVVLCNSLRYKIYLSDNLKDTFYSIGDSWGRGEDHCQFVDSHLDGRTGPQSYVEALPTIQGYYRQYRQEPVRFGNIGFGTPYYYVGWYECGVSIPGKW

SEQ ID NO: 46288 - protein, 308 aa, Homo sapiens [sequence omitted]

SEQ ID NO: 46289 - protein, 404 aa, Homo sapiens
MLDLTQAILNLGFLTGAFTLGYAADRYGRIVIYLLSCLGVGVTGVVVAFAPNFPVFVIFRFLQGVFGKGTWMTCYVIVTEIVGSKQRRIVGIVIQMFFTLGIIILPGIAYFIPNWQGIQLAITLPSFLFLLYYWVVPESPRWLITRKKGDKALQILRRIAKCNGKYLSSNYSEITVTDEEVSNPSFLDLVRTPQMRKCTLILMFAWFTSAVVYQGLVMRLGIIGGNLYIDFFISGVVELPGALLILLTIERLGRRLPFAASNIVAGVACLVTAFLPEGIAWLRTTVATLGRLGITMAFEIVYLVNSELYPTTLRNFGVSLCSGLCDFGGIIAPFLLFRLAAVWLELPLIIFGILASICGGLVMLLPETKGIALPETVDDVEKLGSPHSCKCGRNKKTPVSRSHL

SEQ ID NO: 46290 - protein, 321 aa, Homo sapiens
METKEKPKPTPDYLMQLMNDKKLMSSLPNFCGIFNHLERLLDEEISRVRKDMYNDTLNGSTEKRSAELPDAVGPIVQLQEKLYVPVKEYPDFNFVGRILGPRGLTAKQLEAETGCKIMVRGKGSMRDKKKEEQNRGKPNWEHLNEDLHVLITVEDAQNRAEIKLKRAVEEVKKLLVPAAEGEDSLKKMQLMELAILNGTYRDANIKSPALAFSLAATAQAAPRIITGPAPVLPPAALRTPTPAGPTIMPLIRQIQTAVMPNGTPHPTAAIVPPGPEAGLIYTPYEYPYTLAPATSILEYPIEPSGVLEWIEMPVMPDISAH

SEQ ID NO: 46291 - protein, 313 aa, Homo sapiens
METKEKPKPTPDYLMQLMNDKKLMSSLPNFCGIFNHLERLLDEEISRVRKDMYNDTLNGSTEKRSAELPDAVGPIVQLQEKLYVPVKEYPDFNFVGRILGPRGLTAKQLEAETGCKIMVRGKGSMRDKKKEEQNRGKPNWEHLNEDLHVLITVEDAQNRAEIKLKRAVEEVKKLLVPAAEGEDSLKKMQLMELAILNGTYRDANIKSPTAQAAPRIITGPAPVLPPAALRTPTPAGPTIMPLIRQIQTAVMPNGTPHPTAAIVPPGPEAGLIYTPYEYPYTLAPATSILEYPIEPSGVLEWIEMPVMPDISAH

SEQ ID NO: 46292 - protein, 77 aa, Homo sapiens
MGPVKQLKKMFEATRLLATIVMLLCFIFTLCAALWWHKKGLAVLFCILQFLSMTWYSLSYIPYARDAVIKCCSSLLS

SEQ ID NO: 46293 - protein, 729 aa, Homo sapiens [sequence omitted]

SEQ ID NO: 46294 - protein, 1789 aa, Homo sapiens
MRFYFQDKAAGNFATKCIRVSSTATTQDVIETLAEKFRPDMRMLSSPKYSLYEVHVSGERRLDIDEKPLVVQLNWNKDDREGRFVLKNENDAIPPKKAQSNGPEKQEKEGVIQNFKRTLSKKEKKEKKKREKEALRQASDKDDRPFQGEDVENSRLAAEVYKDMPETSFTRTISNPEVVMKRRRQQKLEKRMQEFRSSDGRPDSGGTLRIYADSLKPNIPYKTILLSTTDPADFAVAEALEKYGLEKENPKDYCIARVMLPPGAQHSDEKGAKEIILDDDECPLQIFREWPSDKGILVFQLKRRPPDHIPKKTKKHLEGKTPKGKERADGSGYGSTLPPEKLPYLVELSPGRRNHFAYYNYHTYEDGSDSRDKPKLYRLQLSVTEVGTEKLDDNSIQLFGPGIQPHHCDLTNMDGVVTVTPRSMDAETYVEGQRISETTMLQSGMKVQFGASHVFKFVDPSQDHALAKRSVDGGLMVKGPRHKPGIVQETTFDLGGDIHSGTALPTSKSTTRLDSDRVSSASSTAERGMVKPMIRVEQQPDYRRQESRTQDASGPELILPASIEFRESSEDSFLSAIINYTNSSTVHFKLSPTYVLYMACRYVLSNQYRPDISPTERTHKVIAVVNKMVSMMEGVIQEVDQVDQKQKNIAGALAFWMANASELLNFIKQDRDLSRITLDAQDVLAHLVQMAFKYLVHCLQSELNNYMPAFLDDPEENSLQRPKIDDVLHTLTGAMSLLRRCRVNAALTIQLFSQLFHFINMWLFNRLVTDPDSGLCSHYWGAIIRQQLGHIEAWAEKQGLELAADCHLSRIVQATTLLTMDKYAPDDIPNINSTCFKLNSLQLQALLQNYHCAPDEPFIPTDLIENVVTVAENTADELARSDGREVQLEEDPDLQLPFLLPEDGYSCDVVRNIPNGLQEFLDPLCQRGFCRLIPHTRSPGTWTIYFEGADYESHLLRENTELAQPLRKEPEIITVTLKKQNGMGLSIVAAKGAGQDKLGIYVKSVVKGGAADVDGRLAAGDQLLSVDGRSLVGLSQERAAELMTRTSSVVTLEVAKQGAIYHGLATLLNQPSPMMQRISDRRGSGKPRPKSEGFELYNNSTQNGSPESPQLPWAEYSEPKKLPGDDRLMKNRADHRSSPNVANQPPSPGGKSAYASGTTAKITSVSTGNLCTEEQTPPPRPEAYPIPTQTYTREYFTFPASKSQDRMAPPQNQWPNYEEKPHMHTDSNHSSIAIQRVTRSQEELREDKAYQLERHRIEAAMDRKSDSDMWINQSSSLDSSTSSQEHLNHSSKSVTPASTLTKSGPGRWKTPAAIPATPVAVSQPIRTDLPPPPPPPPVHYAGDFDGMSMDLPLPPPPSANQIGLPSAQVAAAERRKREEHQRWYEKEKARLEEERERKRREQERKLGQMRTQSLNPAPFSPLTAQQMKPEKPSTLQRPQETVIRELQPQQQPRTIERRDLQYITVSKEELSSGDSLSPDPWKRDAKEKLEKQQQMHIVDMLSKEIQELQSKPDRSAEESDRLRKLMLEWQFQKRLQESKQKDEDDEEEEDDDVDTMLIMQRLEAERRARLQDEERRRQQQLEEMRKREAEDRARQEEERRRQEEERTKRDAEEKRRQEEGYYSRLEAERRRQHDEAARRLLEPEAPGLCRPPLPRDYEPPSPSPAPGAPPPPPQRNASYLKTQVLSPDSLFTAKFVAYNEEEEEEDCSLAGPNSYPGSTGAAVGAHDACRDAKEKRSKSQDADSPGSSGAPENLTFKERQRLFSQGQDVSNKVKASRKLTELENELNTK

SEQ ID NO: 46295 - protein, 123 aa, Homo sapiens
MVHAASDPSSSSGRLSEPDPSHTLEERVVHWYFKLLDKNSSGDIGKKEIKPFKRFLRKKSKPKKCVKKFVEYCDVNNDKSISVQELMGCLGVAKEDGKADTKKRHTPRGHAESTSNRQPRKQG

SEQ ID NO: 46296 - protein, 472 aa, Homo sapiens
MILLTAGLGQLLKSYLQNTKLTLAHRSFISLTNLEDLIVFPDVTYEVLSVLEEVMMKSAFILKIMLPYWEVALVKFKSHRFADCAILLLTQLETGLRNVFATLNRCPKRLLTAESTALYTTFDQILAKHLNDGKINQLPLFLGEPAMEFLWDFLNHQEGPRIRDHLSHGEINLHEFSKETTNQLLAFSLVLLLRFVDDCLLSVFKEKSAVELLISLAEGYSSRCHPVFQLKKQVLSCEESIRVWALLPFPEELTRQAVRLEDNSETNACHSLITKMTDELYHHMPENRCVLKDLDRLPTETWPQLLRELCSTPVPTLFCPRIVLEVLVVLRSISEQCRRVSSQVTVASELRHRQWVERTLRSRQRQNYLRMWSSIRLLSPVLSLILLLIALELVNIHAVCGKNAHEYQQYLKFVKSILQYTENLVAYTSYEKNKWNETINLTHTALLKMWTFSEKKQMLIHLAKKSTSKVLL

SEQ ID NO: 46297 - protein, 256 aa, Homo sapiens
MVGTSPPGHPVGAGSHVGGHRASCRLGGPGRIVASGREGCFWQGDLCGPRLCGCGVEHGLTVHLSPRPPEEEVQVPLVQDLVTKKQKQPLPVVASRAVGSARTWHPDLDSGPWAWPGPGTRTCTRGRGLGPDPAFGLGLGKGLLSLQGACGQQGPALPSVVSIKKPTTWPRTPTCLRVCLGAPGRPRTCLGSRLPPSSCLQDGRALWPRAGADPLRAWPSKVFPPGPACRDDHSPAVSGHGFGFCANEVSQVGWKH

SEQ ID NO: 46298 - protein, 34 aa, Homo sapiens
MLRYLRSIPSCWMLGPTSGQEGRAHPFLEETLTQ

SEQ ID NO: 46299 - protein, 347 aa, Homo sapiens [sequence omitted]

SEQ ID NO: 46300 - protein, 250 aa, Homo sapiens
MAFENKAGLPVEPATFQLYVPALSALWRDSGIREAFSRRSEFQLGESVKYFLDNLDRIGQLNYFPSKQDILLARKATKGIVEHDFVIKKIPFKMVDVGGQRSQRQKWFQCFDGITSILFMVSSSEYDQVLMEDRRTNRLVESMNIFETIVNNKLFFNVSIILFLNKMDLLVEKVKTVSIKKHFPDFRGDPHRLEDVQRYLVQCFDRKRRNRSKPLFHHFTTAIDTENVRFVFHAVKDTILQENLKDIMLQ

SEQ ID NO: 46301 - protein, 678 aa, Homo sapiens
MLENYSHLVSVGYDTTKPNVIIKLEQGEEPWIMGGEFPCQHSPEAWRVDDLIERIQENEDKHSRQAACINSKTLTEEKENTFSQIYMETSLVPSSIIAHNCVSCGKNLESISQLISSDGSYARTKPDECNECGKTYHGEKMCEFNQNGDTYSHNEENILQKISILEKPFEYNECMEALDNEAVFIAHKRAYIGEKPYEWNDSGPDFIQMSNFNAYQRSQMEMKPFECSECGKSFCKKSKFIIHQRAHTGEKPYECNVCGKSFSQKGTLTVHRRSHLEEKPYKCNECGKTFCQKLHLTQHLRTHSGEKPYECSECGKTFCQKTHLTLHQRNHSGERPYPCNECGKSFSRKSALSDHQRTHTGEKLYKCNECGKSYYRKSTLITHQRTHTGEKPYQCSECGKFFSRVSYLTIHYRSHLEEKPYECNECGKTFNLNSAFIRHRKVHTEEKSHECSECGKFSQLYLTDHHTAHLEEKPYECNECGKTFLVNSAFDGHQPLPKGEKSYECNVCGKLFNELSYYTEHYRSHSEEKPYGCSECGKTFSHNSSLFRHQRVHTGEKPYECYECGKFFSQKSYLTIHHRIHSGEKPYECSKCGKVFSRMSNLTVHYRSHSGEKPYECNECGKVFSQKSYLTVHYRTHSGEKPYECNECGKKFHHRSAFNSHQRIHRRGNMNVLDVENL

SEQ ID NO: 46302 - protein, 2944 aa, Homo sapiens
MDSHRVGAATAGRLPASGLPGPLPPGKYMAGLNLHPHPGEAFLGSFVASGMGPSASSHGSPVPLPSDLSFRSPTPSNLPMVQLWAAHAHEGFSHLPSGLYPSYLHLNHLEPPSSGSPLLSQLGQPSIFDTQKGQGPGGDGFYLPTAGAPGSLHSHAPSARTPGGGHSSGAPAKGSSSRDGPAKERAGRGGEPPPLFGKKDPRARGEEASGPRGVVDLTQEARAEGRQDRGPPRLAERLSPFLAESKTKNAALQPSVLTMCNGGAGDVGLPALVAEAGRGGAKEAARQDEGARLLRRTETLLPGPRPCPSPLPPPPAPPKGPPAPPAATPAGVYTVFREQGREHRVVAPTFVPSVEAFDERPGPIQIASQARDARAREREAGRPGVLQAPPGSPRPLDRPEGLREKNSVIRSLKRPPPADAPTVRATRASPDPRAYVPAKELLKPEADPRPCERAPRGPAGPAAQQAAKLFGLEPGRPPPTGPEHKWKPFELGNFAATQMAVLAAQHHHSRAEEEAAVVAASSSKKAYLDPGAVLPRSAATCGRPVADMHSAAHGSGEASAMQSLIKYSGSFARDAVAVRPGGCGKKSPFGGLGTMKPEPAPTSAGASRAQARLPHSGGPAAGGGRQLKRDPERPESAKAFGREGSGAQGEAEVRHPPVGIAVAVARQKDSGGSGRLGPGLVDQERSLSLSNVKGHGRADEDCVDDRARHREERLLGARLDRDQEKLLRESKELADLARLHPTSCAPNGLNPNLMVTGGPALAGSGRWSADPAAHLATHPWLPRSGNASMWLAGHPYGLGPPSLHQGMAPAFPPGLGGSLPSAYQFVRDPQSGQLVVIPSDHLPHFAELMERATVPPLWPALYPPGRSPLHHAQQLQLFSQQHFLRQQEFLYLQQQAAQALELQRSAQLVQERLKAQEHRAEMEEKGSKRGLEAAGKAGLATAGPGLLPRKPPGLAAGPAGTYGKAVSPPPSPRASPVAALKAKVIQKLEDVSKPPAYAYPATPSSHPTSPPPASPPPTPGITRKEEAPENVVEKKDLELEKEAPSPFQALFSDIPPRYPFQALPPHYGRPYPFLLQPTAAADADGLAPDVPLPADGPERLALSPEDKPIRLSPSKITEPLREGPEEEPLAEREVKAEVEDMDEGPTELPPLESPLPLPAAEAMATPSPAGGCGGGLLEAQALSATGQSCAEPSECPDFVEGPEPRVDSPGRTEPCTAALDLGVQLTPETLVEAKEEPVEVPVAVPVVEAVPEEGLAQVAPSESQPTLEMSDCDVPAGEGQCPSLEPQEAVPVLGSTCFLEEASSDQFLPSLEDPLAGMNALAAAAELPQARPLPSPGAAGAQALEKLEAAESLVLEQSFLHGITLLSEIAELELERRSQEMGGAERALVARPSLESLLAAGSHMLREVLDGPVVDPLKNLRLPRELKPNKKYSWMRKKEERMYAMKSSLEDMDALELDFRMRLAEVQRQYKEKQRELVKLQRRRDSEDRREEPHRSLARRGPGRPRKRTHAPSALSPPRKRGKSGHSSGKLSSKSLLTSDDYELGAGIRKRHKGSEEEHDALIGMGKARGRNQTWDEHEASSDFISQLKIKKKKMASDQEQLASKLDKALSLTKQDKLKSPFKFSDSAGGKSKTSGGCGRYLTPYDSLLGKNRKALAKGLGLSLKSSREGKHKRAAKTRKMEVGFKARGQPKSAHSPFASEVSSYSYNTDSEEDEEFLKDEWPAQGPSSSKLTPSLLCSMVAKNSKAAGGPKLTKRGLAAPRTLKPKPATSRKQPFCLLLREAEARSSFSDSSEESFDQDESSEEEDEEEELEEEDEASGGGYRLGARERALSPGLEESGLGLLARFAASALPSPTVGPSLSVVQLEAKQKARKKEERQSLLGTEFEYTDSESEVKVRKRSPAGLLRPKKGLGEPGPSLAAPTPGARGPDPSSPDKAKLAVEKGRKARKLRGPKEPGFEAGPEASDDDLWTRRRSERIFLHDASAAAPAPVSTAPATKTSRCAKGGPLSPRKDAGRAKDRKDPRKKKKGKEAGPGAGLPPPRAPALPSEARAPHASSLTAAKRSKAKAKGKEVKKENRGKGGAVSKLMESMAAEEDFEPNQDSSFSEDEHLPRGGAVERPLTPAPRSCIIDKDELKDGLRVLIPMDDKLLYAGHVQTVHSPDIYRVVVEGERGNRPHIYCLEQLLQEAIIDVRPASTRFLPQGTRIAAYWSQQYRCLYPGTVVRGLLDLEDDGDLITVEFDDGDTGRIPLSHIRLLPPDYKIQCAEPSPALLVPSAKRRSRKTSKDTGEGKDGGTAGSEEPGAKARGRGRKPSAKAKGDRAATLEEGNPTDEVPSTPLALEPSSTPGSKKSPPEPVDKRAKAPKARPAPPQPSPAPPAFTSCPAPEPFAELPAPATSLAPAPLITMPATRPKPKKARAAEESGAKGPRRPGEEAELLVKLDHEGVTSPKSKKAKEALLLREDPGAGGWQEPKSLLSLGSYPPAAGSSEPKAPWPKATDGDLAQEPGPGLTFEDSGNPKSPDKAQAEQDGAEESESSSSSSSGSSSSSSSSSSSGSETEGEEEGDKNGDGGCGTGGRNCSAASSRAASPASSSSSSSSSSSSSSSSSSSSSSSSSSSSSSSSSSSSSSSSSSSSSSSSSSSSSSSSSSTTDEDSSCSSDDEAAPAPTAGPSAQAALPTKATKQAGKARPSAHSPGKKTPAPQPQAPPPQPTQPLQPKAQAGAKSRPKKREGVHLPTTKELAKRQRLPSVENRPKIAAFLPARQLWKWFGKPTQRRGMKGKARKLFYKAIVRGKEMIRIGDCAVFLSAGRPNLPYIGRIQSMWESWGNNMVVRVKWFYHPEETSPGKQFHQGQHWDQKSSRSLPAALRVSSQRKDFMERALYQSSHVDENDVQTVSHKCLVVGLEQYEQMLKTKKYQDSEGLYYLAGTYEPTTGMIFSTDGVPVLC

SEQ ID NO: 46303 - protein, 663 aa, Homo sapiens
MLSALQHLRSLAIDVSPGFDASQLSSECKATLSRVRELKQTLFTPSYGVVPCCTSLEKLLLYFEILDRTREGAILSGQLMVGQSNVPHYQNLRVFYARLAPGYINQEVVRLYLAVLSDRTPQNLHAFLISVPGSFAESGATKNLLDSMARNVVLDALQLPKSWLNGSSLLQHMKFNNPFYFSFSRCTLSGGHLIQQVINGGKDLRSLASLNLSGCVHCLSPDSLLRKAEDDIDSSILETLVASCCNLRHLNLSAAHHHSSEGLGRHLCQLLARLRHLRSLSLPVCSVADSAPRADRAPAQPAMHAVPRGFGKKVRVGVQSCPSPFSGQACPQPSSVFWSLLKNLPFLEHLELIGSNFSSAMPRNEPAIRNSLPPCSRAQSVGDSEVAAIGQLAFLRHLTLAQLPSVLTGSGLVNIGLQCQQLRSLSLANLGMMGKVVYMPALSDMLKHCKRLRDLRLEQPYFSANAQFFQALSQCPSLQRLCLVSRSGTLQPDAVLAFMARCLQVVMCHLFTGESLATCKSLQQSLLRRWGEVTGRRPQLFTELREEPSARTSRATGRRQPCLPDSGVVCCPCGRPLAVSGIILVGVSPSLVVKTTCVYRVLFKNLDYASIFFLVCLFETESHSVVQAGVQWRDLSSLQPLLSGLQPQPPEQLGLQVCTTIPG

SEQ ID NO: 46304 - protein, 607 aa, Homo sapiens
MQESQEPNLENIWGQEAAEVDQELVELLVKETEARFPDVANGFIEEIIHFKNYYDLNVLCNFLLENPDYPKREDRIIINPSSSLLASQDETKLPKIDFFDYSKLTPLDQRCFIQAADLLMADFKVLSSQDIKWALHELKGHYAITRKALSDAIKKWQELSPETSGKRKKRKQMNQYSYIDFKFEQGDIKIEKRMFFLENKRRHCRSYDRRALLPAVQQEQEFYEQKIKEMAEHEDFLLALQMNEEQYQKDGQLIECRCCYGEFPFEELTQCADAHLFCKECLIRYAQEAVFGSGKLELSCMEGSCTCSFPTSELEKVLPQTILYKYYERKAEEEVAAAYADELVRCPSCSFPALLDSDVKRFSCPNPHCRKETCRKCQGLWKEHNGLTCEELAEKDDIKYRTSIEEKMTAARIRKCHKCGTGLIKSEGCNRMSCRCGAQMCYLCRVSINGYDHFCQHPRSPGAPCQECSRCSLWTDPTEDDEKLIEEIQKEAEEEQKRKNGENTFKRIGPPLEKPVEKVQRVEALPRPVPQNLPQPQMPPYAFAHPPFPLPPVRPVFNNFPLNMGPIPAPYVPPLPNVRVNYDFGPIHMPLEHNLPMHFGPQPRHRF

SEQ ID NO: 46305 - protein, 372 aa, Homo sapiens [sequence omitted]

SEQ ID NO: 46306 - protein, 818 aa, Homo sapiens
MQENYGILVSLGYPIPKPDLIFRLEQGEEPWVPDSPRPEEGDIVTGVYTGAWFWTDDIEDHEEEDDEDFLAEVAEEENEPPGLWSAAYGVGDVPGTWGPDDSDSAQTPEGWGPDPGGLGVLADGSEAKPFLPGREPGANLLSPWAFPAAVAPPAGRPETTCDVCGKVFPHRSRLAKHQRYHAAVKPFGCEECGKGFVYRSHLAIHQRTHTGEKPFPCPDCGKRFVYKSHLVTHRRIHTGERPYRCAFCGAGFGRRSYLVTHQRTHTGERPYPCSHCGRSFSQSSALARHQAVHTADRPHCCPDCGQAFRLRADFQRHRRGGGCAEAGGDGPRREPGETAAAAGPEDTDPGPEGSEVGEADGEAEAAAEEREEAAVAAPTPSGKVDPAPERRFLELGNGLGEGEGPSSHPLGFHFPVHPKSWLHPDSFPILGLPDFRERLPVDGRPLPAPLGGPLSLVEGTGLACDPFGGGGAAGGGGGLRAFGPAIGGLLAEPAPAALAEEESPWICSDCGKTFGRRAALAKHQRYHAGERPHRCADCGKSFVYGSHLARHRRTHTGERPFPCPECGARFARGSHLAAHVRGHTGEKPFVCGVCGAGFSRRAHLTAHGRAHTGERPYACGECGRRFGQSAALTRHQWAHAEEKPHRCPDCGKGFGHSSDFKRHRRTHTGEKPFRCADCGRGFAQRSNLAKHRRGHTGERPFPCPECGKRFSQRSVLVTHQRTHTGERPYACANCGRRFSQSSHLLTHMKTHRGATAAPGSGSAPAPAPKPEAAAKGPSSAGPGERGSALLEFAGGTSFGSEHQAAFAGPSGAYREGVL

SEQ ID NO: 46307 - protein, 462 aa, Homo sapiens
MEEKPYKWNGSEIAFLQMSDLTVHQTSHMEMKPYECSECGKSFCKKSKFIIHQRTHTGEKPYECNQCGKSFCQKGTLTVHQRTHTGEKPYECNECGKNFYQKLHLIQHQRTHSGEKPYECSYCGKSFCQKTHLTQHQRTHSGERPYVCHDCGKTFSQKSALNDHQKIHTGVKLYKCSECGKCFCRKSTLTTHLRTHTGEKPYECNECGKFFSRLSYLTVHYRTHSGEKPYECNECGKTFYLNSALMRHQRVHTGEKPYECNECGKLFSQLSYLTIHHRTHSGVKPYECSECGKTFYQNSALCRHRRIHKGEKPYECYICGKFFSQMSYLTIHHRIHSGEKPYECSECGKTFCQNSALNRHQRTHTGEKAYECYECGKCFSQMSYLTIHHRIHSGEKPFECNECGKAFSRMSYLTVHYRTHSGEKPYECTECGKKFYHKSAFNSHQRIHRRGNMNVIDVGRLL

SEQ ID NO: 46308 - protein, 371 aa, Homo sapiens
MSEIHFREMASKSWLNFLTFLCGSAIGFLLCSQLFSILLGEKVDTQPNVLHNDPHARHSDDNGQNHLEGQMNFNADSSQHKDENTDIAENLYQKVRILCWVMTGPQNLEKKAKHVKATWAQRCNKVLFMSSEENKDFPAVGLKTKEGRDQLYWKTIKAFQYVHEHYLEDADWFLKADDDTYVILDNLRWLLSKYDPEEPIYFGRRFKPYVKQGYMSGGAGYVLSKEALKRFVDAFKTDKCTHSSSIEDLALGRCMEIMNVEAGDSRDTIGKETFHPFVPEHHLIKGYLPRTFWYWNYNYYPPVEGPGCCSDLAVSFHYVDSTTMYELEYLVYHLRPYGYLYRYQPTLPERILKEISQANKNEDTKVKLGNP

SEQ ID NO: 46309 - protein, 686 aa, Homo sapiens
MDDYDSEDDNDWRPTVVKRKGRSASQKEGSDGDNEDDEDEGSGSDEDENDEGNDEDHSSPASEGGCKKKKSKVLSRNSADDEELTNDSLTLSQSKSNEDSLILEKSQNWSSQKMDHILICCVCLGDNSEDADEIIQCDNCGITVHEGCYGVDGESDSIMSSASENSTEPWFCDACKCGVSPSCELCPNQDGIFKETDAGRWVHIVCALYVPGVAFGDIDKLRPVTLTEMNYSKYGAKECSFCEDPRFARTGVCISCDAGMCRAYFHVTCAQKEGLLSEAAAEEDIADPFFAYCKQHADRLDRKWKRKNYLALQSYCKMSLQEREKQLSPEAQARINARLQQYRAKAELARSTRPQAWVPREKLPRPLTSSASAIRKLMRKAELMGISTDIFPVDNSDTSSSVDGRRKHKQPALTADFVNYYFERNMRMIQIQENMAEQKNIKDKLENEQEKLHVEYNKLCESLEELQNLNGKLRSEGQGIWALLGRITGQKLNIPAILRAPKERKPSKKEGGTQKTSTLPAVLYSCGICKKNHDQHLLLLCDTCKLHYHLGCLDPPLTRMPRKTKNSYWQCSECDQAGSSDMEADMAMETLPDGTKRSRRQIKEPVKFVPQDVPPEPKKIPIRNTRTRGRKRSFVPEEEKHEERVPRERRQRQSVLQKKPKAEDLRTECATCKGTGDNENLVRYPS

SEQ ID NO: 46310 - protein, 746 aa, Homo sapiens
MDDYDSEDDNDWRPTVVKRKGRSASQKEGSDGDNEDDEDEGSGSDEDENDEGNDEDHSSPASEGGCKKKKSKVLSRNSADDEELTNDSLTLSQSKSNEDSLILEKSQNWSSQKMDHILICCVCLGDNSEDADEIIQCDNCGITVHEGCYGVDGESDSIMSSASENSTEPWFCDACKCGVSPSCELCPNQDGIFKETDAGRWVHIVCALYVPGVAFGDIDKLRPVTLTEMNYSKYGAKECSFCEDPRFARTGVCISCDAGMCRAYFHVTCAQKEGLLSEAAAEEDIADPFFAYCKQHADRLDRKWKRKNYLALQSYCKMSLQEREKQLSPEAQARINARLQQYRAKAELARSTRPQAWVPREKLPRPLTSSASAIRKLMRKAELMGISTDIFPVDNSDTSSSVDGRRKHKQPALTADFVNYYFERNMRMIQIQENMAEQKNIKDKLENEQEKLHVEYNKLCESLEELQNLNGKLRSEGQGIWALLGRITGQKLNIPAILRAPKERKPSKKEGGTQKTSTLPAVLYSCGICKKNHDQHLLLLCDTCKLHYHLGCLDPPLTRMPRKTKNSYWQCSECDQAGSSDMEADMAMETLPDGTKRSRRQIKEPVKFVPQDVPPEPKKIPIRNTRTRGRKRSFVPEEEKHEERVPRERRQRQSVLQKKPKAEDLRTECATCKGTGDNENLVRCDECRLCYHFGCLDPPLKKSPKQTGYGWICQECDSSSSKEDENEAERKNISQELNMEQKNPKK

SEQ ID NO: 46311 - protein, 176 aa, Homo sapiens
MASVFVCLLLSGLAVFFLFPRSIDVKYIGVKSAYVSYDVQKRTIYLNITNTLNITNNNYYSVEVENITAQVQFSKTVIGKARLNNITIIGPLDMKQIDYTVPTVIAEEMSYMYDFCTLISIKVHNIVLMMQVTVTTTYFGHSEQISQERYQYVDCGRNTTYQLGQSEYLNVLQPQQ

SEQ ID NO: 46312 - protein, 466 aa, Homo sapiens
MVTNSQRGRNCNEKPTNVRKRKFINRDLAHDSEELFQDLSQLQETWLAEAQVPDNDEQFVPDYQAESLAFHGLPLKIKKEPHSPCSEISSACSQEQPFKFSYGEKCLYNVSAYDQKPQVGMRPSNPPTPSSTPVSPLHHASPNSTHTPKPDRAFPAHLPPSQSIPDSSYPMDHRFRRQLSEPCNSFPPLPTMPREGRPMYQRQMSEPNIPFPPQGFKQEYHDPVYEHNTMVGSAASQSFPPPLMIKQEPRDFAYDSEVPSCHSIYMRQEGFLAHPSRTEGCMFEKGPRQFYDDTCVVPEKFDGDIKQEPGMYREGPTYQRRGSLQLWQFLVALLDDPSNSHFIAWTGRGMEFKLIEPEEVARRWGIQKNRPAMNYDKLSRSLRYYYEKGIMQKVAGERYVYKFVCDPEALFSMAFPDNQRPLLKTDMERHINEEDTVPLSHFDESMAYMPEGGCCNPHPYNEGYVY

SEQ ID NO: 46313 - protein, 269 aa, Homo sapiens
MSYPELSTSSSSCIIAGYPNEEGMFASQHHRGHHHHHHHHHHHHHQQQQHQALQTNWHLPQMSSPPSAARHSLCLQPDSGGPPELGSSPPVLCSNSSSLGSSTPTGAACAPGDYGRQALSPAEAEKRSGGKRKSDSSDSQEGNYKSEVNSKPRKERTAFTKEQIRELEAEFAHHNYLTRLRRYEIAVNLDLTERQVKVWFQNRRMKWKRVKGGQQGAAAREKELVNVKKGTLLPSELSGIGAATLQQTGDSIANEDSHDSDHSSEHAHL

SEQ ID NO: 46314 - protein, 392 aa, Homo sapiens
MGVPTPKQFCPILERPLISYTLQALERVCWIKDIVVAVTGENMEVMKSIIQKYQHKRISLVEAGVTRHRSIFNGLKALAEDQINSKLSKPEVVIIHDAVRPFVEEGVLLKVVTAAKEHGAAGAIRPLVSTVVSPSADGCLDYSLERARHRASEMPQAFLFDVIYEAYQQCSDYDLEFGTECLQLALKYCCTKAKLVEGSPDLWKVTYKRDLYAAESIIKERISQEICVVMDTEEDNKHVGHLLEEVLKSELNHVKVTSEALGHAGRHLQQIILDQCYNFVCVNVTTSDFQETQKLLSMLEESSLCILYPVVVVSVHFLDFKLVPPSQKMENLMQIREFAKEVKERNILLYGLLISYPQDDQKLQESLRQGAIIIASLIKERNSGLIGQLLIA

SEQ ID NO: 46315 - protein, 754 aa, Homo sapiens
MEKEVCRDLVCTSPKDEEGFLRDLCEVLLYLLLPPGDFQNKIMRYFVREILARGILLPLINQLSDPDYINQYVIWMIRDSNCNYEAFMNIIKLSDNIGELEAVRDKAAEELQYLRSLDTAGDDINTIKNQINSLLFVKKVCDSRIQRLQSGKEINTVKLAANFGKLCTVPLDSILVDNVALQFFMDYMQQTGGQAHLFFWMTVEGYRVTAQQQLEVLLSRQRDGKHQTNQTKGLLRAAAVGIYEQYLSEKASPRVTVDDYLVAKLADTLNHEDPTPEIFDDIQRKVYELMLRDERFYPSFRQNALYVRMLAELDMLKDPSFRGSDDGDGESFNGSPTGSINLSLDDLSNVSSDDSVQLHAYISDTGVCNDHGKTYALYAITVHRRNLNSEEMWKTYRRYSDFHDFHMRITEQFESLSSILKLPGKKTFNNMDRDFLEKRKKDLNAYLQLLLAPEMMKASPALAHYVYDFLENKAYSKGKGDFARKMDTFVNPLRNSMRNVSNAVKSLPDSLAEGMTKMSDNMGKMSERLGQDIKQSFFKVPPLIPKTDSDPEHRRVSAQLDDNVDDNIPLRVMLLLMDEVFDLKERNQWLRRNIKNLLQQLIRATYGDTINRKIVDHVDWMTSPEQVADSVKRFRDAFWPNGILAEAVPCRDKSIRMRTRVAGKTKLLAIMPDELKHIIGAETTRKGILRVFEMFQHNQLNRRMVYVFLEGFLETLFPQYKFRELFNKLHSRSKQMQKYKQKLQTTQAPSLQKR

SEQ ID NO: 46316 - protein, 685 aa, Homo sapiens
MEKEVCRDLVCTSPKDEEGFLRDLCEVLLYLLLPPGDFQNKIMRYFVREILARGILLPLINQLSDPDYINQYVIWMIRDSNCNYEAFMNIIKLSDNIGELEAVRDKAAEELQYLRSLDTAGDDINTIKNQINSLLFVKKVCDSRIQRLQSGKEINTVKLAANFGKLCTVPLDSILVDNVALQFFMDYMQQTGGQAHLFFWMTVEGYRVTAQQQLEVLLSRQRDGKHQTNQTKGLLRAAAVGIYEQYLSEKASPRVTVDDYLVAKLADTLNHEDPTPEIFDDIQRKVYELMLRDERFYPSFRQNALYVRMLAELDMLKDPSFRGSDDGDGESFNGSPTGSINLSLDDLSNVSSDDSVQLHAYISDTVYADYDPYAVAGVCNDHGKTYALYAITVHRRNLNSEEMWKTYRRYSDFHDFHMRITEQFESLSSILKLPGKKTFNNMDRDFLEKRKKDLNAYLQLLLAPEMMKASPALAHYVYDFLENKAYSKGKGDFARKMDTFVNPLRNSMRNVSNAVKSLPDSLAEGMTKMSDNMGKMSERLGQDIKQSFFKVPPLIPKTDSDPEHRRVSAQLDDNVDDNIPLRVMLLLMDEVFDLKERNQWLRRNIKNLLQQLIRATYGDTINRKIVDHVDWMTSPEQVADSVKRFRDAFWPNGILAEAVPCRDKSIRMRTRVAGKTKLLAIMPGE

SEQ ID NO: 46317 - protein, 166 aa, Homo sapiens [sequence omitted]

SEQ ID NO: 46318 - protein, 402 aa, Homo sapiens [sequence omitted]

SEQ ID NO: 46319 - protein, 468 aa, Homo sapiens
MTTDDLCQALLRHYSAKKYQGKEENSDVPRRKRKVLHLVSQWIALYKDWLPEDEHSKMFLKTIYRNVLDDVYEYPILEKELKEFQKILGMHRRHTVDEYSPQKKNKALFHQFSLKENWLQHRGTVTETEEIFCHVYITEHSYVSVKAKVSSIAQEILKVVAEKIQYAEEDLALVAITFSGEKHELQPNDLVISKSLEASGRIYVYRKDLADTLNPFAENEESQQRSMRILGMNTWDLALELMNFDWSLFNSIHEQELIYFTFSRQGSGEHTANLSLLLQRCNEVQLWVATEILLCSQLGKRVQLVKKFIKIAAHCKAQRNLNSFFAIVMGLNTASVSRLSQTWEKIPGKFKKLFSELESLTDPSLNHKAYRDAFKKMKPPKIPFMPLLLKDVTFIHEGNKTFLDNLVNFEKLHMIADTVRTLRHCRTNQFGDLSPKEHQELKSYVNHLYVIDSQQALFELSHRIEPRV

SEQ ID NO: 46320 - protein, 48 aa, Homo sapiens
MEDVCSGSDKRWDIIQSLVGWHKALHRRICSRVELVLTYDRMYQNKCF

SEQ ID NO: 46321 - protein, 249 aa, Homo sapiens
MLTAQNRFEVLTFLLLCYNAALTYMPSVSLQSLCQICSRICVCGYPRQHVRKYKGISSRIPVSSGFMVQMLTGIYFAFYNGEWDLAQKALDDIIYRAQLELYPEPLLVANAIKASLPHGPMKSNKEGTRCIQVEITPTSSRISRNAVTSMSIRGHRWKRHEQPDNNNDATELGILVIPEISVTNVAGERTGNGEKGRTLGEIDAQHIQGVQETATDPRTESKGLPEIRRQKSVRKMMEDGINSPGRVQF

SEQ ID NO: 46322 - protein, 136 aa, Homo sapiens
MGVMNNMRKQKTLCDVILMVQERKIPAHRVVLAAASHFFNLMFTTNMLESKSFEVELKDAEPDIIEQLVEFAYTARISVNSNNVQSLLDAANQYQIEPVKKMCVDFLKEQVDASNCLGEAEKVDQSLPECGMLFTV

SEQ ID NO: 46323 - protein, 556 aa, Homo sapiens
MGVMNNMRKQKTLCDVILMVQERKIPAHRVVLAAASHFFNLMFTTNMLESKSFEVELKDAEPDIIEQLVEFAYTARISVNSNNVQSLLDAANQYQIEPVKKMCVDFLKEQVDASNCLGISVLAECLDCPELKATADDFIHQHFTEVYKTDEFLQLDVKRVTHLLNQDTLTVRAEDQVYDAAVRWLKYDEPNRQPFMVDILAKVRFPLISKNFLSKTVQAEPLIQDNPECLKMVISGMRYHLLSPEDREELVDGTRPRRKKHDYRIALFGGSQPQSCRYFNPKDYSWTDIRCPFEKRRDAACVFWDNVVYILGGSQLFPIKRMDCYNVVKDSWYSKLGPPTPRDSLAACAAEGKIYTSGGSEVGNSALYLFECYDTRTESWHTKPSMLTQRCSHGMVEANGLIYVCGGSLGNNVSGRVLNSCEVYDPATETWTELCPMIEARKNHGLVFVKDKIFAVGGQNGLGGLDNVEYYDIKLNEWKMVSPMPWKGVTVKCAAVGSIVYVLAGFQGVGRLGHILEYNTETDKWVANSKVRAFPVTSCLICVVDTCGANEETLET

SEQ ID NO: 46324 - protein, 494 aa, Homo sapiens
MRWKNSWKGGRVQAVLTSDSPALVGSNITFAVNLIFPRCQKEDANGNIVYEKNCRNEAGLSADPYVYNWTAWSEDSDGENGTGQSHHNVFPDGKPFPHHPGWRRWNFIYVFHTLGQYFQKLGRCSVRVSVNTANVTLGPQLMEVTVYRRHGRAYVPIAQVKDVYVVTDQIPVFVTMFQKNDRNSSDETFLKDLPIMFDVLIHDPSHFLNYSTINYKWSFGDNTGLFVSTNHTVNHTYVLNGTFSLNLTVKAAAPGPCPPPPPPPRPSKPTPSLGPAGDNPLELSRIPDENCQINRYGHFQATITIVEGILEVNIIQMTDVLMPVPWPESSLIDFVVTCQGSIPTEVCTIISDPTCEITQNTVCSPVDVDEMCLLTVRRTFNGSGTYCVNLTLGDDTSLALTSTLISVPDRDPASPLRMANSALISVGCLAIFVTVISLLVYKKHKEYNPIENSPGNVVRSKGLSVFLNRAKAVFFPGNQEKDPLLKNQEFKGVS

SEQ ID NO: 46325 - protein, 506 aa, Homo sapiens
MRWKNSWKGGRVQAVLTSDSPALVGSNITFAVNLIFPRCQKEDANGNIVYEKNCRNEAGLSADPYVYNWTAWSEDSDGENGTGQSHHNVFPDGKPFPHHPGWRRWNFIYVFHTLGQYFQKLGRCSVRVSVNTANVTLGPQLMEVTVYRRHGRAYVPIAQVKDVYVVTDQIPVFVTMFQKNDRNSSDETFLKDLPIMFDVLIHDPSHFLNYSTINYKWSFGDNTGLFVSTNHTVNHTYVLNGTFSLNLTVKAAAPGPCPPPPPPPRPSKPTPSLATTLKSYDSNTPGPAGDNPLELSRIPDENCQINRYGHFQATITIVEGILEVNIIQMTDVLMPVPWPESSLIDFVVTCQGSIPTEVCTIISDPTCEITQNTVCSPVDVDEMCLLTVRRTFNGSGTYCVNLTLGDDTSLALTSTLISVPDRDPASPLRMANSALISVGCLAIFVTVISLLVYKKHKEYNPIENSPGNVVRSKGLSVFLNRAKAVFFPGNQEKDPLLKNQEFKGVS

SEQ ID NO: 46326 - protein, 140 aa, Homo sapiens
MRWKNSWKGGRVQAVLTSDSPALVGSNITFAVNLIFPRCQKEDANGNIVYEKNCRNEAGLSADPYVYNWTAWSEDSDGENGTGQSHHNVFPDGKPFPHHPGWRRWNFIYVFHTLGWLLQTPKLLLYLSLKFQPSLFLLYN

SEQ ID NO: 46327 - protein, 106 aa, Homo sapiens
MERANGMELDGRRIRVDYSITKRAHTPTPGIYMGRPTHSGGGGGGGGGGGGGGGGRRRDSYYDRGYDRGYDRYEDYDYRYRRRSPSPYYSRYRSRSRSRSYSPRRY

SEQ ID NO: 46328 - protein, 113 aa, Homo sapiens
MLLHYTFQQPRHQSSVKLREQILDLSKRYVKALAEENKNTVDVENGASMAGYADLKRTIAVLLDDILQRLVKLENKVDYIVVNGSAANTTNGTSGNLVPVTTNKRTNVSGSIR

SEQ ID NO: 46329 - protein, 734 aa, Homo sapiens
MFPHEVNHFFSGSTITDSSSGVFDSISSRKRSSISKQNLFQTGSNVSFSCGGETRVPLWLQSSEDMEKCSKDLAHCHAYLVEMSQLLQSMDVLHRTYSAPAINAIQGGSFESPKKEKRSHRRWRSRAIGKDAKGTLQVPKPFSGPVRLHSSNPNLSTLDFGEEKNYSDGSETSSEFSKMQEDLCHIAHKVYFTLRSAFNIMSAEREKLKQLMEQDASSSPSAQVIGLKNALSSALAQNTDLKERLRRIHAESLLLDSPAVAKSGDNLAEENSRDENRALVHQLSNESRLSITDSLSEFFDAQEVLLSPSSSENEISDDDSYVSDISDNLSLDNLSNDLDNERQTLGPVLDSGREAKSRRRTCLPAPCPSSSNISLWNILRNNIGKDLSKVAMPVELNEPLNTLQRLCEELEYSELLDKAAQIPSPLERMVYVAAFAISAYASSYYRAGSKPFNPVLGETYECIREDKGFQFFSEQVSHHPPISACHAESRNFVFWQDVRWKNKFWGKSMEIVPIGTTHVTLPVFGDHFEWNKVTSCIHNILSGQRWIEHYGEIVIKNLHDDSCYCKVNFIKAKYWSTNAHEIEGTVFDRSGKAVHRLFGKWHESIYCGGGSSSACVWRANPMPKGYEQYYSFTQFALELNEMDPSSKSLLPPTDTRFRPDQRFLEEGNLEEAEIQKQRIEQLQRERRRVLEENHVEHQPRFFRKSDDDSWVSNGTYLELRKDLGFSKLDHPVLW

SEQ ID NO: 46330 - protein, 52 aa, Homo sapiens
MYLTRERRLEISRSVHLTDRQVKIWFQNRRMKLKKMNRENRIRELTANFNFS

SEQ ID NO: 46331 - protein, 658 aa, Homo sapiens
MEDEGNSDMLVVTTKAGLLELKIEKTMKEKEELLKLIAVLEKETAQLREQVGRMERELNHEKERCDQLQAEQKGLTEVTQSLKMENEEFKKRFSDATSKAHQLEEDIVSVTHKAIEKETELDSLKDKLKKAQHEREQLECQLKTEKDEKELYKVHLKNTEIENTKLMSEVQTLKNLDGNKESVITHFKEEIGRLQLCLAEKENLQRTFLLTTSSKEDTCFLKEQLRKAEEQVQATRQEVVFLAKELSDAVNVRDRTMADLHTARLENEKVKKQLADAVAELKLNAMKKDQDKTDTLEHELRREVEDLKLRLQMAADHYKEKFKECQRLQKQINKLSDQSANNNNVFTKKTGNQQKVNDASVNTDPATSASTVDVKPSPSAAEADFDIVTKGQVCEMTKEIADKTEKYNKCKQLLQDEKAKCNKYADELAKMELKWKEQVKIAENVKLELAEVQDNYKELKRSLENPAERKMEGQNSQSPQCFKTCSEQNGYVLTLSNAQPVLQYGNPYASQETRDGADGAFYPDEIQRPPVRVPSWGLEDNVVCSQPARNFSRPDGLEDSEDSKEDENVPTAPDPPSQHLRGHGTGFCFDSSFDVHKKCPLCELMFPPNYDQSKFEEHVESHWKVCPMCSEQFPPDYDQQVFERHVQTHFDQNVLNFD

SEQ ID NO: 46332 - protein, 616 aa, Homo sapiens
MEDEGNSDMLVVTTKAGLLELKIEKTMKEKEELLKLIAVLEKETAQLREQVGRMERELNHEKERCDQLQAEQKGLTEVTQSLKMENEEFKKRFSDATSKAHQLEEDIVSVTHKAIEKETELDSLKDKLKKAQHEREQLECQLKTEKDEKELYKVHLKNTEIENTKLMSEVQTLKNLDGNKESVITHFKEEIGRLQLCLAEKENLQRTFLLTTSSKEDTCFLKEQLRKAEEQVQATRQEVVFLAKELSDAVNVRDRTMADLHTARLENEKVKKQLADAVAELKLNAMKKDQDKTDTLEHELRREVEDLKLRLQMAADHYKEKFKECQRLQKQINKLSDQSANNNNVFTKKTGNQQKVNDASVNTDPATSASTVDVKPSPSAAEADFDIVTKGQVCEMTKEIADKTEKYNKCKQLLQDEKAKCNKYADELAKMELKWKEQVKIAENVKLELAEVQDNYKELKRSLENPAERKMEDGADGAFYPDEIQRPPVRVPSWGLEDNVVCSQPARNFSRPDGLEDSEDSKEDENVPTAPDPPSQHLRGHGTGFCFDSSFDVHKKCPLCELMFPPNYDQSKFEEHVESHWKVCPMCSEQFPPDYDQQVFERHVQTHFDQNVLNFD

SEQ ID NO: 46333 - protein, 179 aa, Homo sapiens
MTDAARREQESLKKKIQPKLSLTLSSSVSRGNVSTPPRHSSGSLTPPVTPPITPSSSFRSSTPTGSEYDEEEVDYEESDSDESWTTESAISSEAILSSMCMNGGEEKPFACPVPGCKKRYKNVNGIKYHAKNGHRTQIRVRKPFKCRCGKSYKTAQGLRHHTINFHPPVSAEIIRKMQQ

SEQ ID NO: 46334 - protein, 164 aa, Homo sapiens [sequence omitted]

SEQ ID NO: 46335 - protein, 101 aa, Homo sapiens
MDFYADPGVSFYVLCPDNGCGDNFHVWSESEDCLPFLQLAQDYISSCGKKTLHEVLEKVFKSFRPLLGLPDADDDAFEEYSADVEEEEPEADHPQMGVSQQ

SEQ ID NO: 46336 - protein, 60 aa, Homo sapiens [sequence omitted]

SEQ ID NO: 46337 - protein, 744 aa, Homo sapiens
MLLQRLQSLWATGRLDAGVKFFFHFRCRMFSCFKESDRLCLQDLLFKHYCYPERDPEEVFAFLLRFPHVALFTFDGLDELHSDLDLSRVPDSSCPWEPAHPLVLLANLLSGKLLKGASKLLTARTGIEVPRQFLRKKVLLRGFSPSHLRAYARRMFPERALQDRLLSQLEANPNLCSLCSVPLFCWIIFRCFQHFRAAFEGSPQLPDCTMTLTDVFLLVTEVHLNRMQPSSLVQRNTRSPVETLHAGRDTLCSLGQVAHRGMEKSLFVFTQEEVQASGLQERDMQLGFLRALPELGPGGDQQSYEFFHLTLQAFFTAFFLVLDDRVGTQELLRFFQEWMPPAGAATTSCYPPFLPFQCLQGSGPAREDLFKNKDHFQFTNLFLCGLLSKAKQKLLRHLVPAAALRRKRKALWAHLFSSLRGYLKSLPRVQVESFNQVQAMPTFIWMLRCIYETQSQKVGQLAARGICANYLKLTYCNACSADCSALSFVLHHFPKRLALDLDNNNLNDYGVRELQPCFSRLTVLRLSVNQITDGGVKVLSEELTKYKIVTYLGLYNNQITDVGARYVTKILDECKGLTHLKLGKNKITSEGGKYLALAVKNSKSISEVGMWGNQVGDEGAKAFAEALRNHPSLTTLSLASNGISTEGGKSLARALQQNTSLEILWLTQNELNDEVAESLAEMLKVNQTLKHLWLIQNQITAKGTAQLADALQSNTGITEICLNGNLIKPEEAKVYEDEKRIICF

SEQ ID NO: 46338 - protein, 85 aa, Homo sapiens [sequence omitted]

SEQ ID NO: 46339 - protein, 227 aa, Homo sapiens
MLKFNLECLHKTFGPGGLQGDTLIDIGSGPTIYQVLAACDSFQDITLSDFTDRNREELEKWLKKEPGAYDWTPAVKFACELEGNSGRWEEKEEKLRAAVKRVLKCDVHLGNPLAPAVLPLADCVLTLLAMECACCSLDAYRAALCNLASLLKPGGHLVTTVTLRLPSYMVGKREFSCVALEKEEVEQAVLDAGFDIEQLLHSPQSYSVTNAANNGVCFIVARKKPGP

SEQ ID NO: 46340 - protein, 563 aa, Homo sapiens [sequence omitted]

SEQ ID NO: 46341 - protein, 470 aa, Homo sapiens
MCVNERRFVKIPPKLAYGNEGVSGVIPPNSVLHFDVLLMDIWNSEDQVQIHTYFKPPSCPRTIQVSDFVRYHYNGTFLDGTLFDSSHNRMKTYDTYVGIGWLIPGMDKGLLGMCVGEKRIITIPPFLAYGEDGDGKDIPGQASLVFDVALLDLHNPKDSISIENKVVPENCERISQSGDFLRYHYNGTLLDGTLFDSSYSRNRTFDTYIGQGYVIPGMDEGLLGVCIGEKRRIVVPPHLGYGEEGRGNIPGSAVLVFDIHVIDFHNPSDSISITSHYKPPDCSVLSKKGDYLKYHYNASLLDGTLLDSTWNLGKTYNIVLGSGQVVLGMDMGLREMCVGEKRTVIIPPHLGYGEAGVDGEVPGSAVLVFDIELLELVAGLPEGYMFIWNGEVSPNLFEEIDKDGNGEVLLEEFSEYIHAQVASGKGKLAPGFDAELIVKNMFTNQDRNGDGKVTAEEFKLKDQEAKHDEL

SEQ ID NO: 46342 - protein, 796 aa, Homo sapiens
MLHLAVLHSRKLCVYSVSGTLGNVEHGNQCQMKLMYEHNLQRTACNMTYGSFGGVKGRDLICIQSMDGMLMVFEQESYAFGRFLPGFLLPGPLAYSSRTDSFLTVSSCQQVESYKYQVLAFATDADKRQETEQQKLGSGKRLVVDWTLNIGEQALDICIVSFNQSASSVFVLGERNFFCLKDNGQIRFMKKLDWSPSCFLPYCSVSEGTINTLIGNHNNMLHIYQDVTLKWATQLPHIPVAVRVGCLHDLKGVIVTLSDDGHLQCSYLGTDPSLFQAPNVQSRELNYDELDVEMKELQKIIKDVNKSQGVWPMTEREDDLNVSVVVSPNFDSVSQATDVEVGTDLVPSVTVKVTLQNRVILQKAKLSVYVQPPLELTCDQFTFEFMTPDLTRTVSFSVYLKRSYTPSELEGNAVVSYSRPTDRNPDGIPRVIQCKFRLPLKLICLPGQPSKTASHKITIDTNKSPVSLLSLFPGFASQSDDDQVNVMGFHFLGGARITVLASKTSQRYRIQSEQFEDLWLITNELILRLQEYFEKQGVKDFACSFSGSIPLQEYFELIDHHFELRINGEKLEELLSERAVQFRAIQRRLLARFKDKTPAPLQHLDTLLDGTYKQVIALADAVEENQGNLFQSFTRLKSATHLVILLIALWQKLSADQVAILEAAFLPLQEDTQELGWEETVDAAISHLLKTCLSKSSKEQALNLNSQLNIPKDTSQLKKHITLLCDRLSKGGRLCLSTDAAAPQTMVMPGGCTTIPESDLEERSVEQDSTELFTNHRHLTAETPRPEVSPLQGVSE

SEQ ID NO: 46343 - protein, 25 aa, Homo sapiens
MCKEYRLLVKPEVLLYFLGDPGRPC

SEQ ID NO: 46344 - protein, 316 aa, Homo sapiens
MCRHMPWNITRMPNHLHHSTQENAILAIEQYEELVDVNCSAVLRFFLCAMYAPICTLEFLHDPIKPCKSVCQRARDDCEPLMKMYNHSWPESLACDELPVYDRGVCISPEAIVTDLPEDVKWIDITPDMMVQERPLDVDCKRLSPDRCKCKKVKPTLATYLSKNYSYVIHAKIKAVQRSGCNEVTTVVDVKEIFKSSSPIPRTQVPLITNSSCQCPHILPHQDVLIMCYEWRSRMMLLENCLVEKWRDQLSKRSIQWEERLQEQRRTVQDKKKTAGRTSRSNPPKPKGKPPAPKPASPKKNIKTRSAQKRTNPKRV

SEQ ID NO: 46345 - protein, 87 aa, Homo sapiens
MDLCHVVPAEKKIDEAKDERLCENNAEFNKNCSKSHSGIDCSYVECCRTQEHAHSENPSPTWILEQTASLVKQLGLSVDVLQHLKQL

SEQ ID NO: 46346 - protein, 156 aa, Homo sapiens
MGPDYRVLVHRARKLAQQYYLVYQEPIPTAQLVQRVASVMQEYTQSGGVRPFGVSLLICGWNEGRPYLFQSDPSGAYFAWKATAMGKNYVNGKTFLEKRYNEDLELEDAIHTAILTLKESFEGQMTEDNIEVGICNEAGFRRLTPTEVKDYLAAIA

SEQ ID NO: 46347 - protein, 273 aa, Homo sapiens
MRDLRNPHPSSAFLNLIGFVSRRELGSIDGVQQISLEDALSSQEVEVAYICSESSSHEDYIRQFLNAGKHVLVEYPMTLSLAAAQELWELAEQKGKVLHEEHVELLMEEFAFLKKEVVGKDLLKGSLLFTAGPLEEERFGFPAFSGISRLTWLVSLFGELSLVSATLEERKEDQYMKMTVCLETEKKSPLSWIEEKGPGLKRNRYLSFHFKSGSLENVPNVGVNKNIFLKDQNIFVQKLLGQFSEKELAAEKKRILHCLGLAEEIQKYCCSRK

SEQ ID NO: 46348 - protein, 164 aa, Homo sapiens
MRLRTMIFQQVLSWSRELPCAWRALHTSPVCAKNRAARVRVSKGDKPVTYEEAHAPHYIAHRKGWLSLHTGNLDGEDHAAERTVEDVFLRKFMWGTFPGCLADQLVLKRRGNQLEICAVVLRQLSPHKYYFLVGYSETLLSYFYKCPVRLHLQTVPSKVVYKYL

SEQ ID NO: 46349 - protein, 856 aa, Homo sapiens
MLSLLGLETYQVQKLSLQDSLQISFDSMKNWAPQVPKDLPWNFLRKLQALNADARNTTMVLDVLPDARPVEKESQMEEEIIYWDPADDLAADIYSFSELPTPDTPVNPLDLLCALLLSSDSFLQQEIALKMALCQFALPLVLPDSENHYHTFLLWAMRGIVRTWWSQPPRGMGSFREDSVVLSRAPAFAFVRMDVSSNSKSQLLNAVLSPGHRQWDCFWHRDLNLGTNAREISDGLVEISWFFPSGREDLDIFPEPVAFLNLRGDIGSHWLQFKLLTEISSAVFILTDNISKKEYKLLYSMKESTTKYYFILSPYRGKRNTNLRFLNKLIPVLKIDHSHVLVKVSSTDSDSFVKRIRAIVGNVLRAPCRRVSVEDMAHAARKLGLKVDEDCEECQKAKDRMERITRKIKDSDAYRRDELRLQGDPWRKAAQVEKEFCQLQWAVDPPEKHRAELRRRLLELRMQQNGHDPSSGVQEFISGISSPSLSEKQYFLRWMEWGLARVAQPRLRQPPETLLTLRPKHGGTTDVGEPLWPEPLGVEHFLREMGQFYEAESCLVEAGRLPAGQRRFAHFPGLASELLLTGLPLELIDGSTLSMPVRWVTGLLKELHVRLERRSRLVVLSTVGVPGTGKSTLLNTMFGLRFATGKSCGPRGAFMQLITVAEGFSQDLGCDHILVIDSGGLIGGALTSAGDRFELEASLATLLMGLSNVTVISLAETKDIPAAILHAFLRLEKTGHMPNYQFVYQNLHDVSVPGPRPRDKRQLLDPPGDLSRAAAQMEKQGDGFRALAGLAFCDPEKQHIWHIPGLWHGAPPMAAVSLAYSEAIFELKRCLLENIRNGLSNQNKNIQQLIELVRRL

SEQ ID NO: 46350 - protein, 144 aa, Homo sapiens [sequence omitted]

SEQ ID NO: 46351 - protein, 537 aa, Homo sapiens
MGVVHRDLKPENLLLASKCKGAAVKLADFGLAIEVQGDQQAWFGFAGTPGYLSPEVLRKEAYGKPVDIWACGVILYILLVGYPPFWDEDQHKLYQQIKAGAYDFPSPEWDTVTPEAKNLINQMLTINPAKRITAHEALKHPWVCQRSTVASMMHRQETVECLKKFNARRKLKGAILTTMLATRNFSVGRQTTAPATMSTAASGTTMGLVEQAKSLLNKKADGVKPQTNSTKNSAAATSPKGTLPPAALEPQTTVIHNPVDGIKESSDSANTTIEDEDAKAPRVPDILSSVRRGSGAPEAEGPLPCPSPAPFSPLPAPSPRISDILNSVRRGSGTPEAEGPLSAGPPPCLSPALLGPLSSPSPRISDILNSVRRGSGTPEAEGPSPVGPPPCPSPTIPGPLPTPSRKQEIIKTTEQLIEAVNNGDFEAYAKICDPGLTSFEPEALGNLVEGMDFHRFYFENLLAKNSKPIHTTILNPHVHVIGEDAACIAYIRLTQYIDGQGRPRTSQSEETRVWHRRDGKWQNVHFHCSGAPVAPLQ

SEQ ID NO: 46352 - protein, 536 aa, Homo sapiens [sequence omitted]

SEQ ID NO: 46353 - protein, 167 aa, Homo sapiens
MGRQALLLLALCATGAQGLYFHIGETEKRCFIEEIPDETMVIGNYRTQMWDKQKEVFLPSTPGLGMHVEVKDPDGKVVLSRQYGSEGRFTFTSHTPGDHQICLHSNSTRMALFAGGKLYREERFRLTSESTNQRVLWWSIAQTVILILTGIWQMRHLKSFFEAKKLV

SEQ ID NO: 46354 - protein, 216 aa, Homo sapiens [sequence omitted]

SEQ ID NO: 46355 - protein, 175 aa, Homo sapiens
MGRQALLLLALCATGAQGLYFHIGETEKRCFIEEIPDETMVIGNYRTQMWDKQKEVFLPSTPGLGMHVEVKDPDGKVVLSRQYGSEGRFTFTSHTPGDHQICLHSNSTRMALFAGGKLRVHLDIQVGEHANNYPEIAAKDKLTELQLRARQLLDQVEQIQKEQDYQRASAYLLVI

SEQ ID NO: 46356 - protein, 963 aa, Homo sapiens [sequence omitted]

SEQ ID NO: 46357 - protein, 917 aa, Homo sapiens
MNPMKPALPPAPHGDGSFAYESVPWQQSATQPAGSLSVVTTVWGVGNATQSQVLGNPMGPAGSPSGSSMMPGVAGGSSALTSPQCLGQQAFAEGGANKGYVQQGVYSRGGYPGAPGFTTGYAGGPGGLGLPSHAARPSTDFTQAAAAAAVAAAAATATATATATVAALQEKQSQELSQYGAMGAGQSFNSQFLQHGGPRGPSVPAGMNPTGIGGVMGPSGLSPLAMNPTRAAGMTPLYAGQRLPQHGYPGPPQAQPLPRQGVKRTYSEVYPGQQYLQGGQYAPSTAQFAPSPGQPPAPSPSYPGHRLPLQQGMTQSLSVPGPTGLHYKPTEQFNGQGASFNGGSVSYSQPGLSGPTRSIPGYPSSPLPGNPTPPMTPSSSVPYMSPNQEVKSPFLPDLKPNLNSLHSSPSGSGPCDELRLTFPVRDGVVLEPFRLQHNLAVSNHVFQLRDSVYKTLIMRPDLELQFKCYHHEDRQMNTNWPASVQVSVNATPLTIERGDNKTSHKPLYLKHVCQPGRNTIQITVTACCCSHLFVLQLVHRPSVRSVLQGLLKKRLLPAEHCITKIKRNFSSGTIPGTPGPNGEDGVEQTAIKVSLKCPITFRRIQLPARGHDCRHIQCFDLESYLQLNCERGTWRCPVCNKTALLEGLEVDQYMLGILIYIQNSDYEEITIDPTCSWKPVPVKPDMHIKEEPDGPALKRCRTVSPAHVLMPSVMEMIAALGPGAAPFAPLQPPSVPAPSDYPGQGSSFLGPGTFPESFPPTTPSTPTLAEFTPGPPPISYQSDIPSSLLTSEKSTACLPSQMAPAGHLDPTHNPGTPGLHTSNLGAPPGPQLHHSNPPPASRQSLGQASLGPTGELAFSPATGVMGPPSMSGAGEAPEPALDLLPELTNPDELLSYLGPPDLPTNNNDDLLSLFENN

SEQ ID NO: 46358 - protein, 885 aa, Homo sapiens
MNPMKPALPPAPHGDGSFAYESVPWQQSATQPAGSLSVVTTVWGVGNATQSQCLGQQAFAEGGANKGYVQQGVYSRGGYPGAPGFTTGYAGGPGGLGLPSHAARPSTDFTQAAAAAAVAAAAATATATATATVAALQEKQSQELSQYGAMGAGQSFNSQFLQHGGPRGPSVPAGMNPTGIGGVMGPSGLSPLAMNPTRAAGMTPLYAGQRLPQHGYPGPPQAQPLPRQGVKRTYSEVYPGQQYLQGGQYAPSTAQFAPSPGQPPAPSPSYPGHRLPLQQGMTQSLSVPGPTGLHYKPTEQFNGQGASFNGGSVSYSQPGLSGPTRSIPGYPSSPLPGNPTPPMTPSSSVPYMSPNQEVKSPFLPDLKPNLNSLHSSPSGSGPCDELRLTFPVRDGVVLEPFRLQHNLAVSNHVFQLRDSVYKTLIMRPDLELQFKCYHHEDRQMNTNWPASVQVSVNATPLTIERGDNKTSHKPLYLKHVCQPGRNTIQITVTACCCSHLFVLQLVHRPSVRSVLQGLLKKRLLPAEHCITKIKRNFSSGTIPGTPGPNGEDGVEQTAIKVSLKCPITFRRIQLPARGHDCRHIQCFDLESYLQLNCERGTWRCPVCNKTALLEGLEVDQYMLGILIYIQNSDYEEITIDPTCSWKPVPVKPDMHIKEEPDGPALKRCRTVSPAHVLMPSVMEMIAALGPGAAPFAPLQPPSVPAPSDYPGQGSSFLGPGTFPESFPPTTPSTPTLAEFTPGPPPISYQSDIPSSLLTSEKSTACLPSQMAPAGHLDPTHNPGTPGLHTSNLGAPPGPQLHHSNPPPASRQSLGQASLGPTGELAFSPATGVMGPPSMSGAGEAPEPALDLLPELTNPDELLSYLGPPDLPTNNNDDLLSLFENN

SEQ ID NO: 46359 - protein, 609 aa, Homo sapiens
MAPVGRLRLAWVAHKTLTSSATSPISHLPGSLMEPVEKERASTPYIEKQVDHLIKKATRPEELLELLGGSHDLDSNQAAMVLIRLSHLLSEKPEDKGLLIQDAHFHQLLCLLNSQIASVWHGTLSKLLGSLYALGIPKASKELQSVEQEVRWRMRKLKYKHLAFLAESCATLSQEQHSQELLAELLTHLERRWTEIEDSHTLVTVMMKVGHLSEPLMNRLEDKCLELVEHFGPNELRKVLVMLAAQSRRSVPLLRAISYHLVQKPFSLTKDVLLDVAYAYGKLSFHQTQVSQRLATDLLSLMPSLTSGEVAHCAKSFALLKWLSLPLFEAFAQHVLNRAQDITLPHLCSVLLAFARLNFHPDQEDQFFSLVHEKLGSELPGLEPALQVDLVWALCVLQQAREAELQAVLHPEFHIQFLGGKSQKDQNTFQKLLHINATALLEYPEYSGPLLPASAVAPGPSALDRKVTPLQKELQETLKGLLGSADKGSLEVATQYGWVLDAEVLLDSDGEFLPVRDFVAPHLAQPTGSQSPPPGSKRLAFLRWEFPNFNSRSKDLLGRFVLARRHIVAAGFLIVDVPFYEWLELKSEWQKGAYLKDKMRKAVAEELAK

SEQ ID NO: 46360 - protein, 523 aa, Homo sapiens
MQSDTVPLLQNGQHARSQPRASGPPRSIQPQVSPRQRVQRSQPVHILAVRRLQEEDQQFRTSSLPAIPNPFPELCGPGSPPVLTPGSLPPSQAAAKQDVKVFSEDGTSKVVEILADMTARDLCQLLVYKSHCVDDNSWTLVEHHPHLGLERCLEDHELVVQVESTMASESKFLFRKNYAKYEFFKNPMNFFPEQMVTWCQQSNGSQTQLLQNFLNSSSCPEIQGFLHVKELGKKSWKKLYVCLRRSGLYCSTKGTSKEPRHLQLLADLEDSNIFSLIAGRKQYNAPTDHGLCIKPNKVRNETKELRLLCAEDEQTRTCWMTAFRLLKYGMLLYQNYRIPQQRKALLSPFSTPVRSVSENSLVAMDFSGQTGRVIENPAEAQSAALEEGHAWRKRSTRMNILGSQSPLHPSTLSTVIHRTQHWFHGRISREESHRIIKQQGLVDGLFLLRDSQSNPKAFVLTLCHHQKIKNFQILPCEDDGQTFFSLDDGNTKFSDLIQLVDFYQLNKGVLPCKLKHHCIRVAL

SEQ ID NO: 46361 - protein, 64 aa, Homo sapiens
MQFVEPSRQFVKDSIRLVKRCTKPDRKEFQKIAMATAIGFAIMGFIGFFVKLIHIPINNIIVGG

SEQ ID NO: 46362 - protein, 1157 aa, Homo sapiens
MFNNCEVVLGNLEITYVQRNYDLSFLKTIQEVAGYVLIALNTVERIPLENLQIIRGNMYYENSYALAVLSNYDANKTGLKELPMRNLQEILHGAVRFSNNPALCNVESIQWRDIVSSDFLSNMSMDFQNHLGSCQKCDPSCPNGSCWGAGEENCQKLTKIICAQQCSGRCRGKSPSDCCHNQCAAGCTGPRESDCLVCRKFRDEATCKDTCPPLMLYNPTTYQMDVNPEGKYSFGATCVKKCPRNYVVTDHGSCVRACGADSYEMEEDGVRKCKKCEGPCRKVCNGIGIGEFKDSLSINATNIKHFKNCTSISGDLHILPVAFRGDSFTHTPPLDPQELDILKTVKEITGFLLIQAWPENRTDLHAFENLEIIRGRTKQHGQFSLAVVSLNITSLGLRSLKEISDGDVIISGNKNLCYANTINWKKLFGTSGQKTKIISNRGENSCKATGQVCHALCSPEGCWGPEPRDCVSCRNVSRGRECVDKCNLLEGEPREFVENSECIQCHPECLPQAMNITCTGRGPDNCIQCAHYIDGPHCVKTCPAGVMGENNTLVWKYADAGHVCHLCHPNCTYGCTGPGLEGCPTNGPKIPSIATGMVGALLLLLVVALGIGLFMRRRHIVRKRTLRRLLQERELVEPLTPSGEAPNQALLRILKETEFKKIKVLGSGAFGTVYKGLWIPEGEKVKIPVAIKELREATSPKANKEILDEAYVMASVDNPHVCRLLGICLTSTVQLITQLMPFGCLLDYVREHKDNIGSQYLLNWCVQIAKGMNYLEDRRLVHRDLAARNVLVKTPQHVKITDFGLAKLLGAEEKEYHAEGGKVPIKWMALESILHRIYTHQSDVWSYGVTVWELMTFGSKPYDGIPASEISSILEKGERLPQPPICTIDVYMIMVKCWMIDADSRPKFRELIIEFSKMARDPQRYLVIQGDERMHLPSPTDSNFYRALMDEEDMDDVVDADEYLIPQQGFFSSPSTSRTPLLSSLSATSNNSTVACIDRNGLQSCPIKEDSFLQRYSSDPTGALTEDSIDDTFLPVPEYINQSVPKRPAGSVQNPVYHNQPLNPAPSRDPHYQDPHSTAVGNPEYLNTVQPTCVNSTFDSPAHWAQKGSHQISLDNPDYQQDFFPKEAKPNGIFKGSTAENAEYLRVAPQSSEFIGA

SEQ ID NO: 46363 - protein, 352 aa, Homo sapiens
MFNNCEVVLGNLEITYVQRNYDLSFLKTIQEVAGYVLIALNTVERIPLENLQIIRGNMYYENSYALAVLSNYDANKTGLKELPMRNLQEILHGAVRFSNNPALCNVESIQWRDIVSSDFLSNMSMDFQNHLGSCQKCDPSCPNGSCWGAGEENCQKLTKIICAQQCSGRCRGKSPSDCCHNQCAAGCTGPRESDCLVCRKFRDEATCKDTCPPLMLYNPTTYQMDVNPEGKYSFGATCVKKCPRNYVVTDHGSCVRACGADSYEMEEDGVRKCKKCEGPCRKVCNGIGIGEFKDSLSINATNIKHFKNCTSISGDLHILPVAFRGDSFTHTPPLDPQELDILKTVKEITGLS

SEQ ID NO: 46364 - protein, 48 aa, Homo sapiens
MISSKCLLGTRLQPSVVPSPRGALGFLSSSFKSLQALNQPPRVPSLKI

SEQ ID NO: 46365 - protein, 521 aa, Homo sapiens
MGPLTFRDVAIEFSLEEWQCLDTAQRNLYRKVMFENYRNLVFLGIAVSKPHLITCLEQGKEPWNRKRQEMVAKPPVIYSHFTEDLWPEHSIKDSFQKVILRGYGKCGHENLQLRISCKSVDESKVFKEGYNELNQCLRTTQSKIFQCDKYVKVFHKFSNSNSHKKRNTGKKVFKCKECGKSFCMLSHLTQHIRIHTRENSYKCEECGKVLNWFSELIKHKGIHMGEKPYKCEECGKAFNQSSTLIKHKKIHIEEKPFKCEECGKAFSLFSILSKHKIIHTGDKPYKCDECHKAFNWFATLTNHKRIHTGEKPFKCEECGKDFNQFSNLTKHKKIHTGEKPYKCEECGKAFNQFANLTRHKKIHTGEKSYKCEECGKAFIQSSNLTEHMRIHTGEKPYKCEECGKAFNGCSSLTRHKRIHTRENTYKCEECGKGFTLFSTLTNHKVIHTGEKSYKCDECGNVFNWPATLANHKRIHAREKPYKCEECGKAFNRSSHLTRHKKIHTGEKLYKPEKCDNNFDNT

SEQ ID NO: 46366 - protein, 625 aa, Homo sapiens
MLYPQESPSRECKELDGLWSFRADFSDNRRRGFEEQWYRRPLWESGPTVDMPVPSSFNDISQDWRLRHFVGWVWYEREVILPERWTQDLRTRVVLRIGSAHSYAIVWVNGVDTLEHEGGYLPFEADISNLVQVGPLPSRLRITIAINNTLTPTTLPPGTIQYLTDTSKYPKGYFVQNTYFDFFNYAGLQRSVLLYTTPTTYIDDITVTTSVEQDSGLVNYQISVKGSNLFKLEVRLLDAENKVVANGTGTQGQLKVPGVSLWWPYLMHERPAYLYSLEVQLTAQTSLGPVSDFYTLPVGIRTVAVTKSQFLINGKPFYFHGVNKHEDADIRGKGFDWPLLVKDFNLLRWLGANAFRTSHYPYAEEVMQMCDRYGIVVIDECPGVGLALPQFFNNVSLHHHMQVMEEVVRRDKNHPAVVMWSVANEPASHLESAGYYLKMVIAHTKSLDPSRPVTFVSNSNYAADKGAPYVDVICLNSYYSWYHDYGHLELIQLQLATQFENWYKKYQKPIIQSEYGAETIAGFHQDPPLMFTEEYQKSLLEQYHLGLDQKRRKYVVGELIWNFADFMTEQSPTRVLGNKKGIFTRQRQPKSAAFLLRERYWKIANETRYPHSVAKSQCLENSLFT

SEQ ID NO: 46367 - protein, 405 aa, Homo sapiens
MDQILHGLDKVAEEWAQGTFKLNSNDEDIHTANERRLKELIGATAGKLHTGRSRNDQVVTDLRLWMRQTCSTLSGLLWELIRTMVDRAEAERDVLFPGYTHLQRAQPIRWSHWILSHAVALTRDSERLLEVRKRINVLPLGSGAIAGNPLGVDRELLRAELNFGAITLNSMDATSERDFVAEFLFWASLCMTHLSRMAEDLILYCTKEFSFVQLSDAYSTGSSLMPQKKNPDSLELIRSKAGRVFGRCAGLLMTLKGLPSTYNKDLQEDKEAVFEVSDTMSAVLQVATGVISTLQIHQENMGQALSPDMLATDLAYYLVRKGMPFRQAHEASGKAVFMAETKGVALNQLSLQELQTISPLFSGDVICVWDYGHSVEQYGALGGTARSSVDWQIRQVRALLQAQQA

SEQ ID NO: 46368 - protein, 379 aa, Homo sapiens
MDQILHGLDKVAEEWAQGTFKLNSNDEDIHTANERRLKELIGATAGKLHTGRSRNDQVVTDLRLWMRQTCSTLSGLLWELIRTMVDRAEAERDVLFPGYTHLQRAQPIRWSHWILSGAIAGNPLGVDRELLRAELNFGAITLNSMDATSERDFVAEFLFWASLCMTHLSRMAEDLILYCTKEFSFVQLSDAYSTGSSLMPQKKNPDSLELIRSKAGRVFGRCAGLLMTLKGLPSTYNKDLQEDKEAVFEVSDTMSAVLQVATGVISTLQIHQENMGQALSPDMLATDLAYYLVRKGMPFRQAHEASGKAVFMAETKGVALNQLSLQELQTISPLFSGDVICVWDYGHSVEQYGALGGTARSSVDWQIRQVRALLQAQQA

SEQ ID NO: 46369 - protein, 272 aa, Homo sapiens [sequence omitted]

SEQ ID NO: 46370 - protein, 364 aa, Homo sapiens
MHYKRDLSIEEQSECAQDFYHNVAERMQTRGKERRFHHVGQAGLELLTSGDPPASASQSAGNTGVEPPHPAVPPERVEKIMDQIEKYIMTRLYKYVFCPETTDDEKKDLAIQKRIRALRWVTPQMLCVPVNEDIPEVSDMVVKAITDIIEMDSKRVPRDKLACITKCSKHIFNAIKITKNEPASADDFLPTLIYIVLKGNPPRLQSNIQYITRFCNPSRLMTGEDGYYFTNLCCAVAFIEKLDAQSLNLSQEDFDRYMSGQTSPRKQEAESWSPDACLGVKQMYKNLDLLSQLNERQERIMNEAKKLEKDLIDWTDGIAREVQDIVEKYPLEIKPPNQPLAAIDSENVENDKLPPPLQPQVYAG

SEQ ID NO: 46371 - protein, 144 aa, Homo sapiens
MFRDIATIVADKCVNPETKRPYTVILIERAMKDIHYSVKTNKSTKQQALEVIKQLKEKMKIERAHMRLRFILPVNEGKKLKEKLKPLIKVIESEDYGQQLEIVCLIDPGCFREIDELIKKETKGKGSLEVLNLKDVEEGDEKFE

SEQ ID NO: 46372 - protein, 808 aa, Homo sapiens
MFAPPTALPPPPPLTSGSLQVAGHPAGSTYSEQDILRQELNTRFLASQSADRGASLGPPPYLRTEFHQHQHQHQHTHQHTHQHTFTPFPHAIPPTAIMPTPAPPMVRTPGRNFDKYPTKVDPFYRHSLFHSYPPAVSGIPPMIPPTGPFGSLQGAFQPKTSNPIDVAARPGTVPHTLLQKDPRLTDPFRPMLRKPGKWCAMHVHIAWQIYHHQQKVKKQMQSDPHKLDFGLKPEFLSRPPGPSLFGAIHHPHDLARPSTLFSAAGAAHPTGTPFGPPPHHSNFLNPAAHLEPFNRPSTFTGLAAVGGNAFGGLGNPSVTPNSMFGHKDGPSVQNFSNPHEPWNRLHRTPPSFPTPPPWLKPGELERSASAAAHDRDRDVDKRDSSVSKDDKERESVEKRHSSHPSPAPVLPVNALGHTRSSTEQIRAHLNTEAREKDKPKERERDHSESRKDLAADEHKAKEGHLPEKDGHGHEGRAAGEEAKQLARVPSPYVRTPVVESARPNSTSSREAEPRKGEPAYENPKKSSEVKVKEERKEDHDLPPEAPQTHRASEPPPPNSSSSVHPGPLASMPMTVGVTGIHPMNSISSLDRTRMMTPFMGISPLPGGERFPYPSFHWDPIRDPLRDPYRELDIHRRDPLGRDFLLRNDPLHRLSTPRLYEADRSFRDREPHDYSHHHHHHHHPLSVDPRREHERGGHLDERERLHMLREDYEHTRLHSVHPASLDGHLPHPSLITPGLPSMHYPRISPTAGNQNGLLNKTPPTAALSAPPPLISTLGGRPVSPRRTTPLSAEIRERPPSHTLKDIEAR

SEQ ID NO: 46373 - protein, 798 aa, Homo sapiens
MVSSPHSDSLPRRRDQEGSVGPSDFGPRSIDPTLTRLFECLSLAYSGKLVSPKWKNFKGLKLLCRDKIRLNNAIWRAWYIQYVKRRKSPVCGFVTPLQGPEADAHRKPEAVVLEGNYWKRRIEVVMREYHKWRIYYKKRLRKPSREDDLLAPKQAEGRWPPPEQWCKQLFSSVVPVLLGDPEEEPGGRQLLDLNCFLSDISDTLFTMTQSGPSPLQLPPEDAYVGNADMIQPDLTPLQPSLDDFMDISDFFTNSRLPQPPMPSNFPEPPSFSPVVDSLFSSGTLGPEVPPASSAMTHLSGHSRLQARNSCPGPLDSSAFLSSDFLLPEDPKPRLPPPPVPPPLLHYPPPAKVPGLEPCPPPPFPPMAPPTALLQEEPLFSPRFPFPTVPPAPGVSPLPAPAAFPPTPQSVPSPAPTPFPIELLPLGYSEPAFGPCFSMPRGKPPAPSPRGQKASPPTLAPATASPPTTAGSNNPCLTQLLTAAKPEQALEPPLVSSTLLRSPGSPQETVPEFPCTFLPPTPAPTPPRPPPGPATLAPSRPLLVPKAERLSPPAPSGSERRLSGDLSSMPGPGTLSVRVSPPQPILSRGRPDSNKNRRITHISAEQKRRFNIKLGFDTLHGLVSTLSAQPSLKVSKATTLQKTAEYILMLQQERAGLQEEAQQLRDEIEELNAAINLCQQQLPATGVPITHQRFDQMRDMFDDYVRTRTLHNWKFWVFSILIRPLFESFNGMVSTASVHTLRQTSLAWLDQYCSLPALRPTVLNSLRQLGTSTSILTDPGRIPEQATRAVTEGTLGKPL

SEQ ID NO: 46374 - protein, 669 aa, Homo sapiens
MVSSPHSDSLPRRRDQEGSVGPSDFGPRSIDPTLTRLFECLSLAYSGKLVSPKWKNFKGLKLLCRDKIRLNNAIWRAWYIQYVKRRKSPVCGFVTPLQGPEADAHRKPEAVVLEGNYWKRRIELPPEDAYVGNADMIQPDLTPLQPSLDDFMDISDFFTNSRLPQPPMPSNFPEPPSFSPVVDSLFSSGTLGPEVPPASSAMTHLSGHSRLQARNSCPGPLDSSAFLSSDFLLPEDPKPRLPPPPVPPPLLHYPPPAKVPGLEPCPPPPFPPMAPPTALLQEEPLFSPRFPFPTVPPAPGVSPLPAPAAFPPTPQSVPSPAPTPFPIELLPLGYSEPAFGPCFSMPRGKPPAPSPRGQKASPPTLAPATASPPTTAGSNNPCLTQLLTAAKPEQALEPPLVSSTLLRSPGSPETVPEFPCTFLPPTPAPTPPRPPPGPATLAPSRPLLVPKAERLSPPAPSGSERRLSGDLSSMPGPGTLSVRVSPPQPILSRGRPDSNKTENRRITHISAEQKRRFNIKLGFDTLHGLVSTLSAQPSLKVSKATTLQKTAEYILMLQQERAGLQEEAQQLRDEIEELNAAINLCQQQLPATGVPITHQRFDQMRDMFDDYVRTRTLHNWKFWVFSILIRPLFESFNGMVSTASVHTLRQTSLAWLDQYCSLPALRPST

SEQ ID NO: 46375 - protein, 197 aa, Homo sapiens
MSQDLQDLLPQLGLVPCVVVGHSMGGKTAMLLALQRPELVERLIAVDISPVESTGVSHFATYVAAMRAINIADELPRSRARKLADEQLSSVIQDMAVRQHLLTNLVEVDGRFVWRVNLDALTQHLDKILAFPQRQESYLGPTLFLLGGNSQFVHPSHHPEIMRLFPRAQMQTVPNAGHWIHADRPQDFIAAIRGFLV

SEQ ID NO: 46376 - protein, 92 aa, Homo sapiens
MLRWTRAWRLPREGLGPHGPSFARVPVAPSSSSGGRGGAEPRPLPLSYRLLDGEAALPAVVFLHGLFGSKTNFNSIAKILAQQTGRADGGCS

SEQ ID NO: 46377 - protein, 260 aa, Homo sapiens [sequence omitted]

SEQ ID NO: 46378 - protein, 69 aa, Homo sapiens
MGSRFRDGPPLRGSNMDFREPTEEERAQRPRLQLKPRTVATPLNQVANPNSAIFGGARPREEVVQKEQE

SEQ ID NO: 46379 - protein, 214 aa, Homo sapiens
MLSTYQTDFILVRERDLPFVTHTLSSEFTILRVVNGETVAAENLGITNGFVKPKLVQRPVIHPLSSPSNRFCVTSLDPDTLPAVATLLMDVMFYSNGVKDPMATGDDCGHIRFFSFSLIEGYISLVMDVQTQQRFPSNLLFTSASGELWKMVRIGGQPLGFDECGIVAQISEPLAAADIPAYYISTFKFDHALVPEENINGVISALKVSQAEKH

SEQ ID NO: 46380 - protein, 1030 aa, Homo sapiens
MKQVPNPLPKVLSRRGVGAGLEAAERESFERTQTVSINKAINTQEVAVKEKHARTCILGTHHEKGAQTFWSVVNRLPLSSNAVLCWKFCHVFHKLLRDGHPNVLKDSLRYRNELSDMSRMWGHLSEGYGQLCSIYLKLLRTKMEYHTKNPRFPGNLQMSDRQLDEAGESDVNNFFQLTVEMFDYLECELNLFQTVFNSLDMSRSVSVTAAGQCRLAPLIQVILDCSHLYDYTVKLLFKLHSCLPADTLQGHRDRFMEQFTKLKDLFYRSSNLQYFKRLIQIPQLPENPPNFLRASALSEHISPVVVIPAEASSPDSEPVLEKDDLMDMDASQQNLFDNKFDDIFGSSFSSDPFNFNSQNGVNKDEKDHLIERLYREISGLKAQLENMKTESQRVVLQLKGHVSELEADLAEQQHLRQQAADDCEFLRAELDELRRQREDTEKAQRSLSEIERKAQANEQRYSKLKEKYSELVQNHADLLRKNAEVTKQVSMARQAQVDLEREKKELEDSLERISDQGQRKTQEQLEVLESLKQELATSQRELQVLQGSLETSAQSEANWAAEFAELEKERDSLVSGAAHREEELSALRKELQDTQLKLASTEESMCQLAKDQRKMLLVGSRKAAEQVIQDALNQLEEPPLISCAGSADHLLSTVTSISSCIEQLEKSWSQYLACPEDISGLLHSITLLAHLTSDAIAHGATTCLRAPPEPADSLTEACKQYGRETLAYLASLEEEGSLENADSTAMRNCLSKIKAIGEELLPRGLDIKQEELGDLVDKEMAATSAAIETATARIEEMLSKSRAGDTGVKLEVNERILGCCTSLMQAIQVLIVASKDLQREIVESGRGTASPKEFYAKNSRWTEGLISASKAVGWGATVMVDAADLVVQGRGKFEELMVCSHEIAASTAQLVAASKVKADKDSPNLAQLQQASRGVNQATAGVVASTISGKSQIEETDNMDFSSMTLTQIKRQEMDSQVRVLELENELQKERQKLGELRKKHYELAGVAEGWEEGTEASPPTLQEVVTEKE

SEQ ID NO: 46381 - protein, 274 aa, Homo sapiens [sequence omitted]

SEQ ID NO: 46382 - protein, 292 aa, Homo sapiens
MKLNGEIEIHLLEEKIQFLKMKIAEKQRQICVTQKLLPAKRSLDADLAVLQIQFSQCTDRIKDLEKQFVKPDGENRARFLPGKDLTEKEMIQKLDKLELQLAKKEEKLLEKDFIYEQVSRLTDRLCSKTQGCKQDTLLLAKKMNGYQRRIKNATEKMMALVAELSMKQALTIELQKEVREKEDFIFTCNSRIEKGLPLNKEIEKEWLKVLRDEEMHALAIAEKSQEFLEADNRQLPNGVYTTAEQRPNAYIPEADATLPLPKPYGALAPFKPSEPGANMRHIRKPVIKPVEI

SEQ ID NO: 46383 - protein, 764 aa, Homo sapiens [sequence omitted]

SEQ ID NO: 46384 - protein, 145 aa, Homo sapiens
MIPVADMPKSPFKRKRTTNEIKNLQYLPRTSEPREMLFEDRTRAHADHIGQGFERQTTAAVGVLKAVHCGEWPDQPRITKDVICFHAEDFLEVVQRMQLDLHEPPLSQECCSSVQDSFSCMQFSMAYSAQIISLRGGHFSEYSYS

SEQ ID NO: 46385 - protein, 19 aa, Homo sapiens
MLEHLIEKSFLAILKIAFQ

SEQ ID NO: 46386 - protein, 693 aa, Homo sapiens
MDEDQDRIYVGSKDHILSLNINNISQEALSVFWPASTIKVEECKMAGKDPTHGCGNFVRVIQTFNRTHLYVCGSGAFSPVCTYLNRGRRSEDQVFMIDSKCESGKGRCSFNPNVNTVSVMINEELFSGMYIDFMGTDAAIFRSLTKRNAVRTDQHNSKWLSEPMFVDAHVIPDGTDPNDAKVYFFFKEKLTDNNRSTKQIHSMIARICPNDTGGLRSLVNKWTTFLKARLVCSVTDEDGPETHFDELEDVFLLETDNPRTTLVYGIFTTSSSVFKGSAVCVYHLSDIQTVFNGPFAHKEGPNHQLISYQGRIPYPRPGTCPGGAFTPNMRTTKEFPDDVVTFIRNHPLMYNSIYPIHKRPLIVRIGTDYKYTKIAVDRVNAADGRYHVLFLGTDRGTVQKVVVLPTNNSVSGELILEELEVFKNHAPITTMKISSKKQQLYVSSNEGVSQVSLHRCHIYGTACADCCLARDPYCAWDGHSCSRFYPTGKRRSRRQDVRHGNPLTQCRGFNLKAYRNAAEIVQYGVKNNTTFLECAPKSPQASIKWLLQKDKDRRKEVKLNERIIATSQGLLIRSVQGSDQGLYHCIATENSFKQTIAKINFKVLDSEMVAVVTDKWSPWTWASSVRALPFHPKDIMGAFSHSEMQMINQYCKDTRQQHQQGDESQKMRGDYGKLKALINSRKSRNRRNQLPES

SEQ ID NO: 46387 - protein, 751 aa, Homo sapiens
MTMLFLPVTGTLKQNIPRLKLTYKDLLLSNSCIPFLGSSEGLDFQTLLLDEERGRLLLGAKDHIFLLSLVDLNKNFKKIYWPAAKERVELCKLAGKDANTECANFIRVLQPYNKTHIYVCGTGAFHPICGYIDLGVYKEDIIFKLDTHNLESGRLKCPFDPQQPFASVMTDEYLYSGTASDFLGKDTAFTRSLGPTHDHHYIRTDISEHYWLNGAKFIGTFFIPDTYNPDDDKIYFFFRESSQEGSTSDKTILSRVGRVCKNDVGGQRSLINKWTTFLKARLICSIPGSDGADTYFDELQDIYLLPTRDERNPVVYGVFTTTSSIFKGSAVCVYSMADIRAVFNGPYAHKESADHRWVQYDGRIPYPRPGTCPSKTYDPLIKSTRDFPDDVISFIKRHSVMYKSVYPVAGGPTFKRINVDYRLTQIVVDHVIAEDGQYDVMFLGTDIGTVLKVVSISKEKWNMEEVVLEELQIFKHSSIILNMELSLKQQQLYIGSRDGLVQLSLHRCDTYGKACADCCLARDPYCAWDGNACSRYAPTSKRRARRQDVKYGDPITQCWDIEDSISHETADEKVIFGIEFNSTFLECIPKSQQATIKWYIQRSGDEHREELKPDERIIKTEYGLLIRSLQKKDSGMYYCKAQEHTFIHTIVKLTLNVIENEQMENTQRAEHEEGKVKDLLAESRLRYKDYIQILSSPNFSLDQYCEQMWHREKRRQRNKGGPKWKHMQEMKKKRNRRHHRDLDELPRAVAT

SEQ ID NO: 46388 - protein, 109 aa, Homo sapiens
MGFNEFKELWAVLNGWRQHFISFDTDRSGTVDPQELQKALTTMGFRLSPQAVNSIAKRYSTNGKITFDDYIACCVKLRALTDSFRRRDTAQQGVVNFPYDDFIQCVMSV

SEQ ID NO: 46389 - protein, 358 aa, Homo sapiens [sequence omitted]

SEQ ID NO: 46390 - protein, 454 aa, Homo sapiens [sequence omitted]

SEQ ID NO: 46391 - protein, 3843 aa, Homo sapiens
MYINSSQRVESTVIPESTIMRTLHSGEITSHEQGFSVELESEISTTADDCSSEVNGCSFVMRTGKPTNLLREEEFGVDDSYSEQGAQDSPTHLEMMESELAGKQHEIEELNRELEEMRVTYGTEGLQQLQEFEAAIKQRDGIITQLTANLQQARREKDETMREFLELTEQSQKLQIQFQQLQASETLRNSTHSSTAADLLQAKQQILTHQQQLEEQDHLLEDYQKKKEDFTMQISFLQEKIKVYEMEQDKKVENSNKEEIQEKETIIEELNTKIIEEEKKTLELKDKLTTADKLLGELQEQIVQKNQEIKNMKLELTNSKQKERQSSEEIKQLMGTVEELQKRNHKDSQFETDIVQRMEQETQRKLEQLRAELDEMYGQQIVQMKQELIRQHMAQMEEMKTRHKGEMENALRSYSNITVNEDQIKLMNVAINELNIKLQDTNSQKEKLKEELGLILEEKCALQRQLEDLVEELSFSREQIQRARQTIAEQESKLNEAHKSLSTVEDLKAEIVSASESRKELELKHEAEVTNYKIKLEMLEKEKNAVLDRMAESQEAELERLRTQLLFSHEEELSKLKEDLEIEHRINIEKLKDNLGIHYKQQIDGLQNEMSQKIETMQFEKDNLITKQNQLILEISKLKDLQQSLVNSKSEEMTLQINELQKEIEILRQEEKEKGTLEQEVQELQLKTELLEKQMKEKENDLQEKFAQLEAENSILKDEKKTLEDMLKIHTPVSQEERLIFLDSIKSKSKDSVWEKEIEILIEENEDLKQQCIQLNEEIEKQRNTFSFAEKNFEVNYQELQEEYACLLKVKDDLEDSKNKQELEYKSKLKALNEELHLQRINPTTVKMKSSVFDEDKTFVAETLEMGEVVEKDTTELMEKLEVTKREKLELSQRLSDLSEQLKQKHGEISFLNEEVKSLKQEKEQVSLRCRELEIIINHNRAENVQSCDTQVSSLLDGVVTMTSRGAEGSVSKVNKSFGEESKIMVEDKVSFENMTVGEESKQEQLILDHLPSVTKESSLRATQPSENDKLQKELNVLKSEQNDLRLQMEAQRICLSLVYSTHVDQVREYMENEKDKALCSLKEELIFAQEEKIKELQKIHQLELQTMKTQETGDEGKPLHLLIGKLQKAVSEECSYFLQTLCSVLGEYYTPALKCEVNAEDKENSGDYISENEDPELQDYRYEVQDFQENMHTLLNKVTEEYNKLLVLQTRLSKIWGQQTDGMKLEFGEENLPKEETEFLSIHSQMTNLEDIDVNHKSKLSSLQDLEKTKLEEQVQELESLISSLQQQLKETEQNYEAEIHCLQKRLQAVSESTVPPSLPVDSVVITESDAQRTMYPGSCVKKNIDGTIEFSGEFGVKEETNIVKLLEKQYQEQLEEEVAKVIVSMSIAFAQQTELSRISGGKENTASSKQAHAVCQQEQHYFNEMKLSQDQIGFQTFETVDVKFKEEFKPLSKELGEHGKEILLSNSDPHDIPESKDCVLTISEEMFSKDKTFIVRQSIHDEISVSSMDASRQLMLNEEQLEDMRQELVRQYQEHQQATELLRQAHMRQMERQREDQEQLQEEIKRLNRQLAQRSSIDNENLVSERERVLLEELEALKQLSLAGREKLCCELRNSSTQTQNGNENQGEVEEQTFKEKELDRKPEDVPPEILSNERYALQKANNRLLKILLEVVKTTAAVEETIGRHVLGILDRSSKSQSSASLIWRSEAEASVKSCVHEEHTRVTDESIPSYSGSDMPRNDINMWSKVTEEGTELSQRLVRSGFAGTEIDPENEELMLNISSRLQAAVEKLLEAISETSSQLEHAKVTQTELMRESFRQKQEATESLKCQEELRERLHEESRAREQLAVELSKAEGVIDGYADEKTLFERQIQEKTDIIDRLEQELLCASNRLQELEAEQQQIQEERELLSRQKEAMKAEAGPVEQQLLQETEKLMKEKLEVQCQAEKVRDDLQKQVKALEIDVEEQVSRFIELEQEKNTELMDLRQQNQALEKQLEKMRKFLDEQAIDREHERDVFQQEIQKLEQQLKVVPRFQPISEHQTREVEQLANHLKEKTDKCSELLLSKEQLQRDIQERNEEIEKLEFRVRELEQALLVSADTFQKVEDRKHFGAVEAKPELSLEVQLQAERDAIDRKEKEITNLEEQLEQFREELENKNEEVQQLHMQLEIQKKESTTRLQELEQENKLFKDDMEKLGLAIKESDAMSTQDQHVLFGKFAQIIQEKEVEIDQLNEQVTKLQQQLKITTDNKVIEEKNELIRDLETQIECLMSDQECVKRNREEEIEQLNEVIEKLQQELANIGQKTSMNAHSLSEEADSLKHQLDVVIAEKLALEQQVETANEEMTFMKNVLKETNFKMNQLTQELFSLKRERESVEKIQSIPENSVNVAIDHLSKDKPELEVVLTEDALKSLENQTYFKSFEENGKGSIINLETRLLQLESTVSAKDLELTQCYKQIKDMQEQGQFETEMLQKKIVNLQKIVEEKVAAALVSQIQLEAVQEYAKFCQDNQTISSEPERTNIQNLNQLREDELGSDISALTLRISELESQVVEMHTSLILEKEQVEIAEKNVLEKEKKLLELQKLLEGNEKKQREKEKKRSPQDVEVLKTTTELFHSNEESGFFNELEALRAESVATKAELASYKEKAEKLQEELLVKETNMTSLQKDLSQVRDHLAEAKEKLSILEKEDETEVQESKKACMFEPLPIKLSKSIASQTDGTLKISSSNQTPQILVKNAGIQINLQSECSSEEVTEIISQFTEKIEKMQELHAAEILDMESRHISETETLKREHYVAVQLLKEECGTLKAVIQCLRSKEGSSIPELAHSDAYQTREICSSDSGSDWGQGIYLTHSQGFDIASEGRGEESESATDSFPKKIKGLLRAVHNEGMQVLSLTESPYSDGEDHSIQQVSEPWLEERKAYINTISSLKDLITKMQLQREAEVYDSSQSHESFSDWRGELLLALQQVFLEERSVLLAAFRTELTALGTTDAVGLLNCLEQRIQEQGVEYQAAMECLQKADRRSLLSEIQALHAQMNGRKITLKREQESEKPSQELLEYNIQQKQSQMLEMQVELSSMKDRATELQEQLSSEKMVVAELKSELAQTKLELETTLKAQHKHLKELEAFRLEVKDKTDEVHLLNDTLASEQKKSRELQWALEKEKAKLGRSEERDKEELEDLKFSLESQKQRNLQLNLLLEQQKQLLNESQQKIESQRMLYDAQLSEEQGRNLELQVLLESEKVRIREMSSTLDRERELHAQLQSSDGTGQSRPPLPSEDLLKELQKQLEEKHSRIVELLNETEKYKLDSLQTRQQMEKDRQVHRKTLQTEQEANTEGQKKMHELQSKVEDLQRQLEEKRQQVYKLDLEGQRLQGIMQEFQKQELEREEKRESRRILYQNLNEPTTWSLTSDRTRNWVLQQKIEGETKESNYAKLIEMNGGGTGCNHELEMIRQKLQCVASKLQVLPQKASERLQFETADDEDFIWVQENIDEIILQLQKLTGQQGEEPSLVSPSTSCGSLTERLLRQNAELTGHISQLTEEKNDLRNMVMKLEEQIRWYRQTGAGRDNSSRFSLNGGANIEAIIASEKEVWNREKLTLQKSLKRAEAEVYKLKAELRNDSLLQTLSPDSEHVTLKRIYGKYLRAESFRKALIYQKKYLLLLLGGFQECEDATLALLARMGGQPAFTDLEVITNRPKGFTRFRSAVRVSIAISRMKFLVRRWHRVTGSVSININRDGFGLNQGAEKTDSFYHSSGGLELYGEPRHTTYRSRSDLDYIRSPLPFQNRYPGTPADFNPGSLACSQLQNYDPDRALTDYITRLEALQRRLGTIQSGSTTQFHAGMRR

SEQ ID NO: 46392 - protein, 503 aa, Homo sapiens [sequence omitted]

SEQ ID NO: 46393 - protein, 598 aa, Homo sapiens
MRVCSESSTHFATLTARMLIALDKWLDERHAQSHFIPALFRPSPLERIKTNVINPAYATESGQTENSLHMGYSALEIKSKMLALEKADTCIYNPLFGSDLQYTNRVDKVVINPYFGLGAPDYSKIQIPKQEKWQRSMSSVTEDKERQWVDDFPLHRSACEGDSELLSRLLSERFSVNQLDSDHWAPIHYACWYGKVEATRILLEKGKCNPNLLNGQLSSPLHFAAGGGHAEIVQILLNHPETDRHITDQQGRSPLNICEENKQNNWEEAAKLLKEAINKPYEKVRIYRMDGSYRSVELKHGNNTTVQQIMEGMRLSQETQQYFTIWICSENLSLQLKPYHKPLQHVRDWPEILAELTNLDPQRETPQLFLRRDVRLPLEVEKQIEDPLAILILFDEARYNLLKGFYTAPDAKLITLASLLLQIVYGNYESKKHKQGFLNEENLKSIVPVTKLKSKAPHWTNRILHEYKNLSTSEGVSKEMHHLQRMFLQNCWEIPTYGAAFFTGQIFTKASPSNHKVIPVYVGVNIKGLHLLNMETKALLISLKYGCFMWQLGDTDTCFQIHSMENKMSFIVHTKQAGLVVKLLMKLNGQLMPTERNS

SEQ ID NO: 46394 - protein, 57 aa, Homo sapiens
MEVEQLRKEVKLQRQQVSKCSEEIKNYIEERSGEDPLVKGIPEDKNPFKEKGSCVIS

SEQ ID NO: 46395 - protein, 52 aa, Homo sapiens
MDSQFDSTTGFLGKTMGKLKILSRGSQTKLLCYMMLFSLFVFFIIYWIIKLR

SEQ ID NO: 46396 - protein, 256 aa, Homo sapiens
MSLTVTKYKASPISLSPLQGPPGPPGPPGPPGVSGGGYDFGYDGDFYRADQPRSAPSLRPKDYEVDATLKSLNNQIETLLTPEGSRKNPARTCRDLRLSHPEWSSGYYWIDPNQGCTMDAIKVYCDFSTGETCIRAQPENIPAKNWYRSSKDKKHVWLGETINAGSQFEYNVEGVTSKEMATQLAFMRLLANYASQNITYHCKNSIAYMDEETGNLKKAVILQGSNDVELVAEGNSRFTYTVLVDGCSVSNSEIWE

SEQ ID NO: 46397 - protein, 353 aa, Homo sapiens
MGYPDRPGWLRYIQRTPYSDGVLYGSPTAENVGKPTIIEITAYNRRTFETARHNLIINIMSAEAEFFIKNMNVEEMLASEVLGDFLGAVKNVWQPERLNAINITSALDRGGRVPLPINDLKEGVYVMVGADVPFSSCLREVENPQNQLRCSQEMEPVITCDKKFRTQFYIDWCKISLVDKTKQVSTYQEVIRGEGILPDGGEYKPPSDSLKSRDYYTDFLITLAVPSAVALVLFLILAYIMCCRREGVIQLVHHSAIQKSTKELRDMSKNREIAWPLSTLPVFHPVTGEIIPPLHTDNYDSTNMPLMQTQQNLPHQTQIPQQQTTGDFRLTTFQRFEVNGIPEERKLTEAMNL

SEQ ID NO: 46398 - protein, 369 aa, Homo sapiens
MGYPDRPGWLRYIQRTPYSDGVLYGSPTAENVGKPTIIEITAYNRRTFETARHNLIINIMSAEDFPLPYQAEFFIKNMNVEEMLASEVLGDFLGAVKNVWQPERLNAINITSALDRGGRVPLPINDLKEGVYVMVGADVPFSSCLREVENPQNQLRCSQEMEPVITCDKKFRTQFYIDWCKISLVDKTKQVSTYQEVIRGEGILPDGGEYKPPSDSLKSRDYYTDFLITLAVPSAVALVLFLILAYIMCCRREGVEKRNMQTPDIQLVHHSAIQKSTKELRDMSKNREIAWPLSTLPVFHPVTGEIIPPLHTDNYDSTNMPLMQTQQNLPHQTQIPQQQTTGDFRLTTFQRFEVNGIPEERKLTEAMNL

SEQ ID NO: 46399 - protein, 394 aa, Homo sapiens
MGYPDRPGWLRYIQRTPYSDGVLYGSPTAENVGKPTIIEITAYNRRTFETARHNLIINIMSAEDFPLPYQAEFFIKNMNVEEMLASEVLGDFLGAVKNVWQPERLNAINITSALDRGGRVPLPINDLKEGVYVMVGADVPFSSCLREVENPQNQLRCSQEMEPVITCDKKFRTQFYIDWCKISLVDKTKQVSTYQEVIRGEGILPDGGEYKPPSDSLKSRDYYTDFLITLAVPSAVALVLFLILAYIMCCRREGVEKRNMQTPDIQLVHHSAIQKSTKELRDMSKNREIAWPLSTLPVFHPVTGEIIPPLHTDNYDSTNMPLMQTQQWSFAPVAQAGVQWSDLGSLQPPPPRNLPHQTQIPQQQTTGDFRLTTFQRFEVNGIPEERKLTEAMNL

SEQ ID NO: 46400 - protein, 397 aa, Homo sapiens
MGYPDRPGWLRYIQRTPYSDGVLYGSPTAENVGKPTIIEITAYNRRTFETARHNLIINIMSAEDGVLLSSPRLECNGTISANCNLRLLGSGDSPASASRVDFPLPYQAEFFIKNMNVEEMLASEVLGDFLGAVKNVWQPERLNAINITSALDRGGRVPLPINDLKEGVYVMVGADVPFSSCLREVENPQNQLRCSQEMEPVITCDKKFRTQFYIDWCKISLVDKTKQVSTYQEVIRGEGILPDGGEYKPPSDSLKSRDYYTDFLITLAVPSAVALVLFLILAYIMCCRREGVIQLVHHSAIQKSTKELRDMSKNREIAWPLSTLPVFHPVTGEIIPPLHTDNYDSTNMPLMQTQQNLPHQTQIPQQQTTGDFRLTTFQRFEVNGIPEERKLTEAMNL

SEQ ID NO: 46401 - protein, 396 aa, Homo sapiens
MGYPDRPGWLRYIQRTPYSDGVLYGSPTAENVGKPTIIEITAYNRRTFETARHNLIINIMSAEDGVLLSSPRLECNGTISANCNLRLLGSDFPLPYQAEFFIKNMNVEEMLASEVLGDFLGAVKNVWQPERLNAINITSALDRGGRVPLPINDLKEGVYVMVGADVPFSSCLREVENPQNQLRCSQEMEPVITCDKKFRTQFYIDWCKISLVDKTKQVSTYQEVIRGEGILPDGGEYKPPSDSLKSRDYYTDFLITLAVPSAVALVLFLILAYIMCCRREGVEKRNMQTPDIQLVHHSAIQKSTKELRDMSKNREIAWPLSTLPVFHPVTGEIIPPLHTDNYDSTNMPLMQTQQNLPHQTQIPQQQTTGDFRLTTFQRFEVNGIPEERKLTEAMNL

SEQ ID NO: 46402 - protein, 371 aa, Homo sapiens
MGYPDRPGWLRYIQRTPYSDGVLYGSPTAENVGKPTIIEITAYNRRTFETARHNLIINIMSAEDFPLPYQAEFFIKNMNVEEMLASEVLGDFLGAVKNVWQPERLNAINITSALDRGGRVPLPINDLKEGVYVMVGADVPFSSCLREVENPQNQLRCSQEMEPVITCDKKFRTQFYIDWCKISLVDKTKQVSTYQEVIRGEGILPDGGEYKPPSDSLKSRDYYTDFLITLAVPSAVALVLFLILAYIMCCRREGVEKRNMQTPDIQLVHHSAIQKSTKELRDMSKNREIAWPLSTLPVFHPVTGEIIPPLHTDNYDSTNMPLMQTQQWSFAPVAQAGVQWSDLGSLQPPPPRNLPHQTQIPQQQTTGKWYP

SEQ ID NO: 46403 - protein, 408 aa, Homo sapiens
MAAGMKDVYSIFSKVHSDRNVYPSAGVLFVHVLEREYFKGEFPPYPKPGEISNDPITFNTNLMGYPDRPGWLRYIQRTPYSDGVLYGSPTAENVGKPTIIEITAYNRRTFETARHNLIINIMSAEDFPLPYQAEFFIKNMNVEEMLASEVLGDFLGAVKNVWQPERLNAINITSALDRGGRVPLPINDLKEGVYVMVGADVPFSSCLREVENPQNQLRCSQEMEPVITCDKKFRTQFYIDWCKISLVDKTKQVSTYQEVIRGEGILPDGGEYKPPSDSLKSRDYYTDFLITLAVPSAVALVLFLILAYIMCCRREGVEKRNMQTPDIQLVHHSAIQKSTKELRDMSKNREIAWPLSTLPVFHPVTGEIIPPLHTDNYDSTNMPLMQTQQNLPHQTQIPQQQTTGKWYP

SEQ ID NO: 46404 - protein, 465 aa, Homo sapiens
MSPATTGTFLLTAFLLSCADGINGTVNWKTRQANNFIISRKMAAGMKDVYSIFSKVHSDRNVYPSAGVLFVHVLEREYFKGEFPPYPKPGEISNDPITFNTNLMGYPDRPGWLRYIQRTPYSDGVLYGSPTAENVGKPTIIEITAYNRRTFETARHNLIINIMSAEDFPLPYQAEFFIKNMNVEEMLASEVLGDFLGAVKNVWQPERLNAINITSALDRGGRVPLPINDLKEGVYVMVGADVPFSSCLREVENPQNQLRCSQEMEPVITCDKKFRTQFYIDWCKISLVDKTKQVSTYQEVIRGEGILPDGGEYKPPSDSLKSRDYYTDFLITLAVPSAVALVLFLILAYIMCCRREGVIQLVHHSAIQKSTKELRDMSKNREIAWPLSTLPVFHPVTGEIIPPLHTDNYDSTNMPLMQTQQWSFAPVAQAGVQWSDLGSLQPPPPRNLPHQTQIPQQQTTGKWYP

SEQ ID NO: 46405 - protein, 373 aa, Homo sapiens
MGYPDRPGWLRYIQRTPYSDGVLYGSPTAENVGKPTIIEITAYNRRTFETARHNLIINIMSAEDGVLLSSPRLECNGTISANCNLRLLGSDFPLPYQAEFFIKNMNVEEMLASEVLGDFLGAVKNVWQPERLNAINITSALDRGGRVPLPINDLKEGVYVMVGADVPFSSCLREVENPQNQLRCSQEMEPVITCDKKFRTQFYIDWCKISLVDKTKQVSTYQEVIRGEGILPDGGEYKPPSDSLKSRDYYTDFLITLAVPSAVALVLFLILAYIMCCRREGVEKRNMQTPDIQLVHHSAIQKSTKELRDMSKNREIAWPLSTLPVFHPVTGEIIPPLHTDNYDSTNMPLMQTQQNLPHQTQIPQQQTTGKWYP

SEQ ID NO: 46406 - protein, 374 aa, Homo sapiens
MGYPDRPGWLRYIQRTPYSDGVLYGSPTAENVGKPTIIEITAYNRRTFETARHNLIINIMSAEDGVLLSSPRLECNGTISANCNLRLLGSGDSPASASRVDFPLPYQAEFFIKNMNVEEMLASEVLGDFLGAVKNVWQPERLNAINITSALDRGGRVPLPINDLKEGVYVMVGADVPFSSCLREVENPQNQLRCSQEMEPVITCDKKFRTQFYIDWCKISLVDKTKQVSTYQEVIRGEGILPDGGEYKPPSDSLKSRDYYTDFLITLAVPSAVALVLFLILAYIMCCRREGVIQLVHHSAIQKSTKELRDMSKNREIAWPLSTLPVFHPVTGEIIPPLHTDNYDSTNMPLMQTQQNLPHQTQIPQQQTTGKWYP

SEQ ID NO: 46407 - protein, 467 aa, Homo sapiens
MSPATTGTFLLTAFLLSCADGINGTVNWKTRQANNFIISRKMAAGMKDVYSIFSKVHSDRNVYPSAGVLFVHVLEREYFKGEFPPYPKPGEISNDPITFNTNLMGYPDRPGWLRYIQRTPYSDGVLYGSPTAENVGKPTIIEITAYNRRTFETARHNLIINIMSAEDGVLLSSPRLECNGTISANCNLRLLGSDFPLPYQAEFFIKNMNVEEMLASEVLGDFLGAVKNVWQPERLNAINITSALDRGGRVPLPINDLKEGVYVMVGADVPFSSCLREVENPQNQLRCSQEMEPVITCDKKFRTQFYIDWCKISLVDKTKQVSTYQEVIRGEGILPDGGEYKPPSDSLKSRDYYTDFLITLAVPSAVALVLFLILAYIMCCRREGVIQLVHHSAIQKSTKELRDMSKNREIAWPLSTLPVFHPVTGEIIPPLHTDNYDSTNMPLMQTQQNLPHQTQIPQQQTTGKWYP

SEQ ID NO: 46408 - protein, 849 aa, Homo sapiens
MELNGVQADFKPATLSSSLDNPKESVITGHFEKEKPRKIFDSEPLCLSDNLMHQDNFDPLNVQELSENFLFLQEKNLLKGSLSSKEHINDLQTELKNAGFTEAMLETSCRNSLDTELQFAENKPGLSLLQENVSTKGDDTDVMLTGDTLSTSLQSSPEVQVPPTSFETEETPRRVPPDSLPTQGETQPTCLDVIVPEDCLHQDISPDAVTVPVEILSTDARTHSLDNRSQDSPGESEETLRLTESDSVLADDILASRVSVGSSLPELGQELHNKPFSEDHHSHRRLEKNLEAVETLNQLNSKDAAKEAGLVSALSSDSTSQDSLLEDSLSAPFPASEPSLETPDSLESVDVHEALLDSLGSHTPQKLVPPDKPADSGYETENLESPEWTLHPAPEGTADSEPATTGDGGHSGLPPNPVIVISDAGDGHRGTEVTPETFTAGSQGSYRDSAYFSDNDSEPEKRSEEVPGTSPSALVLVQEQPLPEPVLPEQSPAAQDSCLEARKSQPDESCLSALHNSSDLELRATPEPAQTGVPQQVHPTEDEASSPWSVLNAELSSGDDFETQDDRPCTLASTGTNTNELLAYTNSALDKSLSSHSEGPKLKEPDIEGKYLGKLGVSGMLDLSEDGMDADEEDENSDDSDEDLRAFNLHSLSSESEDETEHPVPIILSNEDGRHLRSLLKPTAANAPDPLPEDWKKEKKAVTFFDDVTVYLFDQETPTKELGPCGGEACGPDLSGPAPASGSPYLSRCINSESSTDEEGGGFEWDDDFSPDPFMSKTTSNLLSSKPSLQTSKYFSPPPPARSTEQSWPHSAPYSRFSISPANIASFSLTHLTDSDIEQGGSSEDGEKD

SEQ ID NO: 46409 - protein, 1139 aa, Homo sapiens
MCKDSQLEFKRVSATTQCCWGIACDNQVYVYVCASDVPIRRREEAYENQRWNPMGGFCEKLLLSDRWGWSDVSGLQHRPLDRVALPSPHWEWESDWYVDENFGGEPTEKGGWTYAIDFPATYTKDKKWNSCVRRRKWIRYRRYKSRDIWAKIPSKDDPKELPDPFNDLSVGGWEITEEPVGRLSVWAVSLQGKVWYREDVSHSNPEGSSWSLLDTPGEVVQISCGPHDLLWATLWEGQALVREGINRSNPKGSSWSIVEPPGSENGVMHISVGVSVVWAVTKDWKVWFRRGVNSHNPCGTSWIEMVGEMTMVNVGMNDQVWGIGCEDRAVYFRQGVTPSELSGKTWKAIIAARECDRSHSGSSSSLLSAGCFFGDEVRGSGESAPSDTDASSEVERPGPGQILPAEPLDDSKNATGNSASGLGAGRTAEDTVEDACPAEGSREARPNTHPGPAPTPAELPWTNIDLKEAKKVPSHSAAGFPETTSLSSLGLLPLGLEEPYGVDDHPLWAWVSGGGCVVEACAMPRWFTVQAGLSSSVHMLSLSITPAQTAAWRKQIFQQLTERTKRELENFRHYEQAVEQSVWVKTGALQWWCDWKPHKWVDVRLALEQFTGHDGVRDSILFIYYVVHEEKKYIHIFLNEVVALVPVLNETKHSFALYTPERTRQRWPVRLAAATEQDMNDWLALLSLSCCESRKVQGRPSPQAIWSITCKGDIFVSEPSPDLEAHEHPLPCDQMFWRQMGGHLRMVEANSRGVVWGIGYDHTAWVYTGGYGGGCFQGLASSTSNIYTQSDVKCVHIYENQRWNPVTGYTSRGLPTDRYMWSDASGLQECTKAGTKPPSLQWAWVSDWFVDFSVPGGTDQEGWQYASDFPASYHGSKTMKDFVRRRCWARKCKLVTSGPWLEVPPIALRDVSIIPESPGAEGSGHSIALWAVSDKGDVLCRLGVSELNPAGSSWLHVGTDQPFASISIGACYQVWAVARDGSAFYRGSVYPSQPAGDCWYHIPSPPRQRLKQVSAGQTSVYALDENGNLWYRQGITPSYPQGSSWEHVSNNVCRVSVGPLDQVWVIANKVQGSHSLSRGTVCHRTGVQPHEPKGHGWDYGIGGGWDHISVRANATRAPRSSSQEQEPSAPPEAHGPVCC

SEQ ID NO: 46410 - protein, 397 aa, Homo sapiens [sequence omitted]

SEQ ID NO: 46411 - protein, 3789 aa, Homo sapiens
MQEVSENFENVTSSPQYSTFLEHIIPRFLTFLQDGEVQFLQEKPAQQLRKLVLEIIHRIPTNEHLRPHTKNVLSVMFRFLETENEENVLICLRIIIELHKQFRPPITQEIHHFLDFVKQIYKELPKVVNRYFENPQVIPENTVPPPEMVGMITTIAVKVNPEREDSETRTHSIIPRGSLSLKVLAELPIIVVLMYQLYKLNIHNVVAEFVPLIMNTIAIQVSAQARQHKLYNKELYADFIAAQIKTLSFLAYIIRIYQELVTKYSQQMVKGMLQLLSNCPAETAHLRKELLIAAKHILTTELRNQFIPCMDKLFDESILIGSGYTARETLRPLAYSTLADLVHHVRQHLPLSDLSLAVQLFAKNIDDESLPSSIQTMSCKLLLNLVDCIRSKSEQESGNGRDVLMRMLEVFVLKFHTIARYQLSAIFKKCKPQSELGAVEAALPGVPTAPAAPGPAPSPAPVPAPPPPPPPPPPATPVTPAPVPPFEKQGEKDKEDKQTFQVTDCRSLVKTLVCGVKTITWGITSCKAPGEAQFIPNKQLQPKETQIYIKLVKYAMQALDIYQVQIAGNGQTYIRVANCQTVRMKEEKEVLEHFAGVFTMMNPLTFKEIFQTTVPYMVERISKNYALQIVANSFLANPTTSALFATILVEYLLDRLPEMGSNVELSNLYLKLFKLVFGSVSLFAAENEQMLKPHLHKIVNSSMELAQTAKEPYNYFLLLRALFRSIGGGSHDLLYQEFLPLLPNLLQGLNMLQSGLHKQHMKDLFVELCLTVPVRLSSLLPYLPMLMDPLVSALNGSQTLVSQGLRTLELCVDNLQPDFLYDHIQPVRAELMQALWRTLRNPADSISHVAYRVLGKFGGSNRKMLKESQKLHYVVTEVQGPSITVEFSDCKASLQLPMEKAIETALDCLKSANTEPYYRRQAWEVIKCFLVAMMSLEDNKHALYQLLAHPNFTEKTIPNVIISHRYKAQDTPARKTFEQALTGAFMSAVIKDLRPSALPFVASLIRHYTMVAVAQQCGPFLLPCYQVGSQPSTAMFHSEENGSKGMDPLVLIDAIAICMAYEEKELCKIGEVALAVIFDVASIILGSKERACQLPLFSYIVERLCACCYEQAWYAKLGGVVSIKFLMERLPLTWVLQNQQTFLKALLFVMMDLTGEVSNGAVAMAKTTLEQLLMRCATPLKDEERAEEIVAAQEKSFHHVTHDLVREVTSPNSTVRKQAMHSLQVLAQVTGKSVTVIMEPHKEVLQDMVPPKKHLLRHQPANAQIGLMEGNTFCTTLQPRLFTMDLNVVEHKVFYTELLNLCEAEDSALTKLPCYKSLPSLVPLRIAALNALAACNYLPQSREKIIAALFKALNSTNSELQEAGEACMRKFLEGATIEVDQIHTHMRPLLMMLGDYRSLTLNVVNRLTSVTRLFPNSFNDKFCDQMMQHLRKWMEVVVITHKGGQRSDGNEMKICSAIINLFHLIPAAPQTLVKPLLEVVMKTERAMLIEAGSPFREPLIKFLTRHPSQTVELFMMEATLNDPQWSRMFMSFLKHKDARPLRDVLAANPNRFITLLLPGGAQTAVRPGSPSTSTMRLDLQFQAIKIISIIVKNDDSWLASQHSLVSQLRRVWVSENFQERHRKENMAATNWKEPKLLAYCLLNYCKRNYGDIELLFQLLRAFTGRFLCNMTFLKEYMEEEIPKNYSIAQKRALFFRFVDFNDPNFGDELKAKVLQHILNPAFLYSFEKGEGEQLLGPPNPEGDNPESITSVFITKVLDPEKQADMLDSLRIYLLQYATLLVEHAPHHIHDNNKNRNSKLRRLMTFAWPCLLSKACVDPACKYSGHLLLAHIIAKFAIHKKIVLQVFHSLLKAHAMEARAIVRQAMAILTPAVPARMEDGHQMLTHWTRKIIVEEGHTVPQLVHILHLIVQHFKVYYPVRHHLVQHMVSAMQRLGFTPSVTIEQRRLAVDLSEVVIKWELQRIKDQQPDSDMDPNSSGEGVNSVSSSIKRGLSVDSAQEVKRFRTATGAISAVFGRSQSLPGADSLLAKPIDKQHTDTVVNFLIRVACQVNDNTNTAGSPGEVLSRRCVNLLKTALRPDMWPKSELKLQWFDKLLMTVEQPNQVNYGNICTGLEVLSFLLTVLQSPAILSSFKPLQRGIAACMTCGNTKVLRAVHSLLSRLMSIFPTEPSTSSVASKYEELECLYAAVGKVIYEGLTNYEKATNANPSQLFGTLMILKSACSNNPSYIDRLISVFMRSLQKMVREHLNPQAASGSTEATSGTSELVMLSLELVKTRLAVMSMEMRKNFIQAILTSLIEKSPDAKILRAVVKIVEEWVKNNSPMAANQTPTLREKSILLVKMMTYIEKRFPEDLELNAQFLDLVNYVYRDETLSGSELTAKLEPAFLSGLRCAQPLIRAKFFEVFDNSMKRRVYERLLYVTCSQNWEAMGNHFWIKQCIELLLAVCEKSTPIGTSCQGAMLPSITNVINLADSHDRAAFAMVTHVKQEPRERENSESKEEDVEIDIELAPGDQTSTPKTKELSEKDIGNQLHMLTNRHDKFLDTLREVKTGALLSAFVQLCHISTTLAEKTWVQLFPRLWKILSDRQQHALAGEISPFLCSGSHQVQRDCQPSALNCFVEAMSQCVPPIPIRPCVLKYLGKTHNLWFRSTLMLEHQAFEKGLSLQIKPKQTTEFYEQESITPPQQEILDSLAELYSLLQEEDMWAGLWQKRCKYSETATAIAYEQHGFFEQAQESYEKAMDKAKKEHERSNASPAIFPEYQLWEDHWIRCSKELNQWEALTEYGQSKGHINPYLVLECAWRVSNWTAMKEALVQVEVSCPKEMAWKVNMYRGYLAICHPEEQQLSFIERLVEMASSLAIREWRRLPHVVSHVHTPLLQAAQQIIELQEAAQINAGLQPTNLGRNNSLHDMKTVVKTWRNRLPIVSDDLSHWSSIFMWRQHHYQAIVTAYENSSQHDPSSNNAMLGVHASASAIIQYGKIARKQGLVNVALDILSRIHTIPTVPIVDCFQKIRQQVKCYLQLAGVMGKNECMQGLEVIESTNLKYFTKEMTAEFYALKGMFLAQINKSEEANKAFSAAVQMHDVLVKAWAMWGDYLENIFVKERQLHLGVSAITCYLHACRHQNESKSRKYLAKVLWLLSFDDDKNTLADAVDKYCIGVPPIQWLAWIPQLLTCLVGSEGKLLLNLISQVGRVYPQAVYFPIRTLYLTLKIEQRERYKSDPGPIRATAPMWRCSRIMHMQRELHPTLLSSLEGIVDQMVWFRENWHEEVLRQLQQGLAKCYSVAFEKSGAVSDAKITPHTLNFVKKLVSTFGVGLENVSNVSTMFSSAASESLARRAQATAQDPVFQKLKGQFTTDFDFSVPGSMKLHNLISKLKKWIKILEAKTKQLPKFFLIEEKCRFLSNFSAQTAEVEIPGEFLMPKPTHYYIKIARFMPRVEIVQKHNTAARRLYIRGHNGKIYPYLVMNDACLTESRREERVLQLLRLLNPCLEKRKETTKRHLFFTVPRVVAVSPQMRLVEDNPSSLSLVEIYKQRCAKKGIEHDNPISRYYDRLATVQARGTQASHQVLRDILKEVQSNMVPRSMLKEWALHTFPNATDYWTFRKMFTIQLALIGFAEFVLHLNRLNPEMLQIAQDTGKLNVAYFRFDINDATGDLDANRPVPFRLTPNISEFLTTIGVSGPLTASMIAVARCFAQPNFKVDGILKTVLRDEIIAWHKKTQEDTSSPLSAAGQPENMDSQQLVSLVQKAVTAIMTRLHNLAQFEGGESKVNTLVAAANSLDNLCRMDPAWHPWL

SEQ ID NO: 46412 - protein, 3818 aa, Homo sapiens
MQEVSENFENVTSSPQYSTFLEHIIPRFLTFLQDGEVQFLQEKPAQQLRKLVLEIIHRIPTNEHLRPHTKNVLSVMFRFLETENEENVLICLRIIIELHKQFRPPITQEIHHFLDFVKQIYKELPKVVNRYFENPQVIPENTVPPPEMVGMITTIAVKVNPEREDSETRTHSIIPRGSLSLKVLAELPIIVVLMYQLYKLNIHNVVAEFVPLIMNTIAIQVSAQARQHKLYNKELYADFIAAQIKTLSFLAYIIRIYQELVTKYSQQMVKGMLQLLSNCPAETAHLRKELLIAAKHILTTELRNQFIPCMDKLFDESILIGSGYTARETLRPLAYSTLADLVHHVRQHLPLSDLSLAVQLFAKNIDDESLPSSIQTMSCKLLLNLVDCIRSKSEQESGNGRDVLMRMLEVFVLKFHTIARYQLSAIFKKCKPQSELGAVEAALPGVPTAPAAPGPAPSPAPVPAPPPPPPPPPPATPVTPAPVPPFEKQGEKDKEDKQTFQVTDCRSLVKTLVCGVKTITWGITSCKAPGEAQFIPNKQLQPKETQIYIKLVKYAMQALDIYQVQIAGNGQTYIRVANCQTVRMKEEKEVLEHFAGVFTMMNPLTFKEIFQTTVPYMVERISKNYALQIVANSFLANPTTSALFATILVEYLLDRLPEMGSNVELSNLYLKLFKLVFGSVSLFAAENEQMLKPHLHKIVNSSMELAQTAKEPYNYFLLLRALFRSIGGGSHDLLYQEFLPLLPNLLQGLNMLQSGLHKQHMKDLFVELCLTVPVRLSSLLPYLPMLMDPLVSALNGSQTLVSQGLRTLELCVDNLQPDFLYDHIQPVRAELMQALWRTLRNPADSISHVAYRVLGKFGGSNRKMLKESQKLHYVVTEVQGPSITVEFSDCKASLQLPMEKAIETALDCLKSANTEPYYRRQAWEVIKCFLVAMMSLEDNKHALYQLLAHPNFTEKTIPNVIISHRYKAQDTPARKTFEQALTGAFMSAVIKDLRPSALPFVASLIRHYTMVAVAQQCGPFLLPCYQVGSQPSTAMFHSEENGSKGMDPLVLIDAIAICMAYEEKELCKIGEVALAVIFDVASIILGSKERACQLPLFSYIVERLCACCYEQAWYAKLGGVVSIKFLMERLPLTWVLQNQQTFLKALLFVMMDLTGEVSNGAVAMAKTTLEQLLMRCATPLKDEERAEEIVAAQEKSFHHVTHDLVREVTSPNSTVRKQAMHSLQVLAQVTGKSVTVIMEPHKEVLQDMVPPKKHLLRHQPANAQIGLMEGNTFCTTLQPRLFTMDLNVVEHKVFYTELLNLCEAEDSALTKLPCYKSLPSLVPLRIAALNALAACNYLPQSREKIIAALFKALNSTNSELQEAGEACMRKFLEGATIEVDQIHTHMRPLLMMLGDYRSLTLNVVNRLTSVTRLFPNSFNDKFCDQMMQHLRKWMEVVVITHKGGQRSDGNESISECGRCPLSPFCQFEEMKICSAIINLFHLIPAAPQTLVKPLLEVVMKTERAMLIEAGSPFREPLIKFLTRHPSQTVELFMMEATLNDPQWSRMFMSFLKHKDARPLRDVLAANPNRFITLLLPGGAQTAVRPGSPSTSTMRLDLQFQAIKIISIIVKNDDSWLASQHSLVSQLRRVWVSENFQERHRKENMAATNWKEPKLLAYCLLNYCKRNYGDIELLFQLLRAFTGRFLCNMTFLKEYMEEEIPKNYSIAQKRALFFRFVDFNDPNFGDELKAKVLQHILNPAFLYSFEKGEGEQLLGPPNPEGDNPESITSVFITKVLDPEKQADMLDSLRIYLLQYATLLVEHAPHHIHDNNKNRNSKLRRLMTFAWPCLLSKACVDPACKYSGHLLLAHIIAKFAIHKKIVLQVFHSLLKAHAMEARAIVRQAMAILTPAVPARMEDGHQMLTHWTRKIIVEEGHTVPQLVHILHLIVQHFKVYYPVRHHLVQHMVSAMQRLGFTPSVTIEQRRLAVDLSEVVIKWELQRIKDQQPDSDMDPNSSGEGVNSVSSSIKRGLSVDSAQEVKRFRTATGAISAVFGRSQSLPGADSLLAKPIDKQHTDTVVNFLIRVACQVNDNTNTAGSPGEVLSRRCVNLLKTALRPDMWPKSELKLQWFDKLLMTVEQPNQVNYGNICTGLEVLSFLLTVLQSPAILSSFKPLQRGIAACMTCGNTKVLRAVHSLLSRLMSIFPTEPSTSSVASKYEELECLYAAVGKVIYEGLTNYEKATNANPSQLFGTLMILKSACSNNPSYIDRLISVFMRSLQKMVREHLNPQAASGSTEATSGTSELVMLSLELVKTRLAVMSMEMRKNFIQAILTSLIEKSPDAKILRAVVKIVEEWVKNNSPMAANQTPTLREKSILLVKMMTYIEKRFPEDLELNAQFLDLVNYVYRDETLSGSELTAKLEPAFLSGLRCAQPLIRAKFFEVFDNSMKRRVYERLLYVTCSQNWEAMGNHFWIKQCIELLLAVCEKSTPIGTSCQGAMLPSITNVINLADSHDRAAFAMVTHVKQEPRERENSESKEEDVEIDIELAPGDQTSTPKTKELSEKDIGNQLHMLTNRHDKFLDTLREVKTGALLSAFVQLCHISTTLAEKTWVQLFPRLWKILSDRQQHALAGEISPFLCSGSHQVQRDCQPSALNCFVEAMSQCVPPIPIRPCVLKYLGKTHNLWFRSTLMLEHQAFEKGLSLQIKPKQTTEFYEQESITPPQQEILDSLAELYSLLQEEDMWAGLWQKRCKYSETATAIAYEQHGFFEQAQESYEKAMDKAKKEHERSNASPAIFPEYQLWEDHWIRCSKELNQWEALTEYGQSKGHINPYLVLECAWRVSNWTAMKEALVQVEVSCPKEMAWKVNMYRGYLAICHPEEQQLSFIERLVEMASSLAIREWRRLPHVVSHVHTPLLQAAQQIIELQEAAQINAGLQPTNLGRNNSLHDMKTVVKTWRNRLPIVSDDLSHWSSIFMWRQHHYQGKPTWSGMHSSSIVTAYENSSQHDPSSNNAMLGVHASASAIIQYGKIARKQGLVNVALDILSRIHTIPTVPIVDCFQKIRQQVKCYLQLAGVMGKNECMQGLEVIESTNLKYFTKEMTAEFYALKGMFLAQINKSEEANKAFSAAVQMHDVLVKAWAMWGDYLENIFVKERQLHLGVSAITCYLHACRHQNESKSRKYLAKVLWLLSFDDDKNTLADAVDKYCIGVPPIQWLAWIPQLLTCLVGSEGKLLLNLISQVGRVYPQAVYFPIRTLYLTLKIEQRERYKSDPGPIRATAPMWRCSRIMHMQRELHPTLLSSLEGIVDQMVWFRENWHEEVLRQLQQGLAKCYSVAFEKSGAVSDAKITPHTLNFVKKLVSTFGVGLENVSNVSTMFSSAASESLARRAQATAQDPVFQKLKGQFTTDFDFSVPGSMKLHNLISKLKKWIKILEAKTKQLPKFFLIEEKCRFLSNFSAQTAEVEIPGEFLMPKPTHYYIKIARFMPRVEIVQKHNTAARRLYIRGHNGKIYPYLVMNDACLTESRREERVLQLLRLLNPCLEKRKETTKRHLFFTVPRVVAVSPQMRLVEDNPSSLSLVEIYKQRCAKKGIEHDNPISRYYDRLATVQARGTQASHQVLRDILKEVQSNMVPRSMLKEWALHTFPNATDYWTFRKMFTIQLALIGFAEFVLHLNRLNPEMLQIAQDTGKLNVAYFRFDINDATGDLDANRPVPFRLTPNISEFLTTIGVSGPLTASMIAVARCFAQPNFKVDGILKTVLRDEIIAWHKKTQEDTSSPLSAAGQPENMDSQQLVSLVQKAVTAIMTRLHNLAQFEGGESKVNTLVAAANSLDNLCRMDPAWHPWL

SEQ ID NO: 46413 - protein, 3807 aa, Homo sapiens
MQEVSENFENVTSSPQYSTFLEHIIPRFLTFLQDGEVQFLQEKPAQQLRKLVLEIIHRIPTNEHLRPHTKNVLSVMFRFLETENEENVLICLRIIIELHKQFRPPITQEIHHFLDFVKQIYKELPKVVNRYFENPQVIPENTVPPPEMVGMITTIAVKVNPEREDSETRTHSIIPRGSLSLKVLAELPIIVVLMYQLYKLNIHNVVAEFVPLIMNTIAIQVSAQARQHKLYNKELYADFIAAQIKTLSFLAYIIRIYQELVTKYSQQMVKGMLQLLSNCPAETAHLRKELLIAAKHILTTELRNQFIPCMDKLFDESILIGSGYTARETLRPLAYSTLADLVHHVRQHLPLSDLSLAVQLFAKNIDDESLPSSIQTMSCKLLLNLVDCIRSKSEQESGNGRDVLMRMLEVFVLKFHTIARYQLSAIFKKCKPQSELGAVEAALPGVPTAPAAPGPAPSPAPVPAPPPPPPPPPPATPVTPAPVPPFEKQGEKDKEDKQTFQVTDCRSLVKTLVCGVKTITWGITSCKAPGAQFIPNKQLQPKETQIYIKLVKYAMQALDIYQVQIAGNGQTYIRVANCQTVRMKEEKEVLEHFAGVFTMMNPLTFKEIFQTTVPYMVERISKNYALQIVANSFLANPTTSALFATILVEYLLDRLPEMGSNVELSNLYLKLFKLVFGSVSLFAAENEQMLKPHLHKIVNSSMELAQTAKEPYNYFLLLRALFRSIGGGSHDLLYQEFLPLLPNLLQGLNMLQSGLHKQHMKDLFVELCLTVPVRLSSLLPYLPMLMDPLVSALNGSQTLVSQGLRTLELCVDNLQPDFLYDHIQPVRAELMQALWRTLRNPADSISHVAYRVLGKFGGSNRKMLKESQKLHYVVTEVQGPSITVEFSDCKASLQLPMEKAIETALDCLKSANTEPYYRRQAWEVIKCFLVAMMSLEDNKHALYQLLAHPNFTEKTIPNVIISHRYKAQDTPARKTFEQALTGAFMSAVIKDLRPSALPFVASLIRHYTMVAVAQQCGPFLLPCYQVGSQPSTAMFHSEENGSKGMDPLVLIDAIAICMAYEEKELCKIGEVALAVIFDVASIILGSKERACQLPLFSYIVERLCACCYEQAWYAKLGGVVSIKFLMERLPLTWVLQNQQTFLKALLFVMMDLTGEVSNGAVAMAKTTLEQLLMRCATPLKDEERAEEIVAAQEKSFHHVTHDLVREVTSPNSTVRKQAMHSLQVLAQVTGKSVTVIMEPHKEVLQDMVPPKKHLLRHQPANAQIGLMEGNTFCTTLQPRLFTMDLNVVEHKVFYTELLNLCEAEDSALTKLPCYKSLPSLVPLRIAALNALAACNYLPQSREKIIAALFKALNSTNSELQEAGEACMRKFLEGATIEVDQIHTHMRPLLMMLGDYRSLTLNVVNRLTSVTRLFPNSFNDKFCDQMMQHLRKWMEVVVITHKGGQRSDGNEMKICSAIINLFHLIPAAPQTLVKPLLEVVMKTERAMLIEAGSPFREPLIKFLTRHPSQTVELFMMEATLNDPQWSRMFMSFLKHKDARPLRDVLAANPNRFITLLLPGGAQTAVRPGSPSTSTMRLDLQFQAIKIISIIVKNDDSWLASQHSLVSQLRRVWVSENFQERHRKENMAATNWKEPKLLAYCLLNYCKRNYGDIELLFQLLRAFTGRFLCNMTFLKEYMEEEIPKNYSIAQKRALFFRFVDFNDPNFGDELKAKVLQHILNPAFLYSFEKGEGEQLLGPPNPEGDNPESITSVFITKVLDPEKQADMLDSLRIYLLQYATLLVEHAPHHIHDNNKNRNSKLRRLMTFAWPCLLSKACVDPACKYSGHLLLAHIIAKFAIHKKIVLQVFHSLLKAHAMEARAIVRQAMAILTPAVPARMEDGHQMLTHWTRKIIVEEGHTVPQLVHILHLIVQHFKVYYPVRHHLVQHMVSAMQRLGFTPSVTIEQRRLAVDLSEVVIKWELQRIKDQQPDSDMDPNSSGEGVNSVSSSIKRGLSVDSAQEVKRFRTATGAISAVFGRSQSLPGADSLLAKPIDKQHTDTVVNFLIRVACQVNDNTNTAGSPGEVLSRRCVNLLKTALRPDMWPKSELKLQWFDKLLMTVEQPNQVNYGNICTGLEVLSFLLTVLQSPAILSSFKPLQRGIAACMTCGNTKVLRAVHSLLSRLMSIFPTEPSTSSVASKYEELECLYAAVGKVIYEGLTNYEKATNANPSQLFGTLMILKSACSNNPSYIDRLISVFMRSLQKMVREHLNPQAASGSTEATSAGTSELVMLSLELVKTRLAVMSMEMRKNFIQAILTSLIEKSPDAKILRAVVKIVEEWVKNNSPMAANQTPTLREKSILLVKMMTYIEKRFPEDLELNAQFLDLVNYVYRDETLSGSELTAKLEPAFLSGLRCAQPLIRAKFFEVFDNSMKRRVYERLLYVTCSQNWEAMGNHFWIKQCIELLLAVCEKSTPIGTSCQGAMLPSITNVINLADSHDRAAFAMVTHVKQEPRERENSESKEEDVEIDIELAPGDQTSTPKTKELSEKDIGNQLHMLTNRHDKFLDTLREVKTGALLSAFVQLCHISTTLAEKTWVQLFPRLWKILSDRQQHALAGEISPFLCSGSHQVQRDCQPSALNCFVEAMSQCVPPIPIRPCVLKYLGKTHNLWFRSTLMLEHQAFEKGLSLQIKPKQTTEFYEQESITPPQQEILDSLAELYSLLQEEDMWAGLWQKRCKYSETATAIAYEQHGFFEQAQESYEKAMDKAKKEHERSNASPAIFPEYQLWEDHWIRCSKELNQWEALTEYGQSKGHINPYLVLECAWRVSNWTAMKEALVQVEVSCPKEMAWKVNMYRGYLAICHPEEQQLSFIERLVEMASSLAIREWRRLPHVVSHVHTPLLQAAQQIIELQEAAQINAGLQPTNLGRNNSLHDMKTVVKTWRNRLPIVSDDLSHWSSIFMWRQHHYQAIVTAYENSSQHDPSSNNAMLGVHASASAIIQYGKIARKQGLVNVALDILSRIHTIPTVPIVDCFQKIRQQVKCYLQLAGVMGKNECMQGLEVIESTNLKYFTKEMTAEFYALKGMFLAQINKSEEANKAFSAAVQMHDVLVKAWAMWGDYLENIFVKERQLHLGVSAITCYLHACRHQNESKSRKYLAKVLWLLSFDDDKNTLADAVDKYCIGVPPIQWLAWIPQLLTCLVGSEGKLLLNLISQVGRVYPQAVYFPIRTLYLTLKIEQRERYKSDSGQQQPSSVGNQSHSASDPGPIRATAPMWRCSRIMHMQRELHPTLLSSLEGIVDQMVWFRENWHEEVLRQLQQGLAKCYSVAFEKSGAVSDAKITPHTLNFVKKLVSTFGVGLENVSNVSTMFSSAASESLARRAQATAQDPVFQKLKGQFTTDFDFSVPGSMKLHNLISKLKKWIKILEAKTKQLPKFFLIEEKCRFLSNFSAQTAEVEIPGEFLMPKPTHYYIKIARFMPRVEIVQKHNTAARRLYIRGHNGKIYPYLVMNDACLTESRREERVLQLLRLLNPCLEKRKETTKRHLFFTVPRVVAVSPQMRLVEDNPSSLSLVEIYKQRCAKKGIEHDNPISRYYDRLATVQARGTQASHQVLRDILKEVQSNMVPRSMLKEWALHTFPNATDYWTFRKMFTIQLALIGFAEFVLHLNRLNPEMLQIAQDTGKLNVAYFRFDINDATGDLDANRPVPFRLTPNISEFLTTIGVSGPLTASMIAVARCFAQPNFKVDGILKTVLRDEIIAWHKKTQEDTSSPLSAAGQPENMDSQQLVSLVQKAVTAIMTRLHNLAQFEGGESKVNTLVAAANSLDNLCRMDPAWHPWL

SEQ ID NO: 46414 - protein, 116 aa, Homo sapiens
MREAETEPHEGKRKVESLWPIFRIHHQKTRYIFDLFYKRKAISRELYEYCIKEGYADKNLIAKWKKQGYENLCCLRCIQTRDTNFGTNCICRVPKSKLEVGRIIECTHCGCRGCSG

SEQ ID NO: 46415 - protein, 216 aa, Homo sapiens
MCPFRHISGEKTVVCKHWLRGLCKKGDQCEFLHEYDMTKMPECYFYSKFGECSNKECPFLHIDPESKIKDCPWYDRGFCKHGPLCRHRHTRRVICVNYLVGFCPEGPSCKFMHPRFELPMGTTEQPPLPQQTQPPAKQSNNPPLQRSSSLIQLTSQNSSPNQQRTPQVIGVMQSQNSSAGNRGPRPLEQVTCYKCGEKGHYANRCTKGHLAFLSGQ

SEQ ID NO: 46416 - protein, 158 aa, Homo sapiens
MCPFRHISGEKTVVCKHWLRGLCKKGDQCEFLHEYDMTKMPECYFYSKFGPLCRHRHTRRVICVNYLVGFCPEGPSCKFMHPRFELPMGTTEQPPLPQQTQPPAKRTPQVIGVMQSQNSSAGNRGPRPLEQVTCYKCGEKGHYANRCTKGHLAFLSGQ

SEQ ID NO: 46417 - protein, 295 aa, Homo sapiens
MVPVLLSLLLLLGPAVPQENQDGRYSLTYIYTGLSKHVEDVPAFQALGSLNDLQFFRYNSKDRKSQPMGLWRQVEGMEDWKQDSQLQKAREDIFMETLKDIVEYYNDSNGSHVLQGRFGCEIENNRSSGAFWKYYYDGKDYIEFNKEIPAWVPFDPAAQITKQKWEAEPVYVQRAKAYLEEECPATLRKYLKYSKNILDRQDPPSVVVTSHQAPGEKKKLKCLAYDFYPGKIDVHWTRAGEVQEPELRGDVLHNGNGTYQSWVVVAVPPQDTAPYSCHVQHSSLAQPLVVPWEAS

SEQ ID NO: 46418 - protein, 412 aa, Homo sapiens
MLARGMVPLDPVQESSSFDLHHEATQSHFKHSSRKPRLLQSRALPAAHIPAPPHEGSPRDQAMASALFTADSQAMVKIEDMAVSLILEEWGCQNLARRNLSRDNRQENYGSAFPQGGENRNENEESTSKAETSEDSASRGETTGRSQKEFGEKRDQEGKTGERQQKNPEEKTRKEKRDSGPAIGKDKKTITGERGPREKGKGLGRSFSLSSNFTTPEEVPTGTKSHRCDECGKCFTRSSSLIRHKIIHTGEKPYECSECGKAFSLNSNLVLHQRIHTGEKPHECNECGKAFSHSSNLILHQRIHSGEKPYECNECGKAFSQSSDLTKHQRIHTGEKPYECSECGKAFNRNSYLILHRRIHTREKPYKCTKCGKAFTRSSTLTLHHRIHARERASEYSPASLDAFGAFLKSCV

SEQ ID NO: 46419 - protein, 367 aa, Homo sapiens
MLENYGNVFSLDRETRTENDQEISEDTRSHGVLLGRFQKDISQGLKFKEAYEREVSLKRPLGNSPGERLNRKMPDFGQVTVEEKLTPRGERSEKYNDFGNSFTVNSNLISHQRLPVGDRPHKCDECSKSFNRTSDLIQHQRIHTGEKPYECNECGKAFSQSSHLIQHQRIHTGEKPYECSDCGKTFSCSSALILHRRIHTGEKPYECNECGKTFSWSSTLTHHQRIHTGEKPYACNECGKAFSRSSTLIHHQRIHTGEKPYECNECGKAFSQSSHLYQHQRIHTGEKPYECMECGGKFTYSSGLIQHQRIHTGENPYECSECGKAFRYSSALVRHQRIHTGEKPLNGIGMSKSSLRVTTELNIREST

SEQ ID NO: 46420 - protein, 308 aa, Homo sapiens
MEVDAAVVPSVMACGVTGSVSVALHPLVILNISDHWIRMRSQEGRPVQVIGALIGKQEGRNIEVMNSFELLSHTVEEKIIIDKEYYYTKEEQFKQVFKELEFLGWYTTGGPPDPSDIHVHKQVCEIIESPLFLKLNPMTKHTDLPVSVFESVIDIINGEATMLFAELTYTLATEEAERIGVDHVARMTATGSGENSTVAEHLIAQHSAIKMLHSRVKLILEYVKASEAGEVPFNHEILREAYALCHCLPVLSTDKFKTDFYDQCNDVGLMAYLGTITKTCNTMNQFVNKFNVLYDRQGIGRRMRGLFF

SEQ ID NO: 46421 - protein, 490 aa, Homo sapiens [sequence omitted]

SEQ ID NO: 46422 - protein, 350 aa, Homo sapiens
MRFNLKEVLQVMPSDSFFFSIVRDPAALARSAFSYYKSTSSAFRKSPSLAAFLANPRGFYRPGARGDHYARNLLWFDFGLPFPPEKRAKRGNIHPPRDPNPPQLQVLPSGAGPRAQTLNPNALIHPVSTVTDHRSQISSPASFDLGSSSFIQWGLAWLDSVFDLVMVAEYFDESLVLLADALCWGLDDVVGFMHNAQAGHKQGLSTVSNSGLTAEDRQLTARARAWNNLDWALYVHFNRSLWARIEKYGQGRLQTAVAELRARREALAKHCLVGGEASDPKYITDRRFRPFQFGSAKVLGYILRSGLSPQDQEECERLATPELQYKDKLDAKQFPPTVSLPLKTSRPLSP

SEQ ID NO: 46423 - protein, 259 aa, Homo sapiens
MGGSVEIPFSFYYPWELATAPDVRISWRRGHFHRQSFYSTRPPSIHKDYVNRLFLNWTEGQKSGFLRISNLQKQDQSVYFCRVELDTRSSGRQQWQSIEGTKLSITQAVTTTTQRPSSMTTTWRLSSTTTTTGLRVTQGKRRSDSWHISLETAVGVAVAVTVLGIMILGLICLLRWRRRKGQQRTKATTPAREPFQNTEEPYENIRNEGQNTDPKLNPKDDGIVYASLALSSSTSPRAPPSHRPLKSPQNETLYSVLKA

SEQ ID NO: 46424 - protein, 186 aa, Homo sapiens
MGGSVEIPFSFYYPWELATAPDVRISWRRGHFHRQSFYSTRPPSIHKDYVNRLFLNWTEGQKSGFLRISNLQKQDQSVYFCRVELDTRSSGRQQWQSIEGTKLSITQGQQRTKATTPAREPFQNTEEPYENIRNEGQNTDPKLNPKDDGIVYASLALSSSTSPRAPPSHRPLKSPQNETLYSVLKA

SEQ ID NO: 46425 - protein, 686 aa, Homo sapiens [sequence omitted]

SEQ ID NO: 46426 - protein, 394 aa, Homo sapiens
MTTFTEPEVVFLQSRGNEVCRKIWLGLFDARTSLVPDSRDPQKVKEFLQEKYEKKRWYVPPDQVKGPTYTKGSASTPVQGSIPEGKPLRTLLGDPAPSLSVAASTSSQPVSQSHARTSQARSTQPPPHSSVKKASTDLLADIGGDPFAAPQMAPAFAAFPAFGGQTPSQGGFANFDAFSSGPSSSVFGSLPPAGQASFQAQPTPAGSSQGTPFGATPLAPASQPNSLADVGSFLGPGVPAAGVPSSLFGMAGQVPPLQSVTMGGGGGSSTGLAFGAFTNPFTAPAAQSPLPSTNPFQPNGLAPGPGFGMSSAGPGFPQAVPPTGAFASSFPAPLFPPQTPLVQQQNGSSFGDLGSAKLGQRPLSQPAGISTNPFMTGPSSSPFASKPPTTNPFL

SEQ ID NO: 46427 - protein, 100 aa, Homo sapiens
MKTDFKAQLARCQKLLDGGARGQNACSEIYIHGLGLAINRAINIALQLQAGSFGSLQVAANTSTVELVDELEPETDTREPLTRIRNNSAIHIRVFRVTPK

SEQ ID NO: 46428 - protein, 210 aa, Homo sapiens [sequence omitted]

SEQ ID NO: 46429 - protein, 796 aa, Homo sapiens
MRRDWDEHSSDPYHSGYEMPYAGGGGGPTYGPPQPWGHPDVHIMQHHVLPIQARLGSIAEIDLGVPPPVMKTFKEFLLSLDDSVDETEAVKRYNDYKLDFRRQQMQDFFLAHKDEEWFRSKYHPDEVGKRRQEARGALQNRLRVFLSLMETGWFDNLLLDIDKADAIVKMLDAAVIKMEGGTENDLRILEQEEEEEQAGKPGEPSKKEEGRAGAGLGDGERKTNDKDEKKEDGKQAENDSSNDDKTKKSEGDGDKEEKKEDSEKEAKKSSKKRNRKHSGDDSFDEGSVSESESESESGQAEEEKEEAEALKEKEKPKEEEWEKPKDAAGLECKPRPLHKTCSLFMRNIAPNISRAEIISLCKRYPGFMRVALSEPQPERRFFRRGWVTFDRSVNIKEICWNLQNIRLRECELSPGVNRDLTRRVRNINGITQHKQIVRNDIKLAAKLIHTLDDRTQLWASEPGTPPLPTSLPSQNPILKNITDYLIEEVSAEEEELLGSSGGAPPEEPPKEGNPAEINVERDEKLIKVLDKLLLYLRIVHSLDYYNTCEYPNEDEMPNRCGIIHVRGPMPPNRISHGEVLEWQKTFEEKLTPLLSVRESLSEEEAQKMGRKDPEQEVEKFVTSNTQELGKDKWLCPLSGKKFKGPEFVRKHIFNKHAEKIEEVKKEVAFFNNFLTDAKRPALPEIKPAQPPGPAQILPPGLTPGLPYPHQTPQGLMPYGQPRPPILGYGAGAVRPAVPTGGPPYPHAPYGAGRGNYDAFRGQGGYPGKPRNRMVRGDPRAIVEYRDLDAPDDVDFF

SEQ ID NO: 46430 - protein, 255 aa, Homo sapiens
MPGDKRSPRITGLCPFGPREILVADEQNRALKRFSLNGDYKGTVPVPEGCSPCSVAALQSAVAFSASARLYLINPNGEVQWRRALSLSQASHAVAALPSGDRVAVSVAGHVEVYNMEGSLATRFIPGGKASRGLRALVFLTTSPQGHFVGSDWQQNSVVICDGLGQVVGEYKGPGLHGCQPGSVSVDKKGYIFLTLREVNKVVILDPKGSLLGDFLTAYHGLEKPRVTTMVDGRYLVVSLSNGTIHIFRVRSPDS

SEQ ID NO: 46431 - protein, 226 aa, Homo sapiens
MAVETFGFFMATVGLLMLGVTLPNSYWRVSTVHGNVITTNTIFENLWFSCATDSLGVYNCWEFPSMLALSGYIQACRALMITAILLGFLGLLLGIAGLRCTNIGGLELSRKAKLAATAGALHILAGICGMVAISWYAFNITRDFFDPLYPGTKYELGPALYLGWSASLISILGGLCLCSACCCGSDEDPAASARRPYQAPVSVMPVATSDQEGDSSFGKYGRNAYV

SEQ ID NO: 46432 - protein, 146 aa, Homo sapiens [sequence omitted]

SEQ ID NO: 46433 - protein, 638 aa, Homo sapiens [sequence omitted]

SEQ ID NO: 46434 - protein, 384 aa, Homo sapiens
MAFKGTKKRSQLDLELEIENMGAHLNAYTSREQTVYYAKAFSKDLPRAVEILADIIQNSTLGEAEIERERGVILREMQEVETNLQEVVFDYLHATAYQNTALGRTILGPTENIKSISRKDLVDYITTHYKGPRIVLAAAGGVSHDELLDLAKFHFGDSLCTHKGEIPALPPCKFTGSEIRVRDDKMPLAHLAIAVEAVGWAHPDTICLMVANTLIGNWDRSFGGGMNLSSKLAQLTCHGNLCHSFQSFNTSYTDTGLWGLYMVCESSTVADMLHVVQKEWMRLCTSVTESEVARARNLLKTNMLLQLDGSTPICEDIGRQMLCYNRRIPIPELEARIDAVNAETIREVCTKYIYNRSPAIAAVGPIKQLPDFKQIRSNMCWLRD

SEQ ID NO: 46435 - protein, 385 aa, Homo sapiens
MAFKGTKKRSQLDLELEIENMGAHLNAYTSREQTVYYAKAFSKDLPRAVEILADIIQNSTLGEAEIERERGVILREMQEVETNLQEVVFDYLHATAYQNTALGRTILGPTENIKSISRKDLVDYITTHYKGPRIVLAAAGGVSHDELLDLAKFHFGDSLCTHKGEIPALPPCKFTGSEIRVRDDKMPLAHLAIAVEAVGWAHPDTICLMVANTLIGNWDRSFGGGMNLSSKLAQLTCHGNLCHSFQSFNTSYTDTGLWGLYMVCESSTVADMLHVVQKEWMRLCTSVTESEVARARNLLKTNMLLQLDGSTPICEDIGRQMLCYNRRIPIPELEARIDAVNAETIREVCTKYIYNRSPAIAAVGKPGFFSSMQKVGQVLLINSSF

SEQ ID NO: 46436 - protein, 547 aa, Homo sapiens
MLKTLDPKDWKNQDHYAVLGLGHVRYKATQRQIKAAHKAMVLKHHPDKRKAAGEPIKEGDNDYFTCITKAYEMLSDPVKRRAFNSVDPTFDNSVPSKSEAKDNFFEVFTPVFERNSRWSNKKNVPKLGDMNSSFEDVDIFYSFWYNFDSWREFSYLDEEEKEKAECRDERRWIEKQNRATRAQRKKEEMNRIRTLVDNAYSCDPRIKKFKEEEKAKKEAEKKAKAEAKRKEQEAKEKQRQAELEAARLAKEKEEEEVRQQALLAKKEKDIQKKAIKKERQKLRNSCKTWNHFSDNEAERVKMMEEVEKLCDRLELASLQCLNETLTSCTKEVGKAALEKQIEEINEQIRKEKEEAEARMRQASKNTEKSTGGGGNGSKNWSEDDLQLLIKAVNLFPAGTNSRWEVIANYMNIHSSSGVKRTAKDVIGKAKSLQKLDPHQKDDINKKAFDKFKKEHGVVPQADNATPSERFEGPYTDFTPWTTEEQKLLEQALKTYPVNTPERWEKIAEAVPGRTKKDCMKRYKELVEMVKAKKAAQEQVLNASRAKK

SEQ ID NO: 46437 - protein, 3344 aa, Homo sapiens
MSDHQFGNQFMCSVVASHVSHLPTTNLSFIWIAPPAGTGCVNFMATATHRGQVIFKDALAQQLCEQGAPTDVTVHPHLAEIHSDSIILRDDFDSYHQLQLNPNIWVECNNCETGEQCGAIMHGNAVTFCEPYGPRELITTGLNTTTASVLQFSIGSGSCRFSYSDPSIIVLYAKNNSADWIQLEKIRAPSNVSTIIHILYLPEDAKGENVQFQWKQENLRVGEVYEACWALDNILIINSAHRQVVLEDSLDPVDTGNWLFFPGATVKHSCQSDGNSIYFHGNEGSEFNFATTRDVDLSTEDIQEQWSEEFESQPTGWDVLGAVIGTECGTIESGLSMVFLKDGERKLCTPSMDTTGYGNLRFYFVMGGICDPGNSHENDIILYAKIEGRKEHITLDTLSYSSYKVPSLVSVVINPELQTPATKFCLRQKNHQGHNRNVWAVDFFHVLPVLPSTMSHMIQFSINLGCGTHQPGNSVSLEFSTNHGRSWSLLHTECLPEICAGPHLPHSTVYSSENYSGWNRITIPLPNAALTRNTRIRWRQTGPILGNMWAIDNVYIGPSCLKFCSGRGQCTRHGCKCDPGFSGPACEMASQTFPMFISESFGSSRLSSYHNFYSIRGAEVSFGCGVLASGKALVFNKDGRRQLITSFLDSSQSRFLQFTLRLGSKSVLSTCRAPDQPGEGVLLHYSYDNGITWKLLEHYSYLSYHEPRIISVELPGDAKQFGIQFRWWQPYHSSQREDVWAIDEIIMTSVLFNSISLDFTNLVEVTQSLGFYLGNVQPYCGHDWTLCFTGDSKLASSMRYVETQSMQIGASYMIQFSLVMGCGQKYTPHMDNQVKLEYSTNHGLTWHLVQEECLPSMPSCQEFTSASIYHASEFTQWRRVIVLLPQKTWSSATRFRWSQSYYTAQDEWALDSIYIGQQCPNMCSGHGSCDHGICRCDQGYQGTECHPEAALPSTIMSDFENQNGWESDWQEVIGGEIVKPEQGCGVISSGSSLYFSKAGKRQLVSWDLDTSWVDFVQFYIQIGGESASCNKPDSREEGVLLQYSNNGGIQWHLLAEMYFSDFSKPRFVYLELPAAAKTPCTRFRWWQPVFSGEDYDQWAVDDIIILSEKQKQIIPVINPTLPQNFYEKPAFDYPMNQMSVWLMLANEGMVKNETFCAATPSAMIFGKSDGDRFAVTRDLTLKPGYVLQFKLNIGCANQFSSTAPVLLQYSHDAGMSWFLVKEGCYPASAGKGCEGNSRELSEPTMYHTGDFEEWTRITIVIPRSLASSKTRFRWIQESSSQKNVPPFGLDGVYISEPCPSYCSGHGDCISGVCFCDLGYTAAQGTCVSNVPNHNEMFDRFEGKLSPLWYKITGAQVGTGCGTLNDGKSLYFNGPGKREARTVPLDTRNIRLVQFYIQIGSKTSGITCIKPRTRNEGLIVQYSNDNGILWHLLRELDFMSFLEPQIISIDLPQDAKTPATAFRWWQPQHGKHSAQWALDDVLIGMNDSSQTGFQDKFDGSIDLQANWYRIQGGQVDIDCLSMDTALIFTENIGKPRYAETWDFHVSASTFLQFEMSMGCSKPFSNSHSVQLQYSLNNGKDWHLVTEECVPPTIGCLHYTESSIYTSERFQNWKRITVYLPLSTISPRTRFRWIQANYTVGADSWAIDNVVLASGCPWMCSGRGICDAGRCVCDRGFGGPYCVPVVPLPSILKDDFNGNLHPDLWPEVYGAERGNLNGETIKSGTSLIFKGEGLRMLISRDLDCTNTMYVQFSLRFIAKSTPERSHSILLQFSISGGITWHLMDEFYFPQTTNILFINVPLPYTAQTNATRFRLWQPYNNGKKEEIWIVDDFIIDGNNVNNPVMLLDTFDFGPREDNWFFYPGGNIGLYCPYSSKGAPEEDSAMVFVSNEVGEHSITTRDLNVNENTIIQFEINVGCSTDSSSADPVRLEFSRDFGATWHLLLPLCYHSSSHVSSLCSTEHHPSSTYYAGTMQGWRREVVHFGKLHLCGSVRFRWYQGFYPAGSQPVTWAIDNVYIGPQCEEMCNGQGSCINGTKCICDPGYSGPTCKISTKNPDFLKDDFEGQLESDRFLLMSGGKPSRKCGILSSGNNLFFNEDGLRMLMTRDLDLSHARFVQFFMRLGCGKGVPDPRSQPVLLQYSLNGGLSWSLLQEFLFSNSSNVGRYIALEIPLKARSGSTRLRWWQPSENGHFYSPWVIDQILIGGNISGNTVLEDDFTTLDSRKWLLHPGGTKMPVCGSTGDALVFIEKASTRYVVSTDVAVNEDSFLQIDFAASCSVTDSCYAIELEYSVDLGLSWHPLVRDCLPTNVECSRYHLQRILVSDTFNKWTRITLPLPPYTRSQATRFRWHQPAPFDKQQTWAIDNVYIGDGCIDMCSGHGRCIQGNCVCDEQWGGLYCDDPETSLPTQLKDNFNRAPSSQNWLTVNGGKLSTVCGAVASGMALHFSGGCSRLLVTVDLNLTNAEFIQFYFMYGCLITPNNRNQGVLLEYSVNGGITWNLLMEIFYDQYSKPGFVNILLPPDAKEIATRFRWWQPRHDGLDQNDWAIDNVLISGSADQRTVMLDTFSSAPVPQHERSPADAGPVGRIAFDMFMEDKTSVNEHWLFHDDCTVERFCDSPDGVMLCGSHDGREVYAVTHDLTPTEGWIMQFKISVGCKVSEKIAQNQIHVQYSTDFGVSWNYLVPQCLPADPKCSGSVSQPSVFFPTKGWKRITYPLPESLVGNPVRFRFYQKYSDMQWAIDNFYLGPGCLDNCRGHGDCLREQCICDPGYSGPNCYLTHTLKTFLKERFDSEEIKPDLWMSLEGGSTCTECGILAEDTALYFGGSTVRQAVTQDLDLRGAKFLQYWGRIGSENNMTSCHRPICRKEGVLLDYSTDGGITWTLLHEMDYQKYISVRHDYILLPEDALTNTTRLRWWQPFVISNGIVVSGVERAQWALDNILIGGAEINPSQLVDTFDDEGTSHEENWSFYPNAVRTAGFCGNPSFHLYWPNKKKDKTHNALSSRELIIQPGYMMQFKIVVGCEATSCGDLHSVMLEYTKDARSDSWQLVQTQCLPSSSNSIGCSPFQFHEATIYNSVNSSSWKRITIQLPDHVSSSATQFRWIQKGEETEKQSWAIDHVYIGEACPKLCSGHGYCTTGAICICDESFQGDDCSVFSHDLPSYIKDNFESARVTEANWETIQGGVIGSGCGQLAPYAHGDSLYFNGCQIRQAATKPLDLTRASKIMFVLQIGSMSQTDSCNSDLSGPHAVDKAVLLQYSVNNGITWHVIAQHQPKDFTQAQRVSYNVPLEARMKGVLLRWWQPRHNGTGHDQWALDHVEVVLTRKQNYMMNFSRQHGLRHFYNRRRRSLRRYP

SEQ ID NO: 46438 - protein, 1727 aa, Homo sapiens
MICCDKCSVWQHIDCMGIDRQHIPDTYLCERCQPRNLDKERAVLLQRRKRENMSDGDTSATESGDEVPVELYTAFQHTPTSITLTASRVSKVNDKRRKKSGEKEQHISKCKKAFREGSRKSSRVKGSAPEIDPSSDGSNFGWETKIKAWMDRYEEANNNQYSEGVQREAQRIALRLGNGNDKKEMNKSDLNTNNLLFKPPVESHIQKNKKILKSAKDLPPDALIIEYRGKFMLREQFEANGYFFKRPYPFVLFYSKFHGLEMCVDARTFGNEARFIRRSCTPNAEVRHEIQDGTIHLYIYSIHSIPKGTEITIAFDFDYGNCKYKVDCACLKENPECPVLKRSSESMENINSGYETRRKKGKKDKDISKEKDTQNQNITLDCEGTTNKMKSPETKQRKLSPLRLSVSNNQEPDFIDDIEEKTPISNEVEMESEEQIAERKRKMTREERKMEAILQAFARLEKREKRREQALERISTAKTEVKTECKDTQIVSDAEVIQEQAKEENASKPTPAKVNRTKQRKSFSRSRTHIGQQRRRHRTVSMCSDIQPSSPDIEVTSQQNDIENTVLTIEPETETALAEIITETEVPALNKCPTKYPKTKKHLVNEWLSEKNEKTGKPSDGLSERPLRITTDPEVLATQLNSLPGLTYSPHVYSTPKHYIRFTSPFLSEKRRRKEPTENISGSCKKRWLKQALEEENSAILHRFNSPCQERSRSPAVNGENKSPLLLNDSCSLPDLTTPLKKRRFYQLLDSVYSETSTPTPSPYATPTHTDITPMDPSFATPPRIKSDDETCRNGYKPIYSPVTPVTPGTPGNTMHFENISSPESSPEIKRRTYSQEGYDRSSTMLTLGPFRNSNLTELGLQEIKTIGYTSPRSRTEVNRQCPGEKEPVSDLQLGLDAVEPTALHKTLETPAHDRAEPNSQLDSTHSGRGTMYSSWVKSPDRTGVNFSVNSNLRDLTPSHQLEVGGGFRISESKCLMQDDTRGMFMETTVFCTSEDGLVSGFGRTVNDNLIDGNCTPQNPPQKKKVSLLEYRKRQREARKSGSKTENFPLISVSPHASGSLSNNGDGCASSNDNGEQVDHTASLPLPTPATVYNATSEETSNNCPVKDATASEKNEPEVQWTASTSVEQVRERSYQRALLLSDHRKDKDSGGESPCVSCSPSHVQSSPSSHSNHIPQLQAKGPVPSFSELMEDPDPENPEPTTTNECPSPDTSQNTCKSPPKMSKPGSPGSVIPAQAHGKIFTKPDPQWDSTVSASEAENGVHLKTELQQKQLSNNNQALSKNHPPQTHVRNSSEQLSQKLPSVPTKLHCPPSPHLENPPKSSTPHTPVQHGYLSPKPPSQQLGSPYRPHHSQSPQVGTPQREPQRNFYPAAQNLPANTQQATSGTLFTQTPSGQSSATYSQFNQQSLNSTAPPPPPPPPPSSSYYQNQQPSANFQNYNQLKGSLSQQTVFTSGPNQALPGTTSQQTVPGHHVTPGHFLPSQNPTIHHQTAAAVVPPPPPPPPAPGPHLVQQPNSHQQHSVAHVVGPVHAVTPGSHIHSQTAGHHLPPPPPPPGPAPHHHPPPHPSTGLQGLQAQHQHVVNSAPPPPPPPPPSSVLASGHHTTSAQALHHPPHQGPPLFPSSAHPTVPPYPSQATHHTTLGPGPQHQPSGTGPHCPLPVTGPHLQPQGPNSIPTPTASGFCPHPGSVALPHGVQGPQQASPVPGQIPIHRAQVPPTFQNNYHGSGWH

SEQ ID NO: 46439 - protein, 580 aa, Homo sapiens [sequence omitted]

SEQ ID NO: 46440 - protein, 74 aa, Homo sapiens
MLGKYSKEFFTRKGELRHITKLKPWSLFDVLVEKYGWPHEDAAQFTDFLIPMLEMVPEKRASAGECLRHPWLNS

SEQ ID NO: 46441 - protein, 659 aa, Homo sapiens [sequence omitted]

SEQ ID NO: 46442 - protein, 342 aa, Homo sapiens [sequence omitted]

SEQ ID NO: 46443 - protein, 77 aa, Homo sapiens
MKMQSERLSKEYDQLLKEHSELQVPLGSFYILAFAPGLHNPHPSSPRSGGGFSAIDNPRGALPPCLDRLERGNKKRL

SEQ ID NO: 46444 - protein, 441 aa, Homo sapiens
MPAKAPPGDEEGFDYNEEERYDCKGGELFANQRRFPGHLFWDFQINILGEKDDTPVHFCDKCGLPIKIYGRMIPCKHVFCYDCAILHEKKGDKMCPGCSDPVQRIEQCTRGSLFMCSIVQGCKRTYLSQRDLQAHINHRHMRAGKPVTRASLENVHPPIAPPPTEIPERFIMPPDKHHMSHIPPKQHIMMPPPPLQHVPHEHYNQPHEDIRAPPAELSMAPPPPRSVSQETFRISTRKHSNLITVPIQDDSNSGAREPPPPAPAPAHHHPEYQGQPVVSHPHHIMPPQQHYAPPPPPPPPISHPMPHPPQAAGTPHLVYSQAPPPPMTSAPPPITPPPGHIIAQMPPYMNHPPPGPPPPQHGGPPVTAPPPHHYNPNSLPQFTEDQGTLSPPFTQPGGMSPGIWPAPRGPPPPPRLQGPPSQTPLPGPHHPDQTRYRPYYQ

SEQ ID NO: 46445 - protein, 1649 aa, Homo sapiens
MTFKTFRPAAMLIERSSDFGKTWGVYRYFAYDCEASFPGISTGPMKKVDDIICDSRYSDIEPSTEGEVIFRALDPAFKIEDPYSPRIQNLLKITNLRIKFVKLHTLGDNLLDSRMEIREKYYYAVYDMVVRGNCFCYGHASECAPVDGFNEEVEGMVHGHCMCRHNTKGLNCELCMDFYHDLPWRPAEGRNSNACKKCNCNEHSISCHFDMAVYLATGNVSGGVCDDCQHNTMGRNCEQCKPFYYQHPERDIRDPNFCERCTCDPAGSQNEGICDSYTDFSTGLIAGQCRCKLNVEGEHCDVCKEGFYDLSSEDPFGCKSCACNPLGTIPGGNPCDSETGHCYCKRLVTGQHCDQCLPEHWGLSNDLDGCRPCDCDLGGALNNSCFAESGQCSCRPHMIGRQCNEVEPGYYFATLDHYLYEAEEANLGPGVSIVERQYIQDRIPSWTGAGFVRVPEGAYLEFFIDNIPYSMEYDILIRYEPQLPDHWEKAVITVQRPGRIPTSSRCGNTIPDDDNQVVSLSPGSRYVVLPRPVCFEKGTNYTVRLELPQYTSSDSDVESPYTLIDSLVLMPYCKSLDIFTVGGSGDGVVTNSAWETFQRYRCLENSRSVVKTPMTDVCRNIIFSISALLHQTGLACECDPQGSLSSVCDPNGGQCQCRPNVVGRTCNRCAPGTFGFGPSGCKPCECHLQGSVNAFCNPVTGQCHCFQGVYARQCDRCLPGHWGFPSCQPCQCNGHADDCDPVTGECLNCQDYTMGHNCERCLAGYYGDPIIGSGDHCRPCPCPDGPDSGRQFARSCYQDPVTLQLACVCDPGYIGSRCDDCASGYFGNPSEVGGSCQPCQCHNNIDTTDPEACDKETGRCLKCLYHTEGEHCQFCRFGYYGDALQQDCRKCVCNYLGTVQEHCNGSDCQCDKATGQCLCLPNVIGQNCDRCAPNTWQLASGTGCDPCNCNAAHSFGPSCNEFTGQCQCMPGFGGRTCSECQELFWGDPDVECRACDCDPRGIETPQCDQSTGQCVCVEGVEGPRCDKCTRGYSGVFPDCTPCHQCFALWDVIIAELTNRTHRFLEKAKALKISGVIGPYRETVDSVERKVSEIKDILAQSPAAEPLKNIGNLFEEAEKLIKDVTEMMAQVEVKLSDTTSQSNSTAKELDSLQTEAESLDNTVKELAEQLEFIKNSDIRGALDSITKYFQMSLEAEERVNASTTEPNSTVEQSALMRDRVEDVMMERESQFKEKQEEQARLLDELAGKLQSLDLSAAAEMTCGTPPGASCSETECGGPNCRTDEGERKCGGPGCGGLVTVAHNAWQKAMDLDQDVLSALAEVEQLSKMVSEAKLRADEAKQSAEDILLKTNATKEKMDKSNEELRNLIKQIRNFLTQDSADLDSIEAVANEVLKMEMPSTPQQLQNLTEDIRERVESLSQVEVILQHSAADIARAEMLLEEAKRASKSATDVKVTADMVKEALEEAEKAQVAAEKAIKQADEDIQGTQNLLTSIESETAASEETLFNASQRISELERNVEELKRKAAQNSGEAEYIEKVVYTVKQSAEDVKKTLDGELDEKYKKVENLIAKKTEESADARRKAEMLQNEAKTLLAQANSKLQLLKDLERKYEDNQRYLEDKAQELARLEGEVRSLLKDISQKVAVYSTCL

SEQ ID NO: 46446 - protein, 620 aa, Homo sapiens
MSRIKSTLNSVSKAVFGNQNEMISRLAQFKPSSQILRKVSDSGWLKQKNIKQAIKSLKKYSDKSAEKSPFPEEKSHIIDKEEDIGKRSLFHYTSSITTKFGDSFYFLSNHINSYFKRKEKMSQQKENEHFRDKSELEDKKVEEGKLRSPDPGILAYKPGSESVHTVDKPTSPSAIPDVLQVSTKQSIANFLSRPTEGVQALVGGYIGGLVPKLKYDSKSQSEEQEEPAKTDQAVSKDRNAEEKKRLSLQREKIIARVSIDNRTRALVQALRRTTDPKLCITRVEELTFHLLEFPEGKGVAVKERIIPYLLRLRQIKDETLQAAVREILALIGYVDPVKGRGIRILSIDGGGTRGVVALQTLRKLVELTQKPVHQLFDYICGVSTGAILAFMLGLFHMPLDECEELYRKLGSDVFSQNVIVGTVKMSWSHAFYDSQTWENILKDRMGSALMIETARNPTCPKVAADGGLLLNNPSALAMHECKCLWPDVPLECIVSLGTGRYESDVRNTVTYTSLKTKLSNVINSATDTEEVHIMLDGLLPPDTYFRFNPVMCENIPLDESRNEKLDQLQLEGLKYIERNEQKMKKVAKILSQEKTTLQKINDWIKLKTDMYEGLPFFSKL

SEQ ID NO: 46447 - protein, 116 aa, Homo sapiens
MPRYCAAICCKNRRGRNNKDRKLSFYPFPLHDKERLEKWLKNMKRDSWVPSKYQFLCSDHFTPDSLDIRWGIRYLKQTAVPTIFSLPEDNQVLQYGRGVMLSRVADFRVAGDQVGE

SEQ ID NO: 46448 - protein, 208 aa, Homo sapiens [sequence omitted]

SEQ ID NO: 46449 - protein, 526 aa, Homo sapiens
MLVEKSLSVILLVVALAMLIIDLRMKSFLAIPNLVIFAVLLFFSSLETPKNPIAFACFFICLITDPFLDIYFSGLSVTERWKPFLYRGRICRRLSVVFAGMIELTFFILSAFKLRDTHLWYFVIPGFSIFGIFWMICHIIFLLTLWGFHTKLNDCHKVYFTHRTDYNSLDRIMASKGMRHFCLISEQLVFFSLLATAILGAVSWQPTNGIFLSMFLIVLPLESMAHGLFHELGNCLGGTSVGYAIVIPTNFCSPDGQPTLLPPEHVQELNLRSTGMLNAIQRFFAYHMIETYGCDYSTSGLSFDTLHSKLKAFLELRTVDGPRHDTYILYYSGHTHGTGEWALAGGDTLRLDTLIEWWREKNGSFCSRLIIVLDSENSTPWVKEVRKINDQYIAVQGAELIKTVDIEEADPPQLGDFTKDWVEYNCNSSNNICWTEKGRTVKAVYGVSKRWSDYTLHLPTGSDVAKHWMLHFPRITYPLVHLANWLCGLNLFWICKTCFRCLKRLKMSWFLPTVLDTGQGFKLVKS

SEQ ID NO: 46450 - protein, 39 aa, Homo sapiens
MGDDCNCPCDMDCGIMDACCESSDCLEICMECCGICFPS

SEQ ID NO: 46451 - protein, 330 aa, Homo sapiens [sequence omitted]

SEQ ID NO: 46452 - protein, 939 aa, Homo sapiens [sequence omitted]

SEQ ID NO: 46453 - protein, 939 aa, Homo sapiens
MANLESLPVSKGGPEFKLQKLKRSQNSAFLDIGDENEIQLSKSDVVLSFTLEIVIMEVQGLKSVAPNRIVYCTMEVEGEKLQTDQAEASRPQWGTQGDFTTTHPRPVVKVKLFTESTGVLALEDKELGRVILYPTSNSSKSAELHRMVVPKNSQDSDLKIKLAVRMDKPAHMKHSGYLYALGQKVWKRWKKRYFVLVQVSQYTFAMCSYREKKSEPQELMQLEGYTVDYTDPHPGLQGGCMFFNAVKEGDTVIFASDDEQDRILWVQAMYRATGQSYKPVPAIQTQKLNPKGGTLHADAQLYADRFQKHGMDEFISANPCKLDHAFLFRILQRQTLDHRLNDSYSCLGWFSPGQVFVLDEYCARYGVRGCHRHLCYLAELMEHSENGAVIDPTLLHYSFAFCASHVHGNRPDGIGTVSVEEKERFEEIKERLSSLLENQISHFRYCFPFGRPEGALKATLSLLERVLMKDIATPIPAEEVKKVVRKCLEKAALINYTRLTEYAKIEETMNQASPARKLEEILHLAELCIEVLQQNEEHHAEAFAWWPDLLAEHAEKFWALFTVDMDTALEAQPQDSWDSFPLFQLLNNFLRNDTLLCNGKFHKHLQEIFVPLVVRYVDLMESSIAQSIHRGFEQETWQPVNNGSATSEDLFWKLDALQMFVFDLHWPEQEFAHHLEQRLKLMASDMLEACVKRTRTAFELKLQKASKTTDLRIPASVCTMFNVLVDAKKQSTKLCALDGGQEFGSQWQQYHSKIDDLIDNSVKEIISLLVSKFVSVLEGVLSKLSRYDEGTFFSSILSFTVKAAAKYVDVPKPGMDLADTYIMFVRQNQDILREKVNEEMYIEKLFDQWYSSSMKVICVWLTDRLDLQLHIYQLKTLIKIVKKTYRDFRLQGVLEGTLNSKTYDTVHRRLTVEEATASVSEGGGLQGITMKDSDEEEEG

SEQ ID NO: 46454 - protein, 567 aa, Homo sapiens
MDDNLPDVNDKQSQAINDLLEAIYPSVDKREYIIKLEPIETNQNAVFQYISRTDNPIEVTESSSTPEQTEVQIQETSTEQSKTVPVTDTEVETVEPPPVEIVTDEVAPTSDEQPQESQADLETSDNSDFGHQLICCLCRKEFNSRRGVRRHIRKVHKKKMEELKKYIETRKNPNQSSKGRSKNVLVPLSRSCPVCCKSFATKANVRRHFDEVHRGLRRDSITPDIATKPGQPLFLDSISPKKSFKTRKQKSSSKAEYNLTACKCLLCKRKYSSQIMLKRHMQIVHKITLSGTNSKREKGPNNTANSSEIKVKVEPADSVESSPPSITHSPQNELKGTNHSNEKKNTPAAQKNKVKQDSESPKSTSPSAAGGQQKTRKPKLSAGFDFKQLYCKLCKRQFTSKQNLTKHIELHTDGNNIYVKFYKCPLCTYETRRKRDVIRHITVVHKKSSRYLGKITASLEIRAIKKPIDFVLNKVAKRGPSRDEAKHSDSKHDGTSNSPSKKYEVADVGIEVKVTKNFSLHRCNKCGKAFAKKTYLEHHKKTHKANASNSPEGNKTKGRSTRSKALV

SEQ ID NO: 46455 - protein, 93 aa, Homo sapiens [sequence omitted]

SEQ ID NO: 46456 - protein, 584 aa, Homo sapiens
MKEIKGRTVAVDWAVAKDKYKDTQSVSAIGEEKSHESKHQESVKKKGREEEDMEEEENDDDDDDDDEEDGVFDDEDEEEENIESKVTKPVQIQKRAVKRPAPAKSSDHSEEDSDLEESDSIDDGEELAQSDTSTEEQEDKAVQVSNKKKRKLPSDVNEGKTVFIRNLSFDSEEEELGELLQQFGELKYVRIVLHPDTEHSKGCAFAQFMTQEAAQKCLLAASPENEAGGLKLDGRQLKVDLAVTRDEAAKLQTTKVKKPTGTRNLYLAREGLIRAGTKAAEGVSAADMAKRERFELLKHQKLKDQNIFVSRTRLCLHNLPKAVDDKQLRKLLLSATSGEKGVRIKECRVMRDLKGVHGNMKGQSLGYAFAEFQEHEHALKALRLINNNPEIFGPLKRPIVEFSLEDRRKLKMKELRIQRSLQKMRSKPATGEPQKGQPEPAKDQQQKAAQHHTEEQSKVPPEQKRKAGSTSWTGFQTKAEVEQVELPDGKKRRKVLALPSHRGPKIRLRDKGKVKPVHPKKPKPQINQWKQEKQQLSSEQVSRKKAKGNKTETRFNQLVEQYKQKLLGPSKGAPLAKRSKWFDS

SEQ ID NO: 46457 - protein, 420 aa, Homo sapiens
MDTVTEADMAIAMAKFEQGFITDPVVLSPSHTVGDVLEAKMRHGFSGIPITETGTMGSKLVGIVTSRDIDFLAEKDHTTLLSEVMTPRIELVVAPAGVTLKEANEILQRSKKGKLPIVNDCDELVAIIARTDLKKNRDYPLASKDSQKQLLCGAAVGTREDDKYRLDLLTQAGVDVIVLDSSQGNSVYQIAMVHYIKQKYPHLQVIGGNVVTAAQAKNLIDAGVDGLRVGMGCGSICITQEVMACGRPQGTAVYKVAEYARRFGVPIIADGGIQTVGHVVKALALGASTVMMGSLLAATTEAPGEYFFSDGVRLKKYRGMGSLDAMEKSSSSQKRYFSEGDKVKIAQGVSGSIQDKGSIQKFVPYLIAGIQHGCQDIGARSLSVLRSMMYSGELKFEKRTMSAQIEGGVHGLHSYEKRLY

SEQ ID NO: 46458 - protein, 47 aa, Homo sapiens [sequence omitted]

SEQ ID NO: 46459 - protein, 558 aa, Homo sapiens
MHSYIAAFGAVTGLCTLFTLATFVADWRNSNRYPAVILFYVNACFFVGSIGWLAQFMDGARREIVCRADGTMRLGEPTSNETLSCVIIFVIVYYALMAGVVWFVVLTYAWHTSFKALGTTYQPLSGKTSYFHLLTWSLPFVLTVAILAVAQVDGDSVSGICFVGYKNYRYRAGFVLAPIGLVLIVGGYFLIRGVMTLFSIKSNHPGLLSEKAASKINETMLRLGIFGFLAFGFVLITFSCHFYDFFNQAEWERSFRDYVLCQANVTIGLPTKQPIPDCEIKNRPSLLVEKINLFAMFGTGIAMSTWVWTKATLLIWRRTWCRLTGQSDDEPKRIKKSKMIAKAFSKRHELLQNPGQELSFSMHTVSHDGPVAGLAFDLNEPSADVSSAWAQHVTKMVARRGAILPQDISVTPVATPVPPEEQANLWLVEAEISPELQKRLGRKKKRRKRKKEVCPLAPPPELHPPAPAPSTIPRLPQLPRQKCLVAAGAWGAGDSCRQGAWTLVSNPFCPEPSPPQDPFLPSAPAPVAWAHGRRQGLGPIHSRTNLMDTELMDADSDF

SEQ ID NO: 46460 - protein, 570 aa, Homo sapiens [sequence omitted]

SEQ ID NO: 46461 - protein, 492 aa, Homo sapiens
MATIEAHAVAQQVQQVHVATYTEHSMLSADEDSPSSPEDTSYDDSDILNSTAADEVTAHLAAAGPVGMAAAAAVATGKKRKRPHVFESNPSIRKRQQTRLLRKLRATLDEYTTRVGQQAIVLCISPSKPNPVFKVFGAAPLENVVRKYKSMILEDLESALAEHAPAPQEVNSELPPLTIDGIPVSVDKMTQAQLRAFIPEMLKYSTGRGKPGWGKESCKPIWWPEDIPWANVRSDVRTEEQKQRVSWTQALRTIVKNCYKQHGREDLLYAFEDQQTQTQATATHSIAHLVPSQTVVQTFSNPDGTVSLIQVGTGATVATLADASELPTTVTVAQVNYSAVADGEVEQNWATLQGGEMTIQTTQASEATQAVASLAEAAVAASQEMQQGATVTMALNSEAAAHAVATLAEATLQGGGQIVLSGETAAAVGALTGVQDANGLVQIPVSMYQTVVTSLAQGNGPVQVAMAPVTTRISDSAVTMDGQAVEVVTLEQ

SEQ ID NO: 46462 - protein, 389 aa, Homo sapiens
MLKCSSCQAFLCASLQPAFDFDRYKQRCAELKKALCTAHEKFCFWPDSPSPDRFGMLPLDEPAILVSEFLDRFQSLCHLDLQLPSLRPEDLKTMCLTEDKISLLLHLLEDELDHRTDERKTTIKLGSDIQVHVTACILSVCGWACSSSLESMQLSLITCSQCMRKVGLWGFQQIESSMTDLDASFGLTSSPIPGLEGRPERLPLVPESPRRMMTRSQDATFSPGSEQAEKSPGPIVSRTRSWDSSSPVDRPEPEAASPTTRTRPVTRSMGTGDTPGLEVPSSPLRKAKRARLCSSSSSDTSSRSFFDPTSQHRDWCPWVNITLGKESRENGGTEPDASAPAEPGWKAVLTILLAHKQSSQPAETDSMSLSEKSRKVFRIFRQWESLCSC

SEQ ID NO: 46463 - protein, 543 aa, Homo sapiens [sequence omitted]

SEQ ID NO: 46464 - protein, 501 aa, Homo sapiens
MRKETEARKVVLAWGLLNVSMAGMIYTEMTGKLISSYYNVTYWPLWYIELALASLFSLNALFDFWRYFKYTVAPTSLVVSPGQQTLLGLKTAVVQTTPPHDLAATQIPPAPPSPSIQGQSVLSYSPSRSPSTSPKFTTSCMTGYSPQLQGLSSGGSGSYSPGVTYSPVSGYNKLASFSPSPPSPYPTTVGPVESSGLRSRYRSSPTVYNSPTDKEDYMTDLRTLDTFLRSEEEKQHRVKLGSPDSTSPSSSPTFWNYSRSMGDYAQTLKKFQYQLACRSQAPCANKDEADLSSKQAAEEVWARVAMNRQLLDHMDSWTAKFRNWINETILVPLVQEIESVSTQMRRMGCPELQIGELSQGGCMSSFRWNRGGDFKGRKWDTDLPTDSAIIMHVFCTYLDSRLPPHPKYPDGKTFTSQHFVQTPNKPDVTNENVFCIYQSAINPPHYELIYQRHVYNLPKGRNNMFHTLLMFLYIIKTKESGMLGRVNLGLSGVNILWIFGE

SEQ ID NO: 46465 - protein, 777 aa, Homo sapiens
MATISEDVIIVTSSLTKDMTGKEDVYRGPAIRALCRITDGTMLQAIERYMKQAIVDKVSSVSSSALVSSLHMMKISYDVVKRWINEAQEAASSDNIMVQYHALGVLYHLRKNDRLAVSKMLNKFTKSGLKSQFAYCMLIRIASRLLKETEDGHESPLFDFIESCLRNKHEMVIYEAASAIIHLPNCTARELAPAVSVLQLFCSSPKPALRYAAVRTLNKVAMKHPSAVTACNLDLENLITDSNRSIATLAITTLLKTGSESSVDRLMKQISSFVSEISDEFKVVVVQAISALCQKYPRKHSVMMTFLSNMLRDDGGFEYKRAIVDCIISIVEENPESKEAGLAHLCEFIEDCEHTVLATKILHLLGKEGPRTPVPSKYIRFIFNRVVLENEAVRAAAVSALAKFGAQNESLLPSILVLLQRCMMDTDDEVRDRATFYLNVLQQRQMALNATYIFNGLTVSVPGMEKALHQYTLEPSEKPFDMKSIPLAMAPVFEQKAEITLVATKPEKLAPSRQDIFQEQLAAIPEFLNIGPLFKSSEPVQLTEAETEYFVRCIKHMFTNHIVFQFDCTNTLNDQLLEKVTVQMEPSDSYEVLSCIPAPSLPYNQPGICYTLVRLPDDDPTAVAGSFSCTMKFTVRDCDPNTGVPDEDGYDDEYVLEDLEVTVSDHIQKVLKPNFAAAWEEVGDTFEKEETFALSSTKTLEEAVNNIITFLGMQPCERSDKVPENKNSHSLYLAGIFRGGYDLLVRSRLALADGVTMQVTVRSKERTPVDVILASVG

SEQ ID NO: 46466 - protein, 471 aa, Homo sapiens [sequence omitted]

SEQ ID NO: 46467 - protein, 40 aa, Homo sapiens
MSPRRRWLFGGSEERLLLLLLLLVAPLQKSSKNSAVGSVR

SEQ ID NO: 46468 - protein, 89 aa, Homo sapiens
MWEKGNVFSSPTAAGTPNKETAGLKVGVSSRINEWLTKTPDGNKSPAPKPSDLRPGDVSSKRNLWEKQSVDKVTSPTKEPVSKETHAVK

SEQ ID NO: 46469 - protein, 59 aa, Homo sapiens
MSVPVVSAPPFCPPAEGSRDGRPKASVARPAAVHEHHSPRDCGHLPDVLRSSLGGWQPH

SEQ ID NO: 46470 - protein, 169 aa, Homo sapiens
MLLLLLLYYNAEASMCHRWSRAVLFPAAHRPKRSSSLPLNPVLQTSLEEVELLYEFLLAELEISPDLQISIKDEELASLRKASDFRTVCNNVIPKSIPDIRRLSASLSSHPGILKKEDFERTVLTLAYTAYRTALSHGHQKDIWAQSLVSLFQALRHDLMRSSQPGVPP

SEQ ID NO: 46471 - protein, 693 aa, Homo sapiens
MEQENKGRPFVIKPISSPLMKPLLVFVNPKSGGNQGTKVLQMFMWYLNPRQVFDLSQEGPKDALELYRKVPNLRILACGGDGTVGWILSILDELQLSPQPPVGVLPLGTGNDLARTLNWGGGYTDEPVSKILCQVEDGTVVQLDRWNLHVERNPDLPPEELEDGVCKLPLNVFNNYFSLGFDAHVTLEFHESREANPEKFNSRFRNKMFYAGAAFSDFLQRSSRDLSKHVKVVCDGTDLTPKIQELKFQCIVFLNIPRYCAGTMPWGNPGDHHDFEPQRHDDGYIEVIGFTMASLAALQVGGHGERLHQCREVMLLTYKSIPMQVDGEPCRLAPAMIRISLRNQANMVQKSKRRTSMPLLNDPQSVPDRLRIRVNKISLQDYEGFHYDKEKLREASIPLGILVVRGDCDLETCRMYIDRLQEDLQSVSSGSQRVHYQDHETSFPRALSAQRLSPRWCFLDDRSQEHLHFVMEISQDEIFILDPDMVVSQPAGTPPGMPDLVVEQASGISDWWNPALRKRMLSDSGLGMIAPYYEDSDLKDLSHSRVLQSPVSSEDHAILQAVIAGDLMKLIESYKNGGSLLIQGPDHCSLLHYAAKTGNGEIVKYILDHGPSELLDMADSETGETALHKAACQRNRAVCQLLVDAGASLRKTDSKGKTPQERAQQAGDPDLAAYLESRQNYKVIGHEDLETAV

SEQ ID NO: 46472 - protein, 490 aa, Homo sapiens
MYHTHFSELLDEFSQNVLGQLLNDPFLSEKSVSMEVEPSPTSPAPLIQAEHSYSLCEEPRAQSPFTHITTSDSFNDDEVESEKWYLSTDFPSTSIKTEPVTDEPPPGLVPSVTLTITAISTPLEKEEPPLEMNTGVDSSCQTIIPKIKLEPHEVDQFLNFSPKEAPVDHLHLPPTPPSSHGSDSEGSLSPNPRLHPFSLPQTHSPSRAAPRAPSALSSSPLLTAPHKLQGSGPLVLTEEEKRTLIAEGYPIPTKLPLSKSEEKALKKIRRKIKNKISAQESRRKKKEYMDSLEKKVESCSTENLELRKKVEVLENTNRTLLQQLQKLQTLVMGKVSRTCKLAGTQTGTCLMVVVLCFAVAFGSFFQGYGPYPSATKMALPSQHSLQEPYTASVVRSRNLLIYEEHSPPEESSSPGSAGELGGWDRGSSLLRVSGLESRPDVDLPHFIISNETSLEKSVLLELQQHLVSAKLEGNETLKVVELDRRVNTTF

SEQ ID NO: 46473 - protein, 1646 aa, Homo sapiens
MPQPLGDGITIPLPSLGEVSQPPEEVWATSADRYTDVTTVLSQSLEETISPRTYPTVTASHAALAFSRTHSPLLSTPLAFASSASPTDVSSNPFLPSDSSKTSELHSNSALPGPVDNTHILSPVSSFRPYTWCAACTVPSPQQVLATSLMEKDVGSGDGAETLCMTVLEESSISLMSSVVADFSEFEEDPQVFNTLFPSRPIVPLSSRSMEISETSVGISAEVDMSSVTTTQVPPAHGRLSVPASLDPTAGSLSVAETQVTPSSVTTAFFSVITSILLDSSFSVIANKNTPSLAVRDPSVFTPYSLVPSVESSLFSDQERSSFSEHKPRGALDFASSFFSTPPLELSGSISSPSEAPASLSLMPSDLSPFTSQSFSPLVETFTLFDSSDLQSSQLSLPSSTNLEFSQLQPSSELPLNTIMLLPSRSEVSPWSSFPSDSLEFVEASTVSLTDSEAHFTSAFIETTSYLESSLISHESAVTALVPPGSESFDILTAGIQATSPLTTVHTTPILTESSLFSTLTPPDDQISALDGHVSVLASFSKAIPTGTVLITDAYLPSGSSFVSEATPFPLPTELTVVGPSLTPTEVPLNTSTEVSTTSTGAATGGPLDSTLMGDAASQSPPESSAAPPLPSLRPVTAFTLEATVDTPTLATAKPPYVCDITVPDAYLITTVLARRAVQEYIITAIKEVLRIHFNRAVELKVYELFTDFTFLVTSGPFVYTAISVINVLINSKLVRDQTPLILSVKPSFLVPESRFQVQTVLQFVPPSVDTGFCNFTQRIEKGLMTALFEVRKHHQGTYNLTVQILNITISSSRVTPRRGPVNIIFAVKSTQGFLNGSEVSELLRNLSVVEFSFYLGYPVLQIAEPFQYPQLNLSQLLKSSWVRTVLLGVMEKQLQNEVFQAEMERKLAQLLSEVSTRRRMWRRATVAAGNSVVQVVNVSRLEGDDNPVQLIYFVEDQDGERLSAVKSSDLINKMDLQRAAIILGYRIQGVIAQPVDRVKRPSPESQSNNLWVIVGVVIPVLVVMVIVVILYWKLCRTDKLDFQPDTVANIQQRQKLQIPSVKGFDFAKQHLGQHNKDDILIIHEPAPLPGPLKDHTTPSENGDVPSPKSKIPSKNVRHRGRVSPSDADSTVSEESSERDAGDKTPGAVNDGRSHRAPQSGPPLPSSGNEQHSSASIFEHVDRISRPPEASRRVPSKIQLIAMQPIPAPPVQRPSPADRVAESNKINKEIQTALRHKSEIEHHRNKIRLRAKRRGHYEFPVVDDLSSGDTKERHRVYRRAQMQIDKILDPTASVPSVFIEPRKSSRIKRSPKPRRKHQVNGCPADAEKDRLITTDSDGTYRRPPGVHNSAYIGCPSDPDLPADVQTPSSVELGRYPALPFPASQYIPPQPSIEEARQTMHSLLDDAFALVAPSSQPASTAGVGPGVPPGLPANSTPSQEERRATQWGSFYSPAQTANNPCSRYEDYGMTPPTGPLPRPGFGPGLLQSTELVPPDPQQPQASAEAPFAARGIYSEEMPSVARPRPVGGTTGSQIQHLTQVGIASRIGAQPVEIPPSRGSQYGGPGWPSYGEDEAGRREAVPRTSGREPSAPSGNLPHRGLQGPGLGYPTSSTEDLQPGHSSASLIKAIREELLRLSQKQSTVQNFHS

SEQ ID NO: 46474 - protein, 449 aa, Homo sapiens
MYKQAEAAGFKASKSRLQNRLLFHLAHKFNDEKKLMSFHQNLQDVTEDQLSLASIHYMRSHYQEAIDIYKRILLDNREYLALNVYVALCYYKLDYYDVSQEVLAVYLQQIPDSTIALNLKACNHFRLYNGRAAEAELKSLMDNASSSFEFAKELIRHNLVVFRGGEGALQVLPPLVDVIPEARLNLVIYYLRQDDVQEAYNLIKDLEPTTPQEYILKGVVNAALGQEMGSRDHMKIAQQFFQLVGGSASECDTIPGRQCMASCFFLLKQFDDVLIYLNSFKSYFYNDDIFNFNYAQAKAATGNTSEGEEAFLLIQSEKMKNDYIYLSWLARCYIMNKKPRLAWELYLKMETSGESFSLLQLIANDCYKMGQFYYSAKAFDVLERLDPNPEYWEGKRGACVGIFQMIIAGREPKETLREVLHLLRSTGNTQVEYMIRIMKKWAKENRVSI

SEQ ID NO: 46475 - protein, 1170 aa, Homo sapiens
MLAKKFEMKYGGKPRKHRKDRLQDLIDIGFGYDETDPFIDNSEAYDELVPASLTTKYGGFYINTGTLQFRQASDTEEDDITDNQKHKPPKVPKIKEDDIEMKKRKRKEEGEKEKKPRKKVPKQLGVVALNSHKSEKKKKRYKDSLSLAAMIRKFQKEKDALKKESNPKVPVTLSTPSLNKPPCAAAALGNDVPDLNLSSGDPDLPIFVSTNEHELFQEAENALEMLDDFDFDRLLDAASDGSPLSESGGENGTTTQPTYTSQVMPKVVPTLPEGLPVLLEKRIEDLRVAAKLFDEEGRKKFFTQDMNNILLDIELQLQELGPVIRSGVYSHLEAFVPCNKETLVKRLKKLHLNVQDDRLREPLQKLKLAVSNVMPEQLFKYQEDCQARSQAKCAKLQTDEEREKNGSEEDDDEKPGKRVIGPRKKFHWDDTIRTLLCNLVEIKLGCYELEPNKSQSAEDYLKSFMETEVKPLWPKGWMQARMLFKESRSVHNHLTSAPAKKKVIPAPKPKVKEVMVKTLPLHSFPTMLKECSPKKDQKTPTSLVASVSGPPTSSSTAAIAAASSSSAPAQETICLDDSLDEDLSFHSPSLDLVSEALAVINNGNKGPPVGSRISMPTTKPRPGLREEKLASIMSKLPLATPKKLDSTQTTHSSSLIAGHTGPVPKKPQDLAHTGISSGLIAGSSIQNPKVSLEPLPARLLQQGLQRSSQIHTSSSSQTHVSSSSQAQIAASSHALGTSEAQDASSLTQVTKVHQHSAVQQNYVSPLQATISKSQTNPVVKLSNNPQLSCSSSLIKTSDKPLMYRLPLSTPSPGNGSQGSHPLVSRTVPSTTTSSNYLAKAMVSQISTQGFKSPFSMAASPKLAASPKPATSPKPLPSPKPSASPKPSLSAKPSVSTKLISKSNPTPKPTVSPSSSSPNALVAQGSHSSTNSPVHKQPSGMNISRQSPTLNLLPSSRTSGLPPTKNLQAPSKLTNSSSTGTVGKNSLSGIAMNVPASRGSNLNSSGANRTSLSGGTGSGTQGATKPLSTPHRPSTASGSSVVTASVQSTAGASLLANASPLTLMTSPLSVTNQNVTPFGMLGGLVPVTMPFQFPLEIFGFGTDTAGVTTTSGSTSAAFHHSLTQNLLKGLQPGGAQHAATLSHSPLPAHLQQAFHDGGQSKGDTKLPRKSQ

SEQ ID NO: 46476 - protein, 1158 aa, Homo sapiens
MTGYGSHSKVYSQSKNIPLSQPATTTVSTSLPVPNPSLPYEQTIVFPGSTGHIVVTSASSTSVTGQVLGGPHNLMRRSTVSLLDTYQKCGLKRKSEEIENTSSVQIIEEHPPMIQNNASGATVATATTSTATSKNSGSNSEGDYQLVQHEVLCSMTNTYEVLEFLGRGTFGQVVKCWKRGTNEIVAIKILKNHPSYARQGQIEVSILARLSTESADDYNFVRAYECFQHKNHTCLVFEMLEQNLYDFLKQNKFSPLPLKYIRPVLQQVATALMKLKSLGLIHADLKPENIMLVDPSRQPYRVKVIDFGSASHVSKAVCSTYLQSRYYRAPEIILGLPFCEAIDMWSLGCVIAELFLGWPLYPGASEYDQIRYISQTQGLPAEYLLSAGTKTTRFFNRDTDSPYPLWRLKTPDDHEAETGIKSKEARKYIFNCLDDMAQVNMTTDLEGSDMLVEKADRREFIDLLKKMLTIDADKRITPIETLNHPFVTMTHLLDFPHSTHVKSCFQNMEICKRRVNMYDTVNQSKTPFITHVAPSTSTNLTMTFNNQLTTVHNQAPSSTSATISLANPEVSILNYPSTLYQPSAASMAAVAQRSMPLQTGTAQICARPDPFQQALIVCPPGFQGLQASPSKHAGYSVRMENAVPIVTQAPGAQPLQIQPGLLAQQAWPSGTQQILLPPAWQQLTGVATHTSVQHATVIPETMAGTQQLADWRNTHAHGSHYNPIMQQPALLTGHVTLPAAQPLNVGVAHVMRQQPTSTTSSRKSKQHQSSVRNVSTCEVSSSQAISSPQRSKRVKENTPPRCAMVHSSPACSTSVTCGWGDVASSTTRERQRQTIVIPDTPSPTVSVITISSDTDEEEEQKHAPTSTVSKQRKNVISCVTVHDSPYSDSSSNTSPYSVQQRAGHNNANAFDTKGSLENHCTGNPRTIIVPPLKTQASEVLVECDSLVPVNTSHHSSSYKSKSSSNVTSTSGHSSGSSSGAITYRQQRPGPHFQQQQPLNLSQAQQHITTDRTGSHRRQQAYITPTMAQAPYSFPHNSPSHGTVHPHLAAAAAAAHLPTQPHLYTYTAPAALGSTGTVAHLVASQGSARHTVQHTAYPASIVHQVPVSMGPRVLPSPTIHPSQYPAQFAHQTYISASPASTVYTGYPLSPAKVNQYPYI

SEQ ID NO: 46477 - protein, 1131 aa, Homo sapiens
MTGYGSHSKVYSQSKNIPLSQPATTTVSTSLPVPNPSLPYEQTIVFPGSTGHIVVTSASSTSVTGQVLGGPHNLMRRSTVSLLDTYQKCGLKRKSEEIENTSSVQIIEEHPPMIQNNASGATVATATTSTATSKNSGSNSEGDYQLVQHEVLCSMTNTYEVLEFLGRGTFGQVVKCWKRGTNEIVAIKILKNHPSYARQGQIEVSILARLSTESADDYNFVRAYECFQHKNHTCLVFEMLEQNLYDFLKQNKFSPLPLKYIRPVLQQVATALMKLKSLGLIHADLKPENIMLVDPSRQPYRVKVIDFGSASHVSKAVCSTYLQSRYYRAPEIILGLPFCEAIDMWSLGCVIAELFLGWPLYPGASEYDQIRYISQTQGLPAEYLLSAGTKTTRFFNRDTDSPYPLWRLKTPDDHEAETGIKSKEARKYIFNCLDDMAQVNMTTDLEGSDMLVEKADRREFIDLLKKMLTIDADKRITPIETLNHPFVTMTHLLDFPHSTHVKSCFQNMEICKRRVNMYDTVNQSKTPFITHVAPSTSTNLTMTFNNQLTTVHNQPSAASMAAVAQRSMPLQTGTAQICARPDPFQQALIVCPPGFQGLQASPSKHAGYSVRMENAVPIVTQAPGAQPLQIQPGLLAQQAWPSGTQQILLPPAWQQLTGVATHTSVQHATVIPETMAGTQQLADWRNTHAHGSHYNPIMQQPALLTGHVTLPAAQPLNVGVAHVMRQQPTSTTSSRKSKQHQSSVRNVSTCEVSSSQAISSPQRSKRVKENTPPRCAMVHSSPACSTSVTCGWGDVASSTTRERQRQTIVIPDTPSPTVSVITISSDTDEEEEQKHAPTSTVSKQRKNVISCVTVHDSPYSDSSSNTSPYSVQQRAGHNNANAFDTKGSLENHCTGNPRTIIVPPLKTQASEVLVECDSLVPVNTSHHSSSYKSKSSSNVTSTSGHSSGSSSGAITYRQQRPGPHFQQQQPLNLSQAQQHITTDRTGSHRRQQAYITPTMAQAPYSFPHNSPSHGTVHPHLAAAAAAAHLPTQPHLYTYTAPAALGSTGTVAHLVASQGSARHTVQHTAYPASIVHQVPVSMGPRVLPSPTIHPSQYPAQFAHQTYISASPASTVYTGYPLSPAKVNQYPYI

SEQ ID NO: 46478 - protein, 878 aa, Homo sapiens
MTGYGSHSKVYSQSKNIPLSQPATTTVSTSLPVPNPSLPYEQTIVFPGSTGHIVVTSASSTSVTGQVLGGPHNLMRRSTVSLLDTYQKCGLKRKSEEIENTSSVQIIEEHPPMIQNNASGATVATATTSTATSKNSGSNSEGDYQLVQHEVLCSMTNTYEVLEFLGRGTFGQVVKCWKRGTNEIVAIKILKNHPSYARQGQIEVSILARLSTESADDYNFVRAYECFQHKNHTCLVFEMLEQNLYDFLKQNKFSPLPLKYIRPVLQQVATALMKLKSLGLIHADLKPENIMLVDPSRQPYRVKVIDFGSASHVSKAVCSTYLQSRYYRAPEIILGLPFCEAIDMWSLGCVIAELFLGWPLYPGASEYDQIRYISQTQGLPAEYLLSAGTKTTRFFNRDTDSPYPLWRLKTPDDHEAETGIKSKEARKYIFNCLDDMAQVNMTTDLEGSDMLVEKADRREFIDLLKKMLTIDADKRITPIETLNHPFVTMTHLLDFPHSTHVKSCFQNMEICKRRVNMYDTVNQSKTPFITHVAPSTSTNLTMTFNNQLTTVHNQAPSSTSATISLANPEVSILNYPSTLYQPSAASMAAVAQRSMPLQTGTAQICARPDPFQQALIVCPPGFQGLQASPSKHAGYSVRMENAVPIVTQAPGAQPLQIQPGLLAQQAWPSGTQQILLPPAWQQLTGVATHTSVQHATVIPETMAGTQQLADWRNTHAHGSHYNPIMQQPALLTGHVTLPAAQPLNVGVAHVMRQQPTSTTSSRKSKHTVSKQRKNVISCVTVHDSPYSDSSSNTSPYSVQQRAGHNNANAFDTKGSLENHCTGNPRTIIVPPLKTQASEVLVECDSLVPGNLGPGQGRNLSLESGFPAFLLLEMLLYGS

SEQ ID NO: 46479 - protein, 890 aa, Homo sapiens
MIECDICKDWFHGSCVGVEEHHAVDIDLYHCPNCAVLHGSSLMKKRRNWHRHDYTEIDDGSKPVQAGTRTFIKELRSRVFPSADEIIIKMHGSQLTQRYLEKHGFDVPIMVPKLDDLGLRLPSPTFSVMDVERYVGGDKVIDVIDVARQADSKMTLHNYVKYFMNPNRPKVLNVISLEFSDTKMSELVEVPDIAKKLSWVENYWPDDSVFPKPFVQKYCLMGVQDSYTDFHIDFGGTSVWYHVLWGEKIFYLIKPTDENLARYESWSSSVTQSEVFFGDKVDKCYKCVVKQGHTLFVPTGWIHAVLTSQDCMAFGGNFLHNLNIGMQLRCYEMEKRLKTPDLFKFPFFEAICWFVAKNLLETLKELREDGFQPQTYLVQGVKALHTALKLWMKKELVSEHAFEIPDNVRPGHLIKELSKVIRAIEEENGKPVKSQGIPIVCPVSRSSNEATSPYHSRRKMRKLRDHNVRTPSNLDILELHTREVLKRLEMCPWEEDILSSKLNGKFNKHLQPSSTVPEWRAKDNDLRLLLTNGRIIKDERQPFADQSLYTADSENEEDKRRTKKAKMKIEESSGVEGVEHEESQKPLNGFFTRVKSELRSRSSGYSDISESEDSGPECTALKSIFTTEESESSGDEKKQEITSNFKEESNVMRNFLQKSQKPSRSEIPIKRECPTSTSTEEEAIQGMLSMAGLHYSTCLQRQIQSTDCSGERNSLQDPSSCHGSNHEVRQLYRYDKPVECGYHVKTEDPDLRTSSWIKQFDTSRFHPQDLSRSQKCIRKEGSSEISQRVQSRNYVDSSGSSLQNGKYMQNSNLTSGACQISNGSLSPERPVGETSFSVPLHPTKRPASNPPPISNQATKGKRPKKGMATAKQRLGKILKLNRNGHARFFV

SEQ ID NO: 46480 - protein, 1002 aa, Homo sapiens [sequence omitted]

SEQ ID NO: 46481 - protein, 270 aa, Homo sapiens
MVQQIDLRYEAQNLEHFQVNFRNVKAVKFPTPLRPFVTREVLVETYEESVPVSSYQQAGIPVDLKRKIARLGINMLLKMIFVDNFVHADLHPGNILVQGANGLSSSQEAQLQQADICDTLVVAVPSSLCPLRLVLLDAGIVAELQAPDLRNFRAVFMAVVMGQGQRVAELILHHARASECRDVEGFKTEMAMLVTQARKNTITLEKLHVSSLLSSVFKLLMTHKVKLESNFASIVFAIMVLEGLGRSLDPKLDILEAARPFLLTGPVCPP

SEQ ID NO: 46482 - protein, 745 aa, Homo sapiens
MEPEAGAGAGAAASSAADPAIPEEVWNIKQMIKLTQEHIEALLDKFGGEHNPPSIYLEAYEEYTSKLDALQQREQQLLESLGNGTDFSVSSSASMDTVTSSSSSSLSVLPSSLSVFQNPTDVARSNPKSPQKPIVRVFLPNKQRTVVPARCGVTVRDSLKKALMMRGLIPECCAVYRIQDGEKKPIGWDTDISWLTGEELHVEVLENVPLTTHNFVRKTFFTLAFCDFCRKLLFQGFRCQTCGYKFHQRCSTEVPLMCVNYDQLDLLFVSKFFEHHPIPQEEASLAETALTSGSSPSAPASDSIGPQILTSPSPSKSIPIPQPFRPADEDHRNQFGQRDRSSSAPNVHINTIEPVNIDDLIRDQGFRGDGGSTTGLSATPPASLPGSLTNVKALQKSPGPQRERKSSSSSEDRNRMKTLGRRDSSDDWEIPDGQITVGQRIGSGSFGTVYKGKWHGDVAVKMLNVTAPTPQQLQAFKNEVGVLRKTRHVNILLFMGYSTKPQLAIVTQWCEGSSLYHHLHIIETKFEMIKLIDIARQTAQGMDYLHAKSIIHRDLKSNNIFLHEDLTVKIGDFGLATVKSRWSGSHQFEQLSGSILWMAPEVIRMQDKNPYSFQSDVYAFGIVLYELMTGQLPYSNINNRDQIIFMVGRGYLSPDLSKVRSNCPKAMKRLMAECLKKKRDERPLFPQILASIELLARSLPKIHRSASEPSLNRAGFQTEDFSLYACASPKTPIQAGGYGEFAAFK

SEQ ID NO: 46483 - protein, 274 aa, Homo sapiens
MLAVAICSDHWYETDARKHRDRCKAFNTRRVDPGFIYNNNNNLPLRASRSRLDRWEGKLLRARNRRQLFAMSPADECSRQYNSTNMGLWRKCHRQGFDPEIAALIRKGEIERCTYIKYHYSSATIPRNLTFNITKTIRQDEWHALHLRRMTAGFMGMAVAIILFGWIIGVLGCCWDRGLMQYVAGLLFLMGGTFCIISLCTCVAGINFELSRYPRYLYGLPDDISHGYGWSMFCAWGGLGLTLISGFFCTLAPSVQPVPRTNYPKSRPENGTVC

SEQ ID NO: 46484 - protein, 310 aa, Homo sapiens
MENTDVIIVAGGDGTLQEVVTGVLRRTDEATFSKIPIGFIPLGETSSLSHTLFAESGNKVQHITDATLAIVKGETVPLDVLQIKGEKEQPVFAMTGLRWGSFRDAGVKVSKYWYLGPLKIKAAHFFSTLKEWPQTHQASISYTGPTERPPNEPEETPVQRPSLYRRILRRLASYWAQPQDALSQEVSPEVWKDVQLSTIELSITTRNNQLDPTSKEDFLNICIEPDTISKGDFITIGSRKVRNPKLHVEGTECLQASQCTLLIPEGAGGSFSIDSEEYEAMPVEVKLLPRKLQFFCDPRKREQMLTSPTQ

SEQ ID NO: 46485 - protein, 1007 aa, Homo sapiens
MVCSLWVLLLVSSVLALEEVLLDTTGETSEIGWLTYPPGGWDEVSVLDDQRRLTRTFEACHVAGAPPGTGQDNWLQTHFVERRGAQRAHIRLHFSVRACSSLGVSGGTCRETFTLYYRQAEEPDSPDSVSSWHLKRWTKVDTIAADESFPSSSSSSSSSSSSAAWAVGPHGAGQRAGLQLNVKERSFGPLTQRGFYVAFQDTGACLALVAVRLFSYTCPAVLRSFASFPETQASGAGGASLVAAVGTCVAHAEPEEDGVGGQAGGSPPRLHCNGEGKWMVAVGGCRCQPGYQPARGDKACQACPRGLYKASAGNAPCSPCPARSHAPNPAAPVCPCLEGFYRASSDPPEAPCTGPPSAPQELWFEVQGSALMLHWRLPRELGGRGDLLFNVVCKECEGRQEPASGGGGTCHRCRDEVHFDPRQRGLTESRVLVGGLRAHVPYILEVQAVNGVSELSPDPPQAAAINVSTSHEVPSAVPVVHQVSRASNSITVSWPQPDQTNGNILDYQLRYYDQAEDESHSFTLTSETNTATVTQLSPGHIYGFQVRARTAAGHGPYGGKVYFQTLPQGELSSQLPERLSLVIGSILGALAFLLLAAITVLAVVFQRKRRGTGYTEQLQQYSSPGLGVKYYIDPSTYEDPCQAIRELAREVDPAYIKIEEVIGTGSFGEVRQGRLQPRGRREQTVAIQALWAGGAESLQMTFLGRAAVLGQFQHPNILRLEGVVTKSRPLMVLTEFMELGPLDSFLRQREGQFSSLQLVAMQRGVAAAMQYLSSFAFVHRSLSAHSVLVNSHLVCKVARLGHSPQGPSCLLRWAAPEVIAHGKHTTSSDVWSFGILMWEVMSYGERPYWDMSEQEVLNAIEQEFRLPPPPGCPPGLHLLMLDTWQKDRARRPHFDQLVAAFDKMIRKPDTLQAGGDPGERPSQALLTPVALDFPCLDSPQAWLSAIGLECYQDNFSKFGLCTFSDVAQLSLEDLPALGITLAGHQKKLLHHIQLLQQHLRQQGSVEV

SEQ ID NO: 46486 - protein, 740 aa, Homo sapiens
MAKSRYMELYTHVYNYCTSVHQSNQARGAGVPPSKSKKGQTPGGAQFVGLELYKRLKEFLKNYLTNLLKDGEDLMDESVLKFYTQQWEDYRFSSKVLNGICAYLNRHWVRRECDEGRKGIYEIYSLALVTWRDCLFRPLNKQVTNAVLKLIEKERNGETINTRLISGVVQSYVELGLNEDDAFAKGPTLTVYKESFESQFLADTERFYTRESTEFLQQNPVTEYMKKAEARLLEEQRRVQVYLHESTQDELARKCEQVLIEKHLEIFHTEFQNLLDADKNEDLGRMYNLVSRIQDGLGELKKLLETHIHNQGLAAIEKCGEAALNDPKMYVQTVLDVHKKYNALVMSAFNNDAGFVAALDKACGRFINNNAVTKMAQSSSKSPELLARYCDSLLKKSSKNPEEAELEDTLNQVMVVFKYIEDKDVFQKFYAKMLAKRLVHQNSASDDAEASMISKLKQACGFEYTSKLQRMFQDIGVSKDLNEQFKKHLTNSEPLDLDFSIQVLSSGSWPFQQSCTFALPSELERSYQRFTAFYASRHSGRKLTWLYQLSKGELVTNCFKNRYTLQASTFQMAILLQYNTEDAYTVQQLTDSTQIKMDILAQVLQILLKSKLLVLEDENANVDEVELKPDTLIKLYLGYKNKKLRVNINVPMKTEQKQEQETTHKNIEEDRKLLIQAAIVRIMKMRKVLKHQQLLGEVLTQLSSRFKPRVPVIKKCIDILIEKEYLERVDGEKDTYSYLA

SEQ ID NO: 46487 - protein, 621 aa, Homo sapiens
MPPMQAQEWDMDARRPMPFQFPPFPDRAPVFPDRMMREPQLPTAEISLWTVVAAIQAVERKVDAQASQLLNLEGRTGTAEKKLADCEKTAVEFGNHMESKWAVLGTLLQEYGLLQRRLENLENLLRNRNFWVLRLPPGSKGEAPKVPVTFVDIAVYFSEDEWKNLDEWQKELYNNLVKENYKTLMSLDAEGSVPKPDAPVQAEPREEPCVWEQRHPEEREIPMDPEAGAEPLVPAQDASSQVKREDTLCVRGQRGLEERAIPTESITDSPISAQDLLSRIKQEEHQCVWDQQDLADRDIPTDPNSESLISAHDILSWIKQEEQPYPWGPRDSMDGELGLDSGPSDSLLMVKNPPPAPPQPQPQPQPPQPQLQSQPQPQSLPPIAVAENPGGPPSRGLLDDGFQVLPGERGSGEAPPGGDRSTGGGGGDGGGGGGGAEAGTGAGGGCGSCCPGGLRRSLLLHGARSKPYSCPECGKSFGVRKSLIIHHRSHTKERPYECAECEKSFNCHSGLIRHQMTHRGERPYKCSECEKTYSRKEHLQNHQRLHTGERPFQCALCGKSFIRKQNLLKHQRIHTGERPYTCGECGKSFRYKESLKDHLRVHSGGPGPGAPRQLPPPPERD

SEQ ID NO: 46488 - protein, 625 aa, Homo sapiens
MERKIESQAARLLSLEGRTGMAEKKLADCEKTAVEFGNQLEGKWAVLGTLLQEYGLLQRRLENVENLLRNRNFWILRLPPGSKGESPKEWGKLEDWQKELYKHVMRGNYETLVSLDYAISKPEVLSQIEQGKEPCNWRRPGPKIPDVPVDPSPGSGPPVPAPDLLMQIKQEGELQLQEQQALGVEAWAAGQPDIGEEPWGLSQLDSGAGDISTDATSGVHSNFSTTIPPTSWQTDLPPHHPSSACSDGTLKLNTAASTEADVKIVIKTEVQEEEVVATPVHPTDLEAHGTLFGPGQATRFFPSPAQEGAWESQGSSFPSQDPVLGLREPARPERDMGELSPAVAQEETPPGDWLFGGVRWGWNFRCKPPVGLNPRTGPEGLPYSSPDNGEAILDPSQAPRPFNEPCKYPGRTKGFGHKPGLKKHPAAPPGGRPFTCATCGKSFQLQVSLSAHQRSCGAPDGSGPGTGGGGSGSGGGGGGSGGGSARDGSALRCGECGRCFTRPAHLIRHRMLHTGERPFPCTECEKRFTERSKLIDHYRTHTGVRPFTCTVCGKSFIRKDHLRKHQRNHAAGAKTPARGQPLPTPPAPPDPFKSPASKGPLASTDLVTDWTCGLSVLGPTDGGDM

SEQ ID NO: 46489 - protein, 1079 aa, Homo sapiens
MEVQGPTRESGQSLPPQKKAYLSHLSTGSGHIEGDWAGRNRKLLKPRSIQKSWFVQFPWLIMNEEQTALFCSACREYPSIRDKRSRLIEGYTGPFKVETLKYHAKSKAHMFCVNALAARDPIWAARFRSIRDPPGDVLASPEPLFTADCPIFYPPGPLGGFDSMAELLPSSRAELEDPGGDGAIPAMYLDCISDLRQKEITDGIHSSSDINILYNDAVESCIQDPSAEGLSEEVPVVFEELPVVFEDVAVYFTREEWGMLDKRQKELYRDVMRMNYELLASLGPAAAKPDLISKLERRAAPWIKDPNGPKWGKGRPPGNKKMVAVREADTQASAADSALLPGSPVEARASCCSSSICEEGDGPRRIKRTYRPRSIQRSWFGQFPWLVIDPKETKLFCSACIERPNLHDKSSRLVRGYTGPFKVETLKYHEVSKAHRLCVNTVEIKEDTPHTALVPEISSDLMANMEHFFNAAYSIAYHSRPLNDFEKILQLLQSTGTVILGKYRNRTACTQFIKYISETLKREILEDVRNSPCVSVLLDSSTDASEQACVGIYIRYFKQMEVKESYITLAPLYSETADGYFETIVSALDELDIPFRKPGWVVGLGTDGSAMLSCRGGLVEKFQEVIPQLLPVHCVAHRLHLAVVDACGSIDLVKKCDRHIRTVFKFYQSSNKRLNELQEGAAPLEQEIIRLKDLNAVRWVASRRRTLHALLVSWPALARHLQRVAEAGGQIGHRAKGMLKLMRGFHFVKFCHFLLDFLSIYRPLSEVCQKEIVLITEVNATLGRAYVALESLRHQAGPKEEEFNASFKDGRLHGICLDKLEVAEQRFQADRERTVLTGIEYLQQRFDADRPPQLKNMEVFDTMAWPSGIELASFGNDDILNLARYFECSLPTGYSEEALLEEWLGLKTIAQHLPFSMLCKNALAQHCRFPLLSKLMAVVVCVPISTSCCERGFKAMNRIRTDERTKLSNEVLNMLMMTAVNGVAVTEYDPQPAIQHWYLTSSGRRFSHVYTCAQVPARSPASARLRKEEMGALYVEEPRTQKPPILPSREAAEVLKDCIMEPPERLLYPHTSQEAPGMS

SEQ ID NO: 46490 - protein, 258 aa, Homo sapiens [sequence omitted]

SEQ ID NO: 46491 - protein, 166 aa, Homo sapiens
MQIVLGILSAVLGGFFYIRDYTLLVTSGAAIWTGAVAVLAGAAAFIYEKRGGTYWALLRTLLTLAAFSTAIAALKLWNEDFRYGYSYYNSACRISSSSDWNTPAPTQSPEEVRRLHLCTSFMDMLKALFRTLQAMLLGVWILLLLASLTPLWLYCWRMFPTKGVSP

SEQ ID NO: 46492 - protein, 637 aa, Homo sapiens
MVLSKHPHLCLVALCEAEEAPPASSTPHVVGSRFNWKLFWQFLHPHLLVLGVAVVLALGAALVNVQIPLLLGQLVEVVAKYTRDHVGSFMTESQNLSTHLLILYGVQGLLTFGYLVLLSHVGERMAVDMRRALFSSLLRQDITFFDANKTGQLVSRLTTDVQEFKSSFKLVISQGLRSCTQVAGCLVSLSMLSTRLTLLLMVATPALMGVGTLMGSGLRKLSRQCQEQIARAMGVADEALGNVRTVRAFAMEQREEERYGAELEACRCRAEELGRGIALFQGLSNIAFNCMVLGTLFIGGSLVAGQQLTGGDLMSFLVASQTVQRSMANLSVLFGQVVRGLSAGARVFEYMALNPCIPLSGGCCVPKEQLRGSVTFQNVCFSYPCRPGFEVLKDFTLTLPPGKIVALVGQSGGGKTTVASLLERFYDPTAGVVMLDGRDLRTLDPSWLRGQVVGFISQEPVLFGTTIMENIRFGKLEASDEEVYTAAREANAHEFITSFPEGYNTVVGERGTTLSGGQKQRLAIARALIKQPTVLILDEATSALDAESERVVQEALDRASAGRTVLVIAHRLSTVRGAHCIVVMADGRVWEAGTHEELLKKGGLYAELIRRQALDAPRTAAPPPKKPEGPRSHQHKS

SEQ ID NO: 46493 - protein, 350 aa, Homo sapiens
MVLSKHPHLCLVALCEAEEAPPASSTPHVVGSRFNWKLFWQFLHPHLLVLGVAVVLALGAALVNVQIPLLLGQLVEVVAKYTRDHVGSFMTESQNLSTHLLILYGVQGLLTFGYLVLLSHVGERMAVDMRRALFSSLLRQDITFFDANKTGQLVSRLTTDVQEFKSSFKLVISQGLRSCTQVAGCLVSLSMLSTRLTLLLMVATPALMGVGTLMGSGLRKLSRQCQEQIARAMGVADEALGNVRTVRAFAMEQREEERYGAELEACRCRAEELGRGIALFQGLSNIAFNCMVLGTLFIGGSLVAGQQLTGGDLMSFLVASQTVQSFLRVAPCPNSLPLQAVTFHAWKDHP

SEQ ID NO: 46494 - protein, 136 aa, Homo sapiens
MLSTRLTLLLMVATPALMGVGTLMGSGLRKLSRQCQEQIARAMGVADEALGNVRTVRAFAMEQREEERYGAELEACRCRAEELGRGIALFQGLSNIAFNCMVLGTLFIGGSLVAGQQLTGGDLMSFLVASQTVQRL

SEQ ID NO: 46495 - protein, 515 aa, Homo sapiens
MLRVLLSAQTSPARLSGLLLIPPVQPCCLGPSKWGDRPVGGGPSAGPVQGLQRLLEQAKSPGELLRWLGQNPSKVRAHHYSVALRRLGQLLGSRPRPPPVEQVTLQDLSQLIIRNCPSFDIHTIHVCLHLAVLLGFPSDGPLVCALEQERRLRLPPKPPPPLQPLLRGGQGLEAALSCPRFLRYPRQHLISSLAEARPEELTPHVMVLLAQHLARHRLREPQLLEAIAHFLVVQETQLSSKVVQKLVLPFGRLNYLPLEQQFMPCLERILAREAGVAPLATVNILMSLCQLRCLPFRALHFVFSPGFINYISGTPHALIVRRYLSLLDTAVELELPGYRGPRLPRRQQVPIFPQPLITDRARCKYSHKDIVAEGLRQLLGEEKYRQDLTVPPGYCTDFLLCASSSGAVLPVRTQDPFLPYPPRSCPQGQAASSATTRDPAQRVVLVLRERWHFCRDGRVLLGSRALRERHLGLMGYQLLPLPFEELESQRGLPQLKSYLRQKLQALGLRWGPEGG

SEQ ID NO: 46496 - protein, 570 aa, Homo sapiens
MKKAAARAVTGVLASHPNSTDVHIINLSLTFHGQELLSDTKLELNSGRRYGLIGLNGIGKSMLLSAIGKREVPIPEHIDIYHLTREMPPSDKTPLHCVMEVDTERAMLEKEAERLAHEDAECEKLMELYERLEELDADKAEMRASRILHGLGFTPAMQRKKLKDFSGGWRMRVALARALFIRPFMLLLDEPTNHLDLDACVWLEEELKTFKRILVLVSHSQDFLNGVCTNIIHMHNKKLKYYTGNYDQYVKTRLELEENQMKRFHWEQDQIAHMKNYIARFGHGSAKLARQAQSKEKTLQKMMASGLTERVVSDKTLSFYFPPCGKIPPPVIMVQNVSFKYTKDGPCIYNNLEFGIDLDTRVALVGPNGAGKSTLLKLLTGELLPTDGMIRKHSHVKIGRYHQHLQEQLDLDLSPLEYMMKCYPEIKEKEEMRKIIGRYGLTGKQQVSPIRNLSDGQKCRVCLAWLAWQNPHMLFLDEPTNHLDIETIDALADAINEFEGGMMLVSHDFRLIQQVAQEIWVCEKQTITKWPGDILAYKEHLKSKLVDEEPQLTKRTHNVCTLTLASLPRP

SEQ ID NO: 46497 - protein, 70 aa, Homo sapiens
MLVGNKKDLHMERVISYEEGKALAESWNAAFLESSAKENQTAVDVFRRIILEAEKMDGAASQGKSSCSVM

SEQ ID NO: 46498 - protein, 4006 aa, Homo sapiens
MCVVCGSFGQGAEGRLLACSQCGQCYHPYCVSIKITKVVLSKGWRCLECTVCEACGKATDPGRLLLCDDCDISYHTYCLDPPLQTVPKGGWKCKWCVWCRHCGATSAGLRCEWQNNYTQCAPCASLSSCPVCYRNYREEDLILQCRQCDRWMHAVCQNLNTEEEVENVADIGFDCSMCRPYMPASNVPSSDCCESSLVAQIVTKVKELDPPKTYTQDGVCLTESGMTQLQSLTVTVPRRKRSKPKLKLKIINQNSVAVLQTPPDIQSEHSRDGEMDDSREGELMDCDGKSESSPEREAVDDETKGVEGTDGVKKRKRKPYRPGIGGFMVRQRSRTGQGKTKRSVIRKDSSGSISEQLPCRDDGWSEQLPDTLVDESVSVTESTEKIKKRYRKRKNKLEETFPAYLQEAFFGKDLLDTSRQSKISLDNLSEDGAQLLYKTNMNTGFLDPSLDPLLSSSSAPTKSGTHGPADDPLADISEVLNTDDDILGIISDDLAKSVDHSDIGPVTDDPSSLPQPNVNQSSRPLSEEQLDGILSPELDKMVTDGAILGKLYKIPELGGKDVEDLFTAVLSPANTQPTPLPQPPPPTQLLPIHNQDAFSRMPLMNGLIGSSPHLPHNSLPPGSGLGTFSAIAQSSYPDARDKNSAFNPMASDPNNSWTSSAPTVEGENDTMSNAQRSTLKWEKEEALGEMATVAPVLYTNINFPNLKEEFPDWTTRVKQIAKLWRKASSQERAPYVQKARDNRAALRINKVQMSNDSMKRQQQQDSIDPSSRIDSELFKDPLKQRESEHEQEWKFRQQMRQKSKQQAKIEATQKLEQVKNEQQQQQQQQFGSQHLLVQSGSDTPSSGIQSPLTPQPGNGNMSPAQSFHKELFTKQPPSTPTSTSSDDVFVKPQAPPPPPAPSRIPIQDSLSQAQTSQPPSPQVFSPGSSNSRPPSPMDPYAKMVGTPRPPPVGHSFSRRNSAAPVENCTPLSSVSRPLQMNETTANRPSPVRDLCSSSTTNNDPYAKPPDTPRPVMTDQFPKSLGLSRSPVVSEQTAKGPIAAGTSDHFTKPSPRADVFQRQRIPDSYARPLLTPAPLDSGPGPFKTPMQPPPSSQDPYGSVSQASRRLSVDPYERPALTPRPIDNFSHNQSNDPYSQPPLTPHPAVNESFAHPSRAFSQPGTISRPTSQDPYSQPPGTPRPVVDSYSQSSGTARSNTDPYSQPPGTPRPTTVDPYSQQPQTPRPSTQTDLFVTPVTNQRHSDPYAHPPGTPRPGISVPYSQPPATPRPRISEGFTRSSMTRPVLMPNQDPFLQAAQNRGPALPGPLVRPPDTCSQTPRPPGPGLSDTFSRVSPSAARDPYDQSPMTPRSQSDSFGTSQTAHDVADQPRPGSEGSFCASSNSPMHSQGQQFSGVSQLPGPVPTSGVTDTQNTVNMAQADTEKLRQRQKLREIILQQQQQKKIAGRQEKGSQDSPAVPHPGPLQHWQPENVNQAFTRPPPPYPGNIRSPVAPPLGPRYAVFPKDQRGPYPPDVASMGMRPHGFRFGFPGGSHGTMPSQERFLVPPQQIQGSGVSPQLRRSVSVDMPRPLNNSQMNNPVGLPQHFSPQSLPVQQHNILGQAYIELRHRAPDGRQRLPFSAPPGSVVEASSNLRHGNFIPRPDFPGPRHTDPMRRPPQGLPNQLPVHPDLEQVPPSQQEQGHSVHSSSMVMRTLNHPLGGEFSEAPLSTSVPSETTSDNLQITTQPSDGLEEKLDSDDPSVKELDVKDLEGVEVKDLDDEDLENLNLDTEDGKVVELDTLDNLETNDPNLDDLLRSGEFDIIAYTDPELDMGDKKSMFNEELDLPIDDKLDNQCVSVEPKKKEQENKTLVLSDKHSPQKKSTVTNEVKTEVLSPNSKVESKCETEKNDENKDNVDTPCSQASAHSDLNDGEKTSLHPCDPDLFEKRTNRETAGPSANVIQASTQLPAQDVINSCGITGSTPVLSSLLANEKSDNSDIRPSGSPPPPTLPASPSNHVSSLPPFIAPPGRVLDNAMNSNVTVVSRVNHVFSQGVQVNPGLIPGQSTVNHSLGTGKPATQTGPQTSQSGTSSMSGPQQLMIPQTLAQQNRERPLLLEEQPLLLQDLLDQERQEQQQQRQMQAMIRQRSEPFFPNIDFDAITDPIMKAKMVALKGINKVMAQNNLGMPPMVMSRFPFMGQVVTGTQNSEGQNLGPQAIPQDGSITHQISRPNPPNFGPGFVNDSQRKQYEEWLQETQQLLQMQQKYLEEQIGAHRKSKKALSAKQRTAKKAGREFPEEDAEQLKHVTEQQSMVQKQLEQIRKQQKEHAELIEDYRIKQQQQCAMAPPTMMPSVQPQPPLIPGATPPTMSQPTFPMVPQQLQHQQHTTVISGHTSPVRMPSLPGWQPNSAPAHLPLNPPRIQPPIAQLPIKTCTPAPGTVSNANPQSGPPPRVEFDDNNPFSESFQERERKERLREQQERQRIQLMQEVDRQRALQQRMEMEQHGMVGSEISSSRTSVSQIPFYSSDLPCDFMQPLGPLQQSPQHQQQMGQVLQQQNIQQGSINSPSTQTFMQTNERRQVGPPSFVPDSPSIPVGSPNFSSVKQGHGNLSGTSFQQSPVRPSFTPALPAAPPVANSSLPCGQDSTITHGHSYPGSTQSLIQLYSDIIPEEKGKKKRTRKKKRDDDAESTKAPSTPHSDITAPPTPGISETTSTPAVSTPSELPQQADQESVEPVGPSTPNMAAGQLCTELENKLPNSDFSQATPNQQTYANSEVDKLSMETPAKTEEIKLEKAETESCPGQEEPKLEEQNGSKVEGNAVACPVSSAQSPPHSAGAPAAKGDSGNELLKHLLKNKKSSSLLNQKPEGSICSEDDCTKDNKLVEKQNPAEGLQTLGAQMQGGFGCGNQLPKTDGGSETKKQRSKRTQRTGEKAAPRSKKRKKDEEEKQAMYSSTDTFTHLKQVRQLSLLPLMEPIIGVNFAHFLPYGSGQFNSGNRLLGTFGSATLEGVSDYYSQLIYKQNNLSNPPTPPASLPPTPPPMACQKMANGFATTEELAGKAGVLVSHEVTKTLGPKPFQLPFRPQDDLLARALAQGPKTVDVPASLPTPPHNNQEELRIQDHCGDRDTPDSFVPSSSPESVVGVEVSRYPDLSLVKEEPPEPVPSPIIPILPSTAGKSSESRRNDIKTEPGTLYFASPFGPSPNGPRSGLISVAITLHPTAAENISSVVAAFSDLLHVRIPNSYEVSSAPDVPSMGLVSSHRINPGLEYRQHLLLRGPPPGSANPPRLVSSYRLKQPNVPFPPTSNGLSGYKDSSHGIAESAALRPQWCCHCKVVILGSGVRKSFKDLTLLNKDSRESTKRVEKDIVFCSNNCFILYSSTAQAKNSENKESIPSLPQSPMRETPSKAFHQYSNNISTLDVHCLPQLPEKASPPASPPIAFPPAFEAAQVEAKPDELKVTVKLKPRLRAVHGGFEDCRPLNKKWRGMKWKKWSIHIVIPKGTFKPPCEDEIDEFLKKLGTSLKPDPVPKDYRKCCFCHEEGDGLTDGPARLLNLDLDLWVHLNCALWSTEVYETQAGALINVELALRRGLQMKCVFCHKTGATSGCHRFRCTNIYHFTCAIKAQCMFFKDKTMLCPMHKPKGIHEQELSYFAVFRRVYVQRDEVRQIASIVQRGERDHTFRVGSLIFHTIGQLLPQQMQAFHSPKALFPVGYEASRLYWSTRYANRRCRYLCSIEEKDGRPVFVIRIVEQGHEDLVLSDISPKGVWDKILEPVACVRKKSEMLQLFPAYLKGEDLFGLTVSAVARIAESLPGVEACENYTFRYGRNPLMELPLAVNPTGCARSEPKMSAHVKRPHTLNSTSTSKSFQSTVTGELNAPYSKQFVHSKSSQYRKMKTEWKSNVYLARSRIQGLGLYAARDIEKHTMVIEYIGTIIRNEVANRKEKLYESQNRGVYMFRMDNDHVIDATLTGGPARYINHSCAPNCVAEVVTFERGHKIIISSSRRIQKGEELCYDYKFDFEDDQHKIPCHCGAVNCRKWMN

SEQ ID NO: 46499 - protein, 241 aa, Homo sapiens [sequence omitted]

SEQ ID NO: 46500 - protein, 979 aa, Homo sapiens
METLELQKDIKEESDEEEEDDEESGRLRFKTERKEGTIIRLSDVTRERRNIPETLELSAEAKAALLEFEERERQHKQGRYSSRRGGRRGGPLMCRGVGDQRRESTERGRMKDHRPALLPTQPPVVPQAPPPPPPPPQQQPIRSLFQPQPLQPLLPVQHPHHPSPPQGMHMPPQLETPRMMMTPPPVTPQQPKNIHINPHFKGTVVTPVQVPLLPVPSQPRPAVGPQRFPGPPEFPQHTPGPVPNSFSQPPRLPLQDQWRAPPPPQDRDPFFLGVSGEPRFPSHLFLEQRSPPPPPPPPTLLNSSHPVPTQSPLPFTQPGPAFNQQGQQPVFPRERPVRPALQPPGPVGILHFSQPGSATTRPFIPPRQPFLPGPGQPFLPTHTQPNLQGPLHPPLPPPHQPQPQQPQQQPPPQHQPPHQPPHQPPPQHQPPPQHPPQHPPQHQHHHHHHHLSVPPPPLMPMSQPQFRPHVQTAQPQASSSRMQCPQRQGLRHNTTSQNVSKRPMQQMQPTAPRNSNLRELPIAPSHVIEMSSSRCSATPSAQVKPIVSASPPSRAVAGSRSSQGKTEVKVKPASPVAQPKEEAKTETEFPDEDEETRLYRLKIEEQKRLREEILKQKELRRQQQAGARKKELLERLAQQQQQLYAPPPPAEQEEQALSPSPTNGNPLLPFPGAQVRQNVKNRLLVKNQDVSISNVQPKTSNFVPSSANMQYQGQQMKALKHLRQTRTVPQSQTQPLHKVLPIKPADVEEPAVPQTPRVASIQGRPQDTKPGVKRTVTHRTNSGGGDGPHISSKVRVIKLSGGGGESDGFFHPEGQPQRLPQPPEVGPQPARKVTLTRGGLQQPPHLPAGPHAHSPVPPGIKSIQGIHPAKKAIMHGRGRGVAGPMGRGRLMPNKQNLRVVECKPQPCVVSVEGLSSSTTDAQLKSLLMSVGPIQSLQMLPQQRKAIAKFKEPAHALAFQQKFHRHMIDLSHINVALIVE

SEQ ID NO: 46501 - protein, 338 aa, Homo sapiens
MLLLLALLILGIVWVASALIDNDAASMESLYDLWEFYLPYLYSCISLMGCLLLLLCTPVGLSRMFTVMGQLLVKPTILEDLDEQIYIITLEEEALQRRLNGLSSSVEYNIMELEQELENVKTLKTKLERRKKASAWERNLVYPAVMVLLLIETSISVLLVACNILCLLVDETAMPKGTRGPGIGNASLSTFGFVGAALEIILIFYLMVSSVVGFYSLRFFGNFTPKKDDTTMTKIIGNCVSILVLSSALPVMSRTLGITRFDLLGDFGRFNWLGNFYIVLSYNLLFAIVTTLCLVRKFTSAVREELFKALGLHKLHLPNTSRDSETAKPSVNGHQKAL

SEQ ID NO: 46502 - protein, 936 aa, Homo sapiens [sequence omitted]

SEQ ID NO: 46503 - protein, 130 aa, Homo sapiens [sequence omitted]

SEQ ID NO: 46504 - protein, 45 aa, Homo sapiens [sequence omitted]

SEQ ID NO: 46505 - protein, 138 aa, Homo sapiens
MVNGRKITTKRIVENGQERVEVEEDGQLKSLTINGVADDDALAEERMRRGQNALPAQPAGLRPPKPPRPASLLRHAPHCLSEEEGEQDRPRAPGPWDPLASAAGVQREAAVEQAQSETSLGARGQRGHKPRLGCCVLT

SEQ ID NO: 46506 - protein, 717 aa, Homo sapiens [sequence omitted]

SEQ ID NO: 46507 - protein, 579 aa, Homo sapiens
MRSTKLLRLIDLDFSFTFSLLDLPPVNEYDMYIRNFGKKNTKQAYVQCNEDNVERDIQTEEIETREVWTQHPGESTVVSGGSEQRDTSDAVVMPKIDTPRLCSFLRAACQVMAVLLEEDRLAAEPSWNLRAQDRALYFSDSSSQLNTSLPFLQNRKVSSLHTSRVQRQMVVSVHDLPEKSFVPLLDSKYVLCVWDIWQPSGPQKVLICESQVTCCCLSPLKAFLLFAGTAHGSVVVWDLREDSRLHYSVTLSDGFWTFRTATFSTDGILTSVNHRSPLQAVEPISTSVHKKQSFVLSPFSTQEEMSGLSFHIASLDESGVLNVWVVVELPKADIAGSISDLGLMPGGRVKLVHSALIQLGDSLSHKGNEFWGTTQTLNVKFLPSDPNHFIIGTDMGLISHGTRQDLRVAPKLFKPQQHGIRPVKVNVIDFSPFGEPIFLAGCSDGSIRLHQLSSAFPLLQWDSSTDSHAVTGLQWSPTRPAVFLVQDDTSNIYIWDLLQSDLGPVAKQQVSPNRLVAMAAVGEPEKAGGSFLALVLARASGSIDIQHLKRRWAAPEVDECNRLRLLLQEALWPEGKLHK

SEQ ID NO: 46508 - protein, 119 aa, Homo sapiens
MSTPFTCVSWMLLKAGWSESLFWKLNQWLMIHMFHCRMVLTYHMWWVCFWHWDGLVSSLYLPHLTLFLVGLALLTLIINPYWTHKKTQQLLNPVDWNFAQPEAKSRPEGNGQLLRKKRP

SEQ ID NO: 46509 - protein, 1345 aa, Homo sapiens
MDQREPLPPAPAENEMKYDTNNNEEEEGEQFDFDSGDEIPEADRQAPSAPETGGAGASEAPAPTGGEDGAGAETTPVAEPTKLVLPMKVNPYSVIDITPFQEDQPPTPVPSAEEENVGLHVPCGYLVPVPCGYAVPSNLPLLLPAYSSPVIICATSLDEEAETPEVTEDRQPNSLSSEEPPTSEDQVGREDSALARWAADPANTAWMENPEEAIYDDVPRENSDSEPDEMIYDDVENGDEGGNSSLEYGWSSSEFESYEEQSDSECKNGIPRSFLRSNHKKQLSHDLTRLKEHYEKKMRDLMASTVGVVEIQQLRQKHELKMQKLVKAAKDGTKDGLERTRAAVKRGRSFIRTKSLIAQDHRSSLEEEQNLFIDVDCKHPEAILTPMPEGLSQQQVVRRYILGSVVDSEKNYVDALKRILEQYEKPLSEMEPKVLSERKLKTVFYRVKEILQCHSLFQIALASRVSEWDSVEMIGDVFVASFSKSMVLDAYSEYVNNFSTAVAVLKKTCATKPAFLEFLKQEQEASPDRTTLYSLMMKPIQRFPQFILLLQDMLKNTSKGHPDRLPLQMALTELETLAEKLNERKRDADQRCEVKQIAKAINERYLNKLLSSGSRYLIRSDDMIETVYNDRGEIVKTKERRVFMLNDVLMCATVSSRPSHDSRVMSSQRYLLKWSVPLGHVDAIEYGSSAGTGEHSRHLAVHPPESLAVVANAKPNKVYMGPGQLYQDLQNLLHDLNVIGQITQLIGNLKGNYQNLNQSVAHDWTSGLQRLILKKEDEIRAADCCRIQLQLPGKQDKSGRPTFFTAVFNTFTPAIKESWVNSLQMAKLALEEENHMGWFCVEDDGNHIKKEKHPLLVGHMPVMVAKQQEFKIECAAYNPEPYLNNESQPDSFSTAHGFLWIGSCTHQMGQIAIVSFQNSTPKVIECFNVESRILCMLYVPVEEKRREPGAPPDPETPAVRASDVPTICVGTEEGSISIYKSSQGSKKVRLQHFFTPEKSTVMSLACTSQSLYAGLVNGAVASYARAPDGSWDSEPQKVIKLGVLPVRSLLMMEDTLWAASGGQVFIISVETHAVEGQLEAHQEEGMVISHMAVSGVGIWIAFTSGSTLRLFHTETLKHLQDINIATPVHNMLPGHQRLSVTSLLVCHGLLMVGTSLGVLVALPVPRLQGIPKVTGRGMVSYHAHNSPVKFIVLATALHEKDKDKSRDSLAPGPEPQDEDQKDALPSGGAGSSLSQGDPDAAIWLGDSLGSMTQKSDLSSSSGSLSLSHGSSSLEHRSEDSTIYDLLKDPVSLRSKARRAKKAKASSALVVCGGQGHRRVHRKARQPHQEELAPTVMVWQIPLLNI

SEQ ID NO: 46510 - protein, 353 aa, Homo sapiens [sequence omitted]

SEQ ID NO: 46511 - protein, 1246 aa, Homo sapiens
MVGLHNLEPRGERNIAFHPVSFPEEKAVHKEKPSFPYQDRPSTQESFRQKLAAFAGTTSGCHQGPGPLRESLPSEDDSDQRCSPSGDSEGGEYCSILDCCPGSPVAKAASQTAGSRGRHGGRDCSPTCWEQGKCSGPAEQEKRGPSFPKECCSQGPTAHPSCLGPKKLSLTSEAAISSDGLSCGSGSGSGSGASSPFVPHLESDYCSLMKEPAPEKQQDPGCPGVTPSRCLGLTGEPQPPAHPREATQPEPIYAESTKRKKAAPVPSKSQAKIEHAAAAQGQGQVCTGNAWAQKAASGWGRDSPDPTPQVSATITVMAAHPEEDHRTIYLSSPDSAVGVQWPRGPVSQNSEVGEEETSAGQGLSSRESHAHSASESKPKERPAIPPKLSKSSPVGSPVSPSAGGPPVSPLADLSDGSSGGSSIGPQPPSQGPADPAPSCRTNGVAISDPSRCPQPAASSASEQRRPRFQAGTWSRQCRIEEEEEVEQELLSHSWGRETKNGPTDHSNSTTWHRLHPTDGSSGQNSKVGTGMSKSASFAFEFPKDRSGIETFSPPPPPPKSRHLLKMNKSSSDLEKVSQGSAESLSPSFRGVHVSFTTGSTDSLASDSRTCSDGGPSSELAHSPTNSGKKLFAPVPFPSGSTEDVSPSGPQQPPPLPQKKIVSRAASSPDGFFWTQGSPKPGTASPKLNLSHSETNVHDESHFSYSLSPGNRHHPVFSSSDPLEKAFKGSGHWLPAAGLAGNRGGCGSPGLQCKGAPSASSSQLSVSSQASTGSTQLQLHGLLSNISSKEGTYAKLGGLYTQSLARLVAKCEDLFMGGQKKELHFNENNWSLFKLTCNKPCCDSGDAIYYCATCSEDPGSTYAVKICKAPEPKTVSYCSPSVPVHFNIQQDCGHFVASVPSSMLSSPDAPKDPVPALPTHPPAQEQDCVVVITREVPHQTASDFVRDSAASHQAEPEAYERRVCFLLLQLCNGLEHLKEHGIIHRDLCLENLLLVHCTLQAGPGPAPAPAPAPAPAAAAPPCSSAAPPAGGTLSPAAGPASPEGPREKQLPRLIISNFLKAKQKPGGTPNLQQKKSQARLAPEIVSASQYRKFDEFQTGILIYELLHQPNPFEVRAQLRERDYRQEDLPPLPALSLYSPGLQQLAHLLLEADPIKRIRIGEAKRVLQCLLWGPRRELVQQPGTSEEALCGTLHNWIDMKRALMMMKFAEKAVDRRRGVELEDWLCCQYLASAEPGALLQSLKLLQLL

SEQ ID NO: 46512 - protein, 387 aa, Homo sapiens [sequence omitted]

SEQ ID NO: 46513 - protein, 288 aa, Homo sapiens
MSYLKRLCGTFLGGPKPPQRVMFTEDLKLPASFDAREQWPQCPTIKEIRDQGSCGSCWAFGAVEAISDRICIHTNAHVSVEVSAEDLLTCCGSMCGDGCNGGYPAEAWNFWTRKGLVSGGLYESHVGCRPYSIPPCEHHVNGSRPPCTGEGDTPKCSKICEPGYSPTYKQDKHYGYNSYSVSNSEKDIMAEIYKNGPVEGAFSVYSDFLLYKSGVYQHVTGEMMGGHAIRILGWGVENGTPYWLVANSWNTDWGDNGFFKILRGQDHCGIESEVVAGIPRTDQYWEKI

SEQ ID NO: 46514 - protein, 147 aa, Homo sapiens
MNEQGEYPPGTSTWQFNFKFNLTEDMYAQDSIELLTTSGIQFKKHEEEGIETQYFAELLMTSGVVLCEGVKWLSFHSGYDFGYLIKILTNSNLPEEELDFFEILRLFFPVIYDVKYLMKSCKNLKVRLRMALSTAAHCSDQVTVMRA

SEQ ID NO: 46515 - protein, 815 aa, Homo sapiens
MNNGRKGAVCVQEPSCPLASLGSSAVTCHSAGSVGFLKEQRSALGREHPGGCDRSSSMGRPGRVKHVEFQGVEILWTGGDKRETQHPIDFETSLQRTASPDSKESSKVPRHLISSAGLCNSSSLTENVWDESWKAPSERPGTSSGTFSPVRLDESGEDEVFLQENKQHLEKTPKPERDRERISEQEEHVKGEDEDILGPGYTEDSTDVYSSQFETILDNTSLYYSAESLETLYSEPDSYFSFEMPLTPMIQQRIKEGGQFLERTSGGGHQDILSVSADGGIVMGYSSGVTNGLNDASDSIYTKGTPEIAFWGSNAGVKTTRLEAHSEMGSTEILEKETPENLSNGTSSNVEAAKRLAKRLYQLDRFKRSDVAKHLGKNNEFSKLVAEEYLKFFDFTGMTLDQSLRYFFKAFSLVGETQERERVLIHFSNRYFYCNPDTIASQDGVHCLTCAIMLLNTDLHGHNIGKKMTCQEFIANLQGVNEGVDFSKDLLKALYNSIKNEKLEWAVDDEEKKKSPSESTEEKANGTHPKTISRIGSTTNPFLDIPHDPNAAVYKSGFLARKIHADMDGKKTPRGKRGWKTFYAVLKGTVLYLQKDEYKPEKALSEEDLKNAVSVHHALASKATDYEKKPNVFKLKTADWRVLLFQTQSPEEMQGWINKINCVAAVFSAPPFPAAIGSQKKFSRPLLPATTTKLSQEEQLKSHESKLKQITTELAEHRSYPPDKKVKAKDVDEYKLKDHYLEFEKTRYEMYVSILKEGGKELLSNDESEAAGLKKSHSSPSLNPDTSPITAKVKRNVSERKDHRPETPSIKQKVT

SEQ ID NO: 46516 - protein, 275 aa, Homo sapiens
MANTLINVIVPLAKRVDKFRQFMQNFREMCIEQDGRVHLTVVYFGKEEINEVKGILENTSKAANFRNFTFIQLNGEFSRGKGLDVGARFWKGSNVLLFFCDVDIYFTSEFLNTCRLNTQPGKKVFYPVLFSQYNPGIIYGHHDAVPPLEQQLVIKKETGFWRDFGFGMTCQYRSDFINIGGFDLDIKGWGGEDVHLYRKYLHSNLIVVRTPVRGLFHLWHEKRCMDELTPEQYKMCMQSKAMNEASHGQLGMLVFRHEIEAHLRKQKQKTSSKKT

SEQ ID NO: 46517 - protein, 832 aa, Homo sapiens
MRHWEKHTCVTFLERTDEDSYIVFTYRPCGCCSYVGRRGGGPQAISIGKNCDKFGIVVHELGHVVGFWHEHTRPDRDRHVSIVRENIQPGQEYNFLKMEPQEVESLGETYDFDSIMHYARNTFSRGIFLDTIVPKYEVNGVKPPIGQRTRLSKGDIAQARKLYKCPACGETLQDSTGNFSSPEYPNGYSAHMHCVWRISVTPGEKIILNFTSLDLYRSRLCWYDYVEVRDGFWRKAPLRGRFCGSKLPEPIVSTDSRLWVEFRSSSNWVGKGFFAVYEAICGGDVKKDYGHIQSPNYPDDYRPSKVCIWRIQVSEGFHVGLTFQSFEIERHDSCAYDYLEVRDGHSESSTLIGRYCGYEKPDDIKSTSSRLWLKFVSDGSINKAGFAVNFFKEVDECSRPNRGGCEQRCLNTLGSYKCSCDPGYELAPDKRRCEAACGGFLTKLNGSITSPGWPKEYPPNKNCIWQLVAPTQYRISLQFDFFETEGNDVCKYDFVEVRSGLTADSKLHGKFCGSEKPEVITSQYNNMRVEFKSDNTVSKKGFKAHFFSDKDECSKDNGGCQQDCVNTFGSYECQCRSGFVLHDNKHDCKEAGCDHKVTSTSGTITSPNWPDKYPSKKECTWAISSTPGHRVKLTFMEMDIESQPECAYDHLEVFDGRDAKAPVLGRFCGSKKPEPVLATGSRMFLRFYSDNSVQRKGFQASHATECGGQVRADVKTKDLYSHAQFGDNNYPGGVDCEWVIVAEEGYGVELVFQTFEVEEETDCGYDYMELFDGYDSTAPRLGRYCGSGPPEEVYSAGDSVLVKFHSDDTITKKGFHLRYTSTKFQDTLHSRK

SEQ ID NO: 46518 - protein, 576 aa, Homo sapiens [sequence omitted]

SEQ ID NO: 46519 - protein, 35 aa, Homo sapiens
MRHWEKHTCVTFLERTDEDSYIVFTYRPCGSGPPP

SEQ ID NO: 46520 - protein, 421 aa, Homo sapiens
MGASVPTNPPPPLCHSGPPPSGRTELVLSSPHCARPRTGDPSPCPTPSHFDGVCDISCCEVKEGPLRPAPFSCSLLVHVSIFPLVHLSSKQVMVTHAGPLGPPSSSPHSWALLSWSCWMQCPFGPPCRLASHSRPPGLASSASCCSVPVGESPARPPLPLGHPNLSPAQTQRLPLFAPLQTRTSAPRITAAASRTASTRSAVMSANAAVASSSMTTSTTAKKTFMEMDIESQPECAYDHLEVFDGRDAKAPVLGRFCGSKKPEPVLATGSRMFLRFYSDNSVQRKGFQASHATECGGQVRADVKTKDLYSHAQFGDNNYPGGVDCEWVIVAEEGYGVELVFQTFEVEEETDCGYDYMELFDGYDSTAPRLGRYCGSGPPEEVYSAGDSVLVKFHSDDTITKKGFHLRYTSTKFQDTLHSRK

SEQ ID NO: 46521 - protein, 882 aa, Homo sapiens
MLPSGRGILGRGLSANLVRKDREELSPTFWDPKVLAAGDSKMAETSVGWSRTLGRGSSDASLLPLGRAAGGISREVDKPPCTFSTPSRGPPQLSSPPALPQSPLHSPDRPLVLTVEHKEKELIVKQGSKGTPQSLGLNLVKIQCHNEAVYQYHVTFSPNVECKSMRFGMLKDHQAVTGNVTAFDGSILYLPVKLQQVLELKSQRKTDSAEISIKIQMTKILEPCSDLCIPFYNVVFRRVMKLLDMKLVGRNFYDPTSAMVLQQHRLQIWPGYAASIRRTDGGLFLLADVSHKVIRNDCVLDVMHAIYQQNKEHFQDECTKLLVGNIVITRYNNRTYRIDDVDWNKTPKDSFTMSDGKEITFLEYYSKNYGITVKEEDQPLLIHRPSERQDNHGMLLKGEILLLPELSFMTGIPEKMKKDFRAMKDLAQQINLSPKQHHSALECLLQRIAKNEAATNELMRWGLRLQKDVHKIEGRVLPMERINLKNTSFITSQELNWVKEVTRDPSILTIPMHFWALFYPKRAMDQARELVNMLEKIAGPIGMRMSPPAWVELKDDRIETYVRTIQSTLGAEGKIQMVVCIIMGPRDDLYGAIKKLCCVQSPVPSQVVNVRTIGQPTRLRSVAQKILLQINCKLGGELWGVDIPLKQLMVIGMDVYHDPSRGMRSVVGFVASINLTLTKWYSRVVFQMPHQEIVDSLKLCLVGSLKKFYEVNHCLPEKIVVYRDGVSDGQLKTVANYEIPQLQKCFEAFENYQPKMVVFVVQKKISTNLYLAAPQNFVTPTPGTVVDHTITSCEWVDFYLLAHHVRQGCGIPTHYVCVLNTANLSPDHMQRLTFKLCHMYWNWPGTIRVPAPCKYAHKLAFLSGHILHHEPAIQLCENLFFL

SEQ ID NO: 46522 - protein, 522 aa, Homo sapiens
MFQQIHRKMPDLQLDWTFEEPPRDPRHLGAQQRPAHRPGPATSSSGRSWDHSEELPRSTFNYRPGAFSTVLQPSNQVLRRREKVDNVWTEESWNQFLQELETGQRPKKPLVDDPGEKPSQPIEVLLERELAELSAELDKDLRAIETRLPSPKSSPAPRRAPEQRPPAGPASAWSSSYPHAPYLGSARSLSPHKMADGGSPFLGRRDFVYPSSTRDPSASNGGGSPARREEKKRKAARLKFDFQAQSPKELTLQKGDIVYIHKEVDKNWLEGEHHGRLGIFPANYVEVLPADEIPKPIKPPTYQVLEYGEAVAQYTFKGDLEVELSFRKGEHICLIRKVNENWYEGRITGTGRQGIFPASYVQVSREPRLRLCDDGPQLPTSPRLTAAARSARHPSSPSALRSPADPIDLGGQTSPRRTGFSFPTQEPRPQTQNLGTPGPALSHSRGPSHPLDLGTSSPNTSQIHWTPYRAMYQYRPQNEDELELREGDRVDVMQQCDDGWFVGVSRRTQKFGTFPGNYVAPV

SEQ ID NO: 46523 - protein, 325 aa, Homo sapiens
MVTKVAERGKAKDADLRPGDIIVAINGESAEGMLHAEAQSKIRQSPSPLRLQLDRSQATSPGQTNGDSSLEVLATRFQGSVRTYTESQSSLRSSYSSPTSLSPRAGSPFSPPPSSSSLTGEAAISRSFQSLACSPGLPAADRLSYSGRPGSRQAGLGRAGDSAVLVLPPSPGPRSSRPSMDSEGGSLLLDEDSEVFKMLQENREGRAAPRQSSSFRLLQEALEAEERGGTPAFLPSSLSPQSSLPASRALATPPKLHTCEKCSTSIANQAVRIQEGRYRHPGCYTCADCGLNLKMRGHFWVGDELYCEKHARQRYSAPATLSSRA

SEQ ID NO: 46524 - protein, 289 aa, Homo sapiens
MCRKCRTGCPRGMVKVGDCTPWSDIECVHKESGTKHSGEVPAVEETVTSSPGTPASPCSLSGIIIGVTVAAVVLIVAVFVCKSLLWKKVLPYLKGICSGGGGDPERVDRSSQRPGAEDNVLNEIVSILQPTQVPEQEMEVQEPAEPTGVNMLSPGESEHLLEPAEAERSQRRRLLVPANEGDPTETLRQCFDDFADLVPFDSWEPLMRKLGLMDNEIKVAKAEAAGHRDTLYTMLIKWVNKTGRDASVHTLLDALETLGERLAKQKIEDHLLSSGKFMYLEGNADSAMS

SEQ ID NO: 46525 - protein, 260 aa, Homo sapiens
MCRKCRTGCPRGMVKVGDCTPWSDIECVHKESGIIIGVTVAAVVLIVAVFVCKSLLWKKVLPYLKGICSGGGGDPERVDRSSQRPGAEDNVLNEIVSILQPTQVPEQEMEVQEPAEPTGVNMLSPGESEHLLEPAEAERSQRRRLLVPANEGDPTETLRQCFDDFADLVPFDSWEPLMRKLGLMDNEIKVAKAEAAGHRDTLYTMLIKWVNKTGRDASVHTLLDALETLGERLAKQKIEDHLLSSGKFMYLEGNADSAMS

SEQ ID NO: 46526 - protein, 582 aa, Homo sapiens [sequence omitted]

SEQ ID NO: 46527 - protein, 271 aa, Homo sapiens [sequence omitted]

SEQ ID NO: 46528 - protein, 1007 aa, Homo sapiens [sequence omitted]

SEQ ID NO: 46529 - protein, 167 aa, Homo sapiens
MNSSNGNDNGNGKNGGLEHVPSSSSIHNGDMEKILLDAQHESGQSSSRGSSHCDSPSPQEDGQIMFDVEMHTSRDHSSQSEEEVVEGEKEVEALKKSADWVSDWSSRPENIPPKEFHFRHPKRSVSLSMRKSGAMKKGGIFSAEFLKVFIPSLFLSHVLALGLGCGN

SEQ ID NO: 46530 - protein, 352 aa, Homo sapiens
MSVDEQKSLMVTGIPADFEEAEIQEVLQETLKSLGRYRLLGKIFRKQENANAVLLELLEDTDVSAIPSEVQGKGGVWKVIFKTPNQDTEFLERLNLFLEKEGQTVSGMFRALGQEGVSPATVPCISPELLAHLLGQAMAHAPQPLLPMRYRKLRVFSGSAVPAPEEESFEVWLEQATEIVKEWPVTEAEKKRWLAESLRGPALDLMHIVQADNPSISVEECLEAFKQVFGSLESRRTAQVRYLKTYQEEGEKVSAYVLRLETLLRRAVEKRAIPRRIADQVRLEQVMAGATLNQMLWCRLRELKDQGPPPSFLELMKVIREEEEEEASFENESIEEPEERDGYGRWNHEGDD

SEQ ID NO: 46531 - protein, 984 aa, Homo sapiens [sequence omitted]

SEQ ID NO: 46532 - protein, 580 aa, Homo sapiens
MPTFPCTQKGRPGPRCSRCQKNLSLHTSVRILYLFLALLLVAVAVLASLVFRKVDSLSEDISLTQSIYDKKLVLMQKNLQGLDPKALNNCSFCHEAGQLGPEIRKLQEELEGIQKLLLAQEVQLDQTLQAQEVLSTTSRQISQEMGSCSFSIHQVNQSLGLFLAQVRGWQATTAGLDLSLKDLTQECYDVKAAVHQINFTVGQTSEWIHGIQRKTDEETLTLQKIVTDWQNYTRLFSGLRTTSTKTGEAVKNIQATLGASSQRISQNSESMHDLVLQVMGLQLQLDNISSFLDDHEENMHDLQYHTHYAQNRTVERFESLEGRMASHEIEIGTIFTNINATDNHVHSMLKYLDDVRLSCTLGFHTHAEELYYLNKSVSIMLGTTDLLRERFSLLSARLDLNVRNLSMIVEEMKAVDTQHGEILRNVTILRGAPGPPGPRGFKGDMGVKGPVGGRGPKGDPGSLGPLGPQGPQGQPGEAGPVGERGPVGPRGFPGLKGSKGSFGTGGPRGQPGPKGDIGPPGPEGPPGSPGPSGPQGKPGIAGKTGSPGQRGAMGPKGEPGIQGPPGLPGPPGPPGSQSFY

SEQ ID NO: 46533 - protein, 440 aa, Homo sapiens
MPTFPCTQKGRPGPRCSRCQKNLSLHTSVRILYLFLALLLVAVAVLASLVFRKVDSLSEDISLTQSIYDKKLVLMQKNLQGLDPKALNNCSFCHEAGQLGPEIRKLQEELEGIQKLLLAQEVQLDQTLQAQEVLSTTSRQISQEMGSCSFSIHQVNQSLGLFLAQVRGWQATTAGLDLSLKDLTQECYDVKAAVHQINFTVGQTSEWIHGIQRKTDEETLTLQKIVTDWQNYTRLFSGLRTTSTKTGEAVKNIQATLGASSQRISQNSESMHDLVLQVMGLQLQLDNISSFLDDHEENMHDLQYHTHYAQNRTVERFESLEGRMASHEIEIGTIFTNINATDNHVHSMLKYLDDVRLSCTLGFHTHAEELYYLNKSVSIMLGTTDLLRERFSLLSARLDLNVRNLSMIVEEMKAVDTQHGEILRNVTILRGHTLFSHNRI

SEQ ID NO: 46534 - protein, 288 aa, Homo sapiens [sequence omitted]

SEQ ID NO: 46535 - protein, 490 aa, Homo sapiens [sequence omitted]

SEQ ID NO: 46536 - protein, 36 aa, Homo sapiens
MTPSGFGWLWGRGPRGGLALSVVAASSLATMANAEI

SEQ ID NO: 46537 - protein, 532 aa, Homo sapiens [sequence omitted]

SEQ ID NO: 46538 - protein, 414 aa, Homo sapiens
MEGQVTVWLLEQKLQVCCRVEEVWLAELQGPCPQAPPLEPGAQALAYRPVSRNIDVPKRKSDAVEMDEMMAAMVLTSLSCSPVVQSPPGTEANFSASRAACDPWKESGDISDSGSSTTSGHWSGSSGVSTPSPPHPQASPKYLGDAFGSPQTDHGFETDPDPFLLDEPAPRKRKNSVKVMYKCLWPNCGKVLRSIVGIKRHVKALHLGDTVDSDQFKREEDFYYTEVQLKEESAAAAAAAAAGTPVPGTPTSEPAPTPSMTGLPLSALPPPLHKAQSSGPEHPGPESSLPSGALSKSAPGSFWHIQADHAYQALPSFQIPVSPHIYTSVSWAAAPSAACSLSPVRSRSLSFSEPQQPAPAMKSHLIVTSPPRAQSGARKARGEAKKCRKVYGIEHRDQWCTACRWKKACQRFLD

SEQ ID NO: 46539 - protein, 900 aa, Homo sapiens [sequence omitted]

SEQ ID NO: 46540 - protein, 289 aa, Homo sapiens
MSPTRYHANSMGQRSYSFEASEEDLDVDDKVEELMRRDSSVIKEEIKAFLANRRISQAVVAQVTGISQSRISHWLLQQGSDLSEQKKRAFYRWYQLEKTNPGATLSMRPAPIPIEDPEWRQTPPPVSATSGTFRLRRGSRFTWRKECLAVMESYFNENQYPDEAKREEIANACNAVIQKPGKKLSDLERVTSLKVYNWFANRRKEIKRRANIEAAILESHGIDVQSPGGHSNSDDVDGNDYSEQDDSTSHSDHQDPISLAVEMAAVNHTILALARQGANEIKTEALDDD

SEQ ID NO: 46541 - protein, 312 aa, Homo sapiens
MSPTRYHANSMGQRSYSFEASEEDLDVDDKVEELMRRDSSVIKEEIKAFLANRRISQAVVAQVTGISQSRISHWLLQQGSDLSEQKKRAFYRWYQLEKTNPGATLSMRPAPIPIEDPEWRQTPPPVSATSGTFRLRRGSRFTWRKECLAVMESYFNENQYPDEAKREEIANACNAVIQKPGKKLSDLERVTSLKVYNWFANRRKEIKRRANIAAILESHGIDVQSPGGHSNSDDVDGNDYSEQDTWQVRNGEEEEGRSSEGGREAEKDDSTSHSDHQDPISLAVEMAAVNHTILALARQGANEIKTEALDDD

SEQ ID NO: 46542 - protein, 274 aa, Homo sapiens
MSPTRYHANSMGQRSYSFEASEEDLDVDDKVEELMRRDSSVIKEEIKAFLANRRISQAVVAQVTGISQSRISHWLLQQGSDLSEQKKRAFYRWYQLEKTNPGATLSMRPAPIPIEDPEWRQTPPPVSATSGTFRLRRGSRFTWRKECLAVMESYFNENQYPDEAKREEIANACNAVIQKPGKKLSDLERVTSLKVYNWFANRRKEIKRRANIAAILESHGIDVQSPGGHSNSDDVDGNDYSEQDTWQVRNGEEEEGRSSEGGREAEKVEEERRI

SEQ ID NO: 46543 - protein, 1812 aa, Homo sapiens [sequence omitted]

SEQ ID NO: 46544 - protein, 113 aa, Homo sapiens
MFLMLGCALPIYNKYWPLFVLFFYILSPIPYCIARRLVDDTDAMSNACKELAIFLTTGIVVSAFGLPIVFARAHLIEWGACALVLTGNTVIFATILGFFLVFGSNDDFSWQQW

SEQ ID NO: 46545 - protein, 75 aa, Homo sapiens
MAKNKLVGTPNPSTPLPNTVPQFIAREPYELTVPALYPSSPEVWAPYPLYPAELAPALPPPAFTYPASLHAQETL

SEQ ID NO: 46546 - protein, 479 aa, Homo sapiens
MACRQEPQPQGPPPAAGAVASYDYLVIGGGSGGLASARRAAELGARAAVVESHKLGGTCVNVGCVPKKVMWNTAVHSEFMHDHADYGFPSCEGKFNWRVIKEKRDAYVSRLNAIYQNNLTKSHIEIIRGHAAFTSDPKPTIEVSGKKYTAPHILIATGGMPSTPHESQIPGASLGITSDGFFQLEELPGRSVIVGAGYIAVEMAGILSALGSKTSLMIRHDKVLRSFDSMISTNCTEELENAGVEVLKFSQVKEVKKTLSGLEVSMVTAVPGRLPVMTMIPDVDCLLWAIGRVPNTKDLSLNKLGIQTDDKGHIIVDEFQNTNVKGIYAVGDVCGKALLTPVAIAAGRKLAHRLFEYKEDSKLDYNNIPTVVFSHPPIGTVGLTEDEAIHKYGIENVKTYSTSFTPMYHAVTKRKTKCVMKMVCANKEEKVVGIHMQGLGCDEMLQGFAVAVKMGATKADFDNTVAIHPTSSEELVTLR

SEQ ID NO: 46547 - protein, 150 aa, Homo sapiens [sequence omitted]

SEQ ID NO: 46548 - protein, 227 aa, Homo sapiens
MGDYVDRGYYSVETVTLLVALKVRYPERITILRGNHESRQITQVYGFYDECLRKYGNANVWKYFTDLFDYLPLTALVDGQIFCLHGGLSPSIDTLDHIRALDRLQEVPHEGPMCDLLWSDPDDRGGWGISPRGAGYTFGQDISETFNHANGLTLVSRAHQLVMEGYNWCHDRNVVTIFSAPNYCYRCGNQAAIMELDDTLKYSFLQFDPAPRRGEPHVTRRTPDYFL

SEQ ID NO: 46549 - protein, 1326 aa, Homo sapiens
MLVIALSCQKILVFPQGLKMLLENKAVKKAGVGIEGDQWKLLRDFDIKLKNFVELTDVANKKLKCTETWSLNSLVKHLLGKQLLKDKSIRCSNWSKFPLTEDQKLYAATDAYAGFIIYRNLEILDDTVQRFAINKEEEILLSDMNKQLTSISEEVMDLAKHLPHAFSKLENPRRVSILLKDISENLYSLRRMIIGSTNIETELRPSNNLNLLSFEDSTTGGVQQKQIREHEVLIHVEDETWDPTLDHLAKHDGEDVLGNKVERKEDGFEDGVEDNKLKENMERACLMSLDITEHELQILEQQSQEEYLSDIAYKSTEHLSPNDNENDTSYVIESDEDLEMEMLKHLSPNDNENDTSYVIESDEDLEMEMLKSLENLNSGTVEPTHSKCLKMERNLGLPTKEEEEDDENEANEGEEDDDKDFLWPAPNEEQVTCLKMYFGHSSFKPVQWKVIHSVLEERRDNVAVMATGYGKSLCFQYPPVYVGKIGLVISPLISLMEDQVLQLKMSNIPACFLGSAQSENVLTDIKLGKYRIVYVTPEYCSGNMGLLQQLEADIGITLIAVDEAHCISEWGHDFRDSFRKLGSLKTALPMVPIVALTATASSSIREDIVRCLNLRNPQITCTGFDRPNLYLEVRRKTGNILQDLQPFLVKTSSHWEFEGPTIIYCPSRKMTQQVTGELRKLNLSCGTYHAGMSFSTRKDIHHRFVRDEIQCVIATIAFGMGINKADIRQVIHYGAPKDMESYYQEIGRAGRDGLQSSCHVLWAPADINLNRHLLTEIRNEKFRLYKLKMMAKMEKYLHSSRCRRQIILSHFEDKQVQKASLGIMGTEKCCDNCRSRLDHCYSMDDSEDTSWDFGPQAFKLLSAVDILGEKFGIGLPILFLRGSNSQRLADQYRRHSLFGTGKDQTESWWKAFSRQLITEGFLVEVSRYNKFMKICALTKKGRNWLHKANTESQSLILQANEELCPKKLLLPSSKTVSSGTKEHCYNQVPVELSTEKKSNLEKLYSYKPCDKISSGSNISKKSIMVQSPEKAYSSSQPVISAQEQETQIVLYGKLVEARQKHANKMDVPPAILATNKILVDMAKMRPTTVENVKRIDGVSEGKAAMLAPLLEVIKHFCQTNSVQTDLFSSTKPQEEQKTSLVAKNKICTLSQSMAITYSLFQEKKMPLKSIAESRILPLMTIGMHLSQAVKAGCPLDLERAGLTPEVQKIIADVIRNPPVNSDMSKISLIRMLVPENIDTYLIHMAIEILKHGPDSGLQPSCDVNKRRCFPGSEEICSSSKRSKEEVGINTETSSAERKRRLPVWFAKGSDTSKKLMDKTKRGGLFS

SEQ ID NO: 46550 - protein, 396 aa, Homo sapiens
MLWWSPLTGETGRLGQCGADACFFTINRTYLHHHMTKAFLFYGTDFNIDSLPLPRKAHHDWAVFHEESPKNNYKLFHKPVITLFNYTATFSRHSHLPLTTQYLESIEVLKSLRYLVPLQSKNKLRKRLAPLVYVQSDCDPPSDRDSYVRELMTYIEVDSYGECLRNKDLPQQLKNPASMDADGFYRIIAQYKFILAFENAVCDDYITEKFWRPLKLGVVPVYYGSPSITDWLPSNKSAILVSEFSHPRELASYIRRLDSDDRLYEAYVEWKLKGEISNQRLLTALRERKWGVQDVNQDNYIDAFECMVCTKVWANIRLQEKGLPPKRWEAEDTHLSCPEPTVFAFSPLRTPPLSSLREMWISSFEQSKKEAQALRWLVDRNQNFSSQEFWGLVFKD

SEQ ID NO: 46551 - protein, 236 aa, Homo sapiens [sequence omitted]

SEQ ID NO: 46552 - protein, 269 aa, Homo sapiens [sequence omitted]

SEQ ID NO: 46553 - protein, 872 aa, Homo sapiens
MAPANSEATKEAKESKKPESRRSSLLSLMTGKKDVAKGSEGENPLTVPGREKEGMLMGVKPGEDASGPAEDLVRRSEKDTAAVVSRQGSSLNLFEDVQITEPEAEPESKSEPRPPISSPRAPQTRAVKPRLEVSPEAQPTARLPSPTDSPSSLPPLPSSSGQASVPSELGHGADTQSSESPSVFSSLSSPIAAPISTSTPIESWPLVDRGQAKSEGPPLLPKAELQTESLTPVPNSGSSALGSLFKQPSFPANKGTEDSLMGRTRETGTEKNTSSLELEESLPEQPETGRQEEELPRFPCKKQDYSPSSGEAQEVPFALSLSSDGAVSPVGELAAGGDRDLESQAGSLVESKARDAAEEVAPPLPMGASVPSIDSMMRKLEEMGLNLRKDQKKTKKRVSFSEQLFTEEAVAGAALLVEGHSSCPQELNPAWSVAGNASDGEPPESPHAEDSERESVTTPGPATCGAPASPADHLLLPSQEESFSEVPMSEASSAKDTPLFRMEGEDALVTQYQSKASDHEGLLSDPLSDLQLVSDFKSPIMADLNLSLPSIPEVASDDERIDQVEDDGDQVEDDGETAKSSTLDIGALSLGLVVPCPERGKGPSGEADRLVLGEGLCDFRLQAPQASVTAPSEQTTEFGIHKPHLGKSSSLDKQLPGPSGGEEEKPMGNGSPSPPPGTSLDNPVPSPSPSEIFPVTHSFPSSAHSDTHHTSTAESQKKATAEGSAGRVENFGKRKPLLQAWVSPSETHPVSAQPGAGTGSAKHRLHPVKPMNAMATKVANCSLGTATIISENLNNEVMMKKYSPSDPAFAYAQLTHDELIQLVLKQKETISKKEFQVRELEDYIDNLLVRVMEETPNILRIPTQVGKKAGKM

SEQ ID NO: 46554 - protein, 577 aa, Homo sapiens
MPVAPYWTSPEKMEKKLHAVPAAKTVKFKCPSSGTPNPTLRWLKNGKEFKPDHRIGGYKTAGVNTTDKEMEVLHLRNVSFEDAGEYTCLAGNSIGLSHHSAWLTVLEALEERPAVMTSPLYLEIIIYCTGAFLISCMVGSVIVYKMKSGTKKSDFHSQMAVHKLAKSIPLRRQVSADSSASMNSGVLLVRPSRLSSSGTPMLAGVSEYELPEDPRWELPRDRLVLGKPLGEGCFGQVVLAEAIGLDKDKPNRVTKVAVKMLKSDATEKDLSDLISEMEMMKMIGKHKNIINLLGACTQDGPLYVIVEYASKGNLREYLQARRPPGLEYCYNPSHNPEEQLSSKDLVSCAYQVARGMEYLASKKCIHRDLAARNVLVTEDNVMKIADFGLARDIHHIDYYKKTTNGRLPVKWMAPEALFDRIYTHQSDVWSFGVLLWEIFTLGGSPYPGVPVEELFKLLKEGHRMDKPSNCTNELYMMMRDCWHAVPSQRPTFKQLVEDLDRIVALTSNQVLHPDLTTHLLPLRCFWKVRKRRCLLRGQEPHPCSRGAGQRVKAQQPSTMDGFLQGNRWGWAGEGAPT

SEQ ID NO: 46555 - protein, 672 aa, Homo sapiens
MPVAPYWTSPEKMEKKLHAVPAAKTVKFKCPSSGTPNPTLRWLKNGKEFKPDHRIGGYKVRYATWSIIMDSVVPSDKGNYTCIVENEYGSINHTYQLDVVERSPHRPILQAGLPANKTVALGSNVEFMCKVYSDPQPHIQWLKHIEVNGSKIGPDNLPYVQILKTAGVNTTDKEMEVLHLRNVSFEDAGEYTCLAGNSIGLSHHSAWLTVLEALEERPAVMTSPLYLEIIIYCTGAFLISCMVGSVIVYKMKSGTKKSDFHSQMAVHKLAKSIPLRRQVSADSSASMNSGVLLVRPSRLSSSGTPMLAGVSEYELPEDPRWELPRDRLVLGKPLGEGCFGQVVLAEAIGLDKDKPNRVTKVAVKMLKSDATEKDLSDLISEMEMMKMIGKHKNIINLLGACTQDGPLYVIVEYASKGNLREYLQARRPPGLEYCYNPSHNPEEQLSSKDLVSCAYQVARGMEYLASKKCIHRDLAARNVLVTEDNVMKIADFGLARDIHHIDYYKKTTNGRLPVKWMAPEALFDRIYTHQSDVWSFGVLLWEIFTLGGSPYPGVPVEELFKLLKEGHRMDKPSNCTNELYMMMRDCWHAVPSQRPTFKQLVEDLDRIVALTSNQEYLDLSMPLDQYSPSFPDTRSSTCSSGEDSVFSHEPLPEEPCLPRHPAQLANGGLKRR

SEQ ID NO: 46556 - protein, 605 aa, Homo sapiens
MGVTLEASAEADLKAGNSCPELVPSRRSKLRKPKPVPLRKKAIGGEFSDTNAAVEGTPLPKASYHFSPEELDENTSPLLGDARFQKSPPDLKETPGTLSSDTNDSGVELGEESRSSPLKLEFDFTEDTGNIEARKALPRKLGRKLGSTLTPKIQKDGISKSAGLEQPTDPVARDGPLSQTSSKPDPSQWESPSFNPFGSHSVLQNSPPLSSEGSYHFDPDNFDESMDPFKPTTTLTSSDFCSPTGNHVNEILESPKKAKSRLITSGCKVKKHETQSLALDACSRDEGAVISQISDISNRDGHATDEEKLASTSCGQKSAGAEVKGEPEEDLEYFECSNVPVSTINHAFSSSEAGIEKETCQKMEEDGSTVLGLLESSAEKAPVSVSCGGESPLDGICLSESDKTAVLTLIREEIITKEIEANEWKKKYEETRQEVLEMRKIVAEYEKTIAQMIEDEQRTSMTSQKSFQQLTMEKEQALADLNSVERSLSDLFRRYENLKGVLEGFKKNEEALKKCAQDYLARVKQEEQRYQALKIHAEEKLDKANEEIAQVRTKAKAESAALHAGLRKEQMKVESLERALQQKNQEIEELTKICDELIAKLGKTD

SEQ ID NO: 46557 - protein, 623 aa, Homo sapiens
MTQLLRRRRAVLPQTRYVELFIVVDKERYDMMGRNQTAVREEMILLANYLDSMYIMLNIRIVLVGLEIWTNGNLINIVGGAGDVLGNFVQWREKFLITRRRHDSAQLVLKKGFGGTAGMAFVGTVCSRSHAGGINVFGQITVETFASIVAHELGHNLGMNHDDGRDCSCGAKSCIMNSGASGSRNFSSCSAEDFEKLTLNKGGNCLLNIPKPDEAYSAPSCGNKLVDAGEECDCGTPKECELDPCCEGSTCKLKSFAECAYGDCCKDCRFLPGGTLCRGKTSECDVPEYCNGSSQFCQPDVFIQNGYPCQNNKAYCYNGMCQYYDAQCQVIFGSKAKAAPKDCFIEVNSKGDRFGNCGFSGNEYKKCATGNALCGKLQCENVQEIPVFGIVPAIIQTPSRGTKCWGVDFQLGSDVPDPGMVNEGTKCGAGKICRNFQCVDASVLNYDCDVQKKCHGHGVCNSNKNCHCENGWAPPNCETKGYGGSVDSGPTYNEMNTALRDGLLVFFFLIVPLIVCAIFIFIKRDQLWRSYFRKKRSQTYESDGKNQANPSRQPGSVPRHVSPVTPPREVPIYANRFAVPTYAAKQPQQFPSRPPPPQPKVSSQGNLIPARPAPAPPLYSSLT

SEQ ID NO: 46558 - protein, 607 aa, Homo sapiens
MIYLYNQGSMNTYSSDIQTQCYYQGNIEGYPDSMVTLSTCSGLRGILQFENVSYGIEPLESAVEFQHVLYKLKNEDNDIAIFIDRSLKEQPMDDNIFISEKSEPAVPDLFPLYLEMHIVVDKTLYDYWGSDSMIVTNKVIEIVGLANSMFTQFKVTIVLSSLELWSDENKISTVGEADELLQKFLEWKQSYLNLRPHDIAYLLIYMDYPRYLGAVFPGTMCITRYSAGVALQCGPASCCDFRTCVLKDGAKCYKGLCCKDCQILQSGVECRPKAHPECDIAENCNGTSPECGPDITLINGLSCKNNKFICYDGDCHDLDARCESVFGKGSRNAPFACYEEIQSQSDRFGNCGRDRNNKYVFCGWRNLICGRLVCTYPTRKPFHQENGDVIYAFVRDSVCITVDYKLPRTVPDPLAVKNGSQCDIGRVCVNRECVESRIIKASAHVCSQQCSGHGVCDSRNKCHCSPGYKPPNCQIRSKGFSIFPEEDMGSIMERASGKTENTWLLGFLIALPILIVTTAIVLARKQLKKWFAKEEEFPSSESKSEGSTQTYASQSSSEGSTQTYASQTRSESSSQADTSKSKSEDSAEAYTSRSKSQDSTQTQSSSN

SEQ ID NO: 46559 - protein, 1705 aa, Homo sapiens
MPKGMWICQICRPRKKGRKLLQKKAAQIKRRYTNPIGRPKNRLKKQNTVSKGPFSKVRTGPGRGRKRKITLSSQSASSSSEEGYLERIDGLDFCRDSNVSLKFNKKTKGLIDGLTKFFTPSPDGRKARGEVVDYSEQYRIRKRGNRKSSTSDWPTDNQDGWDGKQENEERLFGSQEIMTEKDMELFRDIQEQALQKVGVTGPPDPQVRCPSVIEFGKYEIHTWYSSPYPQEYSRLPKLYLCEFCLKYMKSRTILQQHMKKCGWFHPPANEIYRKNNISVFEVDGNVSTIYCQNLCLLAKLFLDHKTLYYDVEPFLFYVLTQNDVKGCHLVGYFSKEKHCQQKYNVSCIMILPQYQRKGYGRFLIDFSYLLSKREGQAGSPEKPLSDLGRLSYMAYWKSVILECLYHQNDKQISIKKLSKLTGICPQDITSTLHHLRMLDFRSDQFVIIRREKLIQDHMAKLQLNLRPVDVDPECLRWTPVIVSNSVVSEEEEEEAEEGENEEPQCQERELEISVGKSVSHENKEQDSYSVESEKKPEVMAPVSSTRLSKQVLPHDSLPANSQPSRRGRWGRKNRKTQERFGDKDSKLLLEETSSAPQEQYGECGEKSEATQEQYTESEEQLVASEEQPSQDGKPDLPKRRLSEGVEPWRGQLKKSPEALKCRLTEGSERLPRRYSEGDRAVLRGFSESSEEEEEPESPRSSSPPILTKPTLKRKKPFLHRRRRVRKRKHHNSSVVTETISETTEVLDEPFEDSDSERPMPRLEPTFEIDEEEEEEDENELFPREYFRRLSSQDVLRCQSSSKRKSKDEEEDEESDDADDTPILKPVSLLRKRDVKNSPLEPDTSTPLKKKKGWPKGKSRKPIHWKKRPGRKPGFKLSREIMPVSTQACVIEPIVSIPKAGRKPKIQESEETVEPKEDMPLPEERKEEEEMQAEAEEAEEGEEEDAASSEVPAASPADSSNSPETETKEPEVEEEEEKPRVSEEQRQSEEEQQELEEPEPEEEEDAAAETAQNDDHDADDEDDGHLESTKKKELEEQPTREDVKEEPGVQESFLDANMQKSREKIKDKEETELDSEEEQPSHDTSVVSEQMAGSEDDHEEDSHTKEELIELKEEEEIPHSELDLETVQAVQSLTQEESSEHEGAYQDCEETLAACQTLQSYTQADEDPQMSMVEDCHASEHNSPISSVQSHPSQSVRSVSSPNVPALESGYTQISPEQGSLSAPSMQNMETSPMMDVPSVSDHSQQVVDSGFSDLGSIESTTENYENPSSYDSTMGGSICGNSSSQSSCSYGGLSSSSSLTQSSCVVTQQMASMGSSCSMMQQSSVQPAANCSIKSPQSCVVERPPSNQQQQPPPPPPQQPQPPPPQPQPAPQPPPPQQQPQQQPQPQPQQPPPPPPPQQQPPLSQCSMNNSFTPAPMIMEIPESGSTGNISIYERIPGDFGAGSYSQPSATFSLAKLQQLTNTIMDPHAMPYSHSPAVTSYATSVSLSNTGLAQLAPSHPLAGTPQAQATMTPPPNLASTTMNLTSPLLQCNMSATNIGIPHTQRLQGQMPVKGHISIRSKSAPLPSAAAHQQQLYGRSPSAVAMQAGPRALAVQRGMNMGVNLMPTPAYNVNSMNMNTLNAMNSYRMTQPMMNSSYHSNPAYMNQTAQYPMQMQMGMMGSQAYTQQPMQPNPHGNMMYTGPSHHSYMNAAGVPKQSLNGPYMRR

SEQ ID NO: 46560 - protein, 204 aa, Homo sapiens
MPDLTLSFMNPRLLDDVSFHPCVRFKRWESERILSFIPPDGNFRLLSYHVSAQNLVAIPVYVKHNISFRDSSSLGRFEITVGPKQTMGKTIEGVTVTSQMPKGVLNMSLTPSQGTHTFDPVTKMLSWDVGKINPQKLPSLKGTMSLQAGASKPDENPTINLQFKIQQLAISGLKVNRLDMYGEKYKPFKGIKYMTKAGKFQVRT

SEQ ID NO: 46561 - protein, 559 aa, Homo sapiens [sequence omitted]

SEQ ID NO: 46562 - protein, 258 aa, Homo sapiens [sequence omitted]

SEQ ID NO: 46563 - protein, 650 aa, Homo sapiens
MDEYLWMVILGFIIAFILAFSVGANDVANSFGTAVGSGVVTLRQACILASIFETTGSVLLGAKVGETIRKGIIDVNLYNETVETLMAGEVSAMVGSAVWQLIASFLRLPISGTHCIVGSTIGFSLVAIGTKGVQWMELVKIVASWFISPLLSGFMSGLLFVLIRIFILKKEDPVPNGLRALPVFYAATIAINVFSIMYTGAPVLGLVLPMWAIALISFGVALLFAFFVWLFVCPWMRRKITGKLQKEGALSRVSDESLSKVQEAESPVFKELPGAKANDDSTIPLTGAAGETLGTSEGTSAGSHPRAAYGRALSMTHGSVKSPISNGTFGFDGHTRSDGHVYHTVHKDSGLYKDLLHKIHIDRGPEEKPAQESNYRLLRRNNSYTCYTAAICGLPVHATFRAADSSAPEDSEKLVGDTVSYSKKRLRYDSYSSYCNAVAEAEIEAEEGGVEMKLASELADPDQPREDPAEEEKEEKDAPEVHLLFHFLQVLTACFGSFAHGGNDVSNAIGPLVALWLIYKQGGVTQEAATPVWLLFYGGVGICTGLWVWGRRVIQTMGKDLTPITPSSGFTIELASAFTVVIASNIGLPVSTTHCKVGSVVAVGWIRSRKAVDWRLFRNIFVAWFVTVPVAGLFSAAVMALLMYGILPYV

SEQ ID NO: 46564 - protein, 88 aa, Homo sapiens
MERIMDLPTLLRHAFREMFSVGGLFWMFRIRIILCLMGAFFYLISPLDFVPEALFGILGFLDDFFVIFLLLIYISIMYREVITQRLTR

SEQ ID NO: 46565 - protein, 678 aa, Homo sapiens [sequence omitted]

SEQ ID NO: 46566 - protein, 321 aa, Homo sapiens
MNTLLYLCLDHFFIAPRQSTVDPTHCPYGHFRIGQMKNCSPWLSCEELRTEVRQLKRVGEGAVKRVFLSEWKEHKVALSQLTSLEMKDDFLHGLQMLKSLQGTHVVTLLGYCEDDNTMLTEYHPLGSLSNLEETLNLSKYQNVNTWQHRLELAMDYVSIINYLHHSPVGTRVMCDSNDLPKTLSQYLLTSNFSILANDLDALPLVNHSSGMLVKCGHRELHGDFVAPEQLWPYGEDVPFHDDLMPSYDEKIDIWKIPDISSFLLGHIEGSDMVRFHLFDIHKACKSQTPSERPTAQDVLETYQKVLDTLRDAMMSQAREML

SEQ ID NO: 46567 - protein, 4033 aa, Homo sapiens
MGQKIAPYSVEIKNTCTSVYTKDRAAKCKIPALDLLIKLLQTFRSSRLMDEFKIGELFSKFYGELALKKKIPDTVLEKVYELLGLLGEVHPSEMINNAENLFRAFLGELKTQMTSAVREPKLPVLAGCLKGLSSLLCNFTKSMEEDPQTSREIFNFVLKAIRPQIDLKRYAVPSAGLRLFALHASQFSTCLLDNYVSLFEVLLKWCAHTNVELKKAALSALESFLKQVSNMVAKNAEMHKNKLQYFMEQFYGIIRNVDSNNKELSIAIRGYGLFAGPCKVINAKDVDFMYVELIQRCKQMFLTQTDTGDDRVYQMPSFLQSVASVLLYLDTVPEVYTPVLEHLVVMQIDSFPQYSPKMQLVCCRAIVKVFLALAAKGPVLRNCISTVVHQGLIRICSKPVVLPKGPESESEDHRASGEVRTGKWKVPTYKDYVDLFRHLLSSDQMMDSILADEAFFSVNSSSESLNHLLYDEFVKSVLKIVEKLDLTLEIQTVGEQENGDEAPGVWMIPTSDPAANLHPAKPKDFSAFINLVEFCREILPEKQAEFFEPWVYSFSYELILQSTRLPLISGFYKLLSITVRNAKKIKYFEGVSPKSLKHSPEDPEKYSCFALFVKFGKEVAVKMKQYKDELLASCLTFLLSLPHNIIELDVRAYVPALQMAFKLGLSYTPLAEVGLNALEEWSIYIDRHVMQPYYKDILPCLDGYLKTSALSDETKNNWEVSALSRAAQKGFNKVVLKHLKKTKNLSSNEAISLEEIRIRVVQMLGSLGGQINKNLLTVTSSDEMMKSYVAWDREKRLSFAVPFREMKPVIFLDVFLPRVTELALTASDRQTKVAACELLHSMVMFMLGKATQMPEGGQGAPPMYQLYKRTFPVLLRLACDVDQVTRQLYEPLVMQLIHWFTNNKKFESQDTVALLEAILDGIVDPVDSTLRDFCGRCIREFLKWSIKQITPQQQEKSPVNTKSLFKRLYSLALHPNAFKRLGASLAFNNIYREFREEESLVEQFVFEALVIYMESLALAHADEKSLGTIQQCCDAIDHLCRIIEKKHVSLNKAKKRRLPRGFPPSASLCLLDLVKWLLAHCGRPQTECRHKSIELFYKFVPLLPGNRSPNLWLKDVLKEEGVSFLINTFEGGGCGQPSGILAQPTLLYLRGPFSLQATLCWLDLLLAALECYNTFIGERTVGALQVLGTEAQSSLLKAVAFFLESIAMHDIIAAEKCFGTGAAGNRTSPQEGERYNYSKCTVVVRIMEFTTTLLNTSPEGWKLLKKDLCNTHLMRVLVQTLCEPASIGFNIGDVQVMAHLPDVCVNLMKALKMSPYKDILETHLREKITAQSIEELCAVNLYGPDAQVDRSRLAAVVSACKQLHRAGLLHNILPSQSTDLHHSVGTELLSLVYKGIAPGDERQCLPSLDLSCKQLASGLLELAFAFGGLCERLVSLLLNPAVLSTASLGSSQGSVIHFSHGEYFYSLFSETINTELLKNLDLAVLELMQSSVDNTKMVSAVLNGMLDQSFRERANQKHQGLKLATTILQHWKKCDSWWAKDSPLETKMAVLALLAKILQIDSSVSFNTSHGSFPEVFTTYISLLADTKLDLHLKGQAVTLLPFFTSLTGGSLEELRRVLEQLIVAHFPMQSREFPPGTPRFNNYVDCMKKFLDALELSQSPMLLELMTEVLCREQQHVMEELFQSSFRRIARRGSCVTQVGLLESVYEMFRKDDPRLSFTRQSFVDRSLLTLLWHCSLDALREFFSTIVVDAIDVLKSRFTKLNESTFDTQITKKMGYYKILDVMYSRLPKDDVHAKESKINQVFHGSCITEGNELTKTLIKLCYDAFTENMAGENQLLERRRLYHCAAYNCAISVICCVFNELKFYQGFLFSEKPEKNLLIFENLIDLKRRYNFPVEVEVPMERKKKYIEIRKEAREAANGDSDGPSYMSSLSYLADSTLSEEMSQFDFSTGVQSYSYSSQDPRPATGRFRRREQRDPTVHDDVLELEMDELNRHECMAPLTALVKHMHRSLGPPQGEEDSVPRDLPSWMKFLHGKLGNPIVPLNIRLFLAKLVINTEEVFRPYAKHWLSPLLQLAASENNGGEGIHYMVVEIVATILSWTGLATPTGVPKDEVLANRLLNFLMKHVFHPKRAVFRHNLEIIKTLVECWKDCLSIPYRLIFEKFSGKDPNSKDNSVGIQLLGIVMANDLPPYDPQCGIQSSEYFQALVNNMSFVRYKEVYAAAAEVLGLILRYVMERKNILEESLCELVAKQLKQHQNTMEDKFIVCLNKVTKSFPPLADRFMNAVFFLLPKFHGVLKTLCLEVVLCRVEGMTELYFQLKSKDFVQVMRHRDDERQKVCLDIIYKMMPKLKPVELRELLNPVVEFVSHPSTTCREQMYNILMWIHDNYRDPESETDNDSQEIFKLAKDVLIQGLIDENPGLQLIIRNFWSHETRLPSNTLDRLLALNSLYSPKIEVHFLSLATNFLLEMTSMSPDYPNPMFEHPLSECEFQEYTIDSDWRFRSTVLTPMFVETQASQGTLQTRTQEGSLSARWPVAGQIRATQQQHDFTLTQTADGRSSFDWLTGSSTDPLVDHTSPSSDSLLFAHKRSERLQRAPLKSVGPDFGKKRLGLPGDEVDNKVKGAAGRTDLLRLRRRFMRDQEKLSLMYARKGVAEQKREKEIKSELKMKQDAQVVLYRSYRHGDLPDIQIKHSSLITPLQAVAQRDPIIAKQLFSSLFSGILKEMDKFKTLSEKNNITQKLLQDFNRFLNTTFSFFPPFVSCIQDISCQHAALLSLDPAAVSAGCLASLQQPVGIRLLEEALLRLLPAELPAKRVRGKARLPPDVLRWVELAKLYRSIGEYDVLRGIFTSEIGTKQITQSALLAEARSDYSEAAKQYDEALNKQDWVDGEPTEAEKDFWELASLDCYNHLAEWKSLEYCSTASIDSENPPDLNKIWSEPFYQETYLPYMIRSKLKLLLQGEADQSLLTFIDKAMHGELQKAILELHYSQELSLLYLLQDDVDRAKYYIQNGIQSFMQNYSSIDVLLHQSRLTKLQSVQALTEIQEFISFISKQGNLSSQVPLKRLLNTWTNRYPDAKMDPMNIWDDIITNRCFFLSKIEEKLTPLPEDNSMNVDQDGDPSDRMEVQEQEEDISSLIRSCKFSMKMKMIDSARKQNNFSLAMKLLKELHKESKTRDDWLVSWVQSYCRLSHCRSRSQGCSEQVLTVLKTVSLLDENNVSSYLSKNILAFRDQNILLGTTYRIIANALSSEPACLAEIEEDKARRILELSGSSSEDSEKVIAGLYQRAFQHLSEAVQAAEEEAQPPSWSCGPAAGVIDAYMTLADFCDQQLRKEEENASVIDSAELQAYPALVVEKMLKALKLNSNEARLKFPRLLQIIERYPEETLSLMTKEISSVPCWQFISWISHMVALLDKDQAVAVQHSVEEITDNYPQAIVYPFIISSESYSFKDTSTGHKNKEFVARIKSKLDQGGVIQDFINALDQLSNPELLFKDWSNDVRAELAKTPVNKKNIEKMYERMYAALGDPKAPGLGAFRRKFIQTFGKEFDKHFGKGGSKLLRMKLSDFNDITNMLLLKMNKDSKPPGNLKECSPWMSDFKVEFLRNELEIPGQYDGRGKPLPEYHVRIAGFDERVTVMASLRRPKRIIIRGHDEREHPFLVKGGEDLRQDQRVEQLFQVMNGILAQDSACSQRALQLRTYSVVPMTSRLGLIEWLENTVTLKDLLLNTMSQEEKAAYLSDPRAPPCEYKDWLTKMSGKHDVGAYMLMYKGANRTETVTSFRKRESKVPADLLKRAFVRMSTSPEAFLALRSHFASSHALICISHWILGIGDRHLNNFMVAMETGGVIGIDFGHAFGSATQFLPVPELMPFRLTRQFINLMLPMKETGLMYSIMVHALRAFRSDPGLLTNTMDVFVKEPSFDWKNFEQKMLKKGGSWIQEINVAEKNWYPRQKICYAKRKLAGANPAVITCDELLLGHEKAPAFRDYVAVARGSKDHNIRAQEPESGLSEETQVKCLMDQATDPNILGRTWEGWEPWM

SEQ ID NO: 46568 - protein, 4002 aa, Homo sapiens
MGQKIAPYSVEIKNTCTSVYTKDRAAKCKIPALDLLIKLLQTFRSSRLMDEFKIGELFSKFYGELALKKKIPDTVLEKVYELLGLLGEVHPSEMINNAENLFRAFLGELKTQMTSAVREPKLPVLAGCLKGLSSLLCNFTKSMEEDPQTSREIFNFVLKAIRPQIDLKRYAVPSAGLRLFALHASQFSTCLLDNYVSLFEVLLKWCAHTNVELKKAALSALESFLKQVSNMVAKNAEMHKNKLQYFMEQFYGIIRNVDSNNKELSIAIRGYGLFAGPCKVINAKDVDFMYVELIQRCKQMFLTQTDTGDDRVYQMPSFLQSVASVLLYLDTVPEVYTPVLEHLVVMQIDSFPQYSPKMQLVCCRAIVKVFLALAAKGPVLRNCISTVVHQGLIRICSKPVVLPKGPESESEDHRASGEVRTGKWKVPTYKDYVDLFRHLLSSDQMMDSILADEAFFSVNSSSESLNHLLYDEFVKSVLKIVEKLDLTLEIQTVGEQENGDEAPGVWMIPTSDPAANLHPAKPKDFSAFINLVEFCREILPEKQAEFFEPWVYSFSYELILQSTRLPLISGFYKLLSITVRNAKKIKYFEGVSPKSLKHSPEDPEKYSCFALFVKFGKEVAVKMKQYKDELLASCLTFLLSLPHNIIELDVRAYVPALQMAFKLGLSYTPLAEVGLNALEEWSIYIDRHVMQPYYKDILPCLDGYLKTSALSDETKNNWEVSALSRAAQKGFNKVVLKHLKKTKNLSSNEAISLEEIRIRVVQMLGSLGGQINKNLLTVTSSDEMMKSYVAWDREKRLSFAVPFREMKPVIFLDVFLPRVTELALTASDRQTKVAACELLHSMVMFMLGKATQMPEGGQGAPPMYQLYKRTFPVLLRLACDVDQVTRQLYEPLVMQLIHWFTNNKKFESQDTVALLEAILDGIVDPVDSTLRDFCGRCIREFLKWSIKQITPQQQEKSPVNTKSLFKRLYSLALHPNAFKRLGASLAFNNIYREFREEESLVEQFVFEALVIYMESLALAHADEKSLGTIQQCCDAIDHLCRIIEKKHVSLNKAKKRRLPRGFPPSASLCLLDLVKWLLAHCGRPQTECRHKSIELFYKFVPLLPGNRSPNLWLKDVLKEEGVSFLINTFEGGGCGQPSGILAQPTLLYLRGPFSLQATLCWLDLLLAALECYNTFIGERTVGALQVLGTEAQSSLLKAVAFFLESIAMHDIIAAEKCFGTGAAGNRTSPQEGERYNYSKCTVVVRIMEFTTTLLNTSPEGWKLLKKDLCNTHLMRVLVQTLCEPASIGFNIGDVQVMAHLPDVCVNLMKALKMSPYKDILETHLREKITAQSIEELCAVNLYGPDAQVDRSRLAAVVSACKQLHRAGLLHNILPSQSTDLHHSVGTELLSLVYKGIAPGDERQCLPSLDLSCKQLASGLLELAFAFGGLCERLVSLLLNPAVLSTASLGSSQGSVIHFSHGEYFYSLFSETINTELLKNLDLAVLELMQSSVDNTKMVSAVLNGMLDQSFRERANQKHQGLKLATTILQHWKKCDSWWAKDSPLETKMAVLALLAKILQIDSSVSFNTSHGSFPEVFTTYISLLADTKLDLHLKGQAVTLLPFFTSLTGGSLEELRRVLEQLIVAHFPMQSREFPPGTPRFNNYVDCMKKFLDALELSQSPMLLELMTEVLCREQQHVMEELFQSSFRRIARRGSCVTQVGLLESVYEMFRKDDPRLSFTRQSFVDRSLLTLLWHCSLDALREFFSTIVVDAIDVLKSRFTKLNESTFDTQITKKMGYYKILDVMYSRLPKDDVHAKESKINQVFHGSCITEGNELTKTLIKLCYDAFTENMAGENQLLERRRLYHCAAYNCAISVICCVFNELKFYQGFLFSEKPEKNLLIFENLIDLKRRYNFPVEVEVPMERKKKYIEIRKEAREAANGDSDGPSYMSSLSYLADSTLSEEMSQFDFSTGVQSYSYSSQDPRPATGRFRRREQRDPTVHDDVLELEMDELNRHECMAPLTALVKHMHRSLGPPQGEEDSVPRDLPSWMKFLHGKLGNPIVPLNIRLFLAKLVINTEEVFRPYAKHWLSPLLQLAASENNGGEGIHYMVVEIVATILSWTGLATPTGVPKDEVLANRLLNFLMKHVFHPKRAVFRHNLEIIKTLVECWKDCLSIPYRLIFEKFSGKDPNSKDNSVGIQLLGIVMANDLPPYDPQCGIQSSEYFQALVNNMSFVRYKEVYAAAAEVLGLILRYVMERKNILEESLCELVAKQLKQHQNTMEDKFIVCLNKVTKSFPPLADRFMNAVFFLLPKFHGVLKTLCLEVVLCRVEGMTELYFQLKSKDFVQVMRHRDDERQKVCLDIIYKMMPKLKPVELRELLNPVVEFVSHPSTTCREQMYNILMWIHDNYRDPESETDNDSQEIFKLAKDVLIQGLIDENPGLQLIIRNFWSHETRLPSNTLDRLLALNSLYSPKIEVHFLSLATNFLLEMTSMSPDYPNPMFEHPLSECEFQEYTIDSDWRFRSTVLTPMFVETQASQGTLQTRTQEGSLSARWPVAGQIRATQQQHDFTLTQTADGRSSFDWLTGSSTDPLVDHTSPSSDSLLFAHKRSERLQRAPLKSVGPDFGKKRLGLPGDEVDNKVKGAAGRTDLLRLRRRFMRDQEKLSLMYARKGVAEQKREKEIKSELKMKQDAQVVLYRSYRHGDLPDIQIKHSSLITPLQAVAQRDPIIAKQLFSSLFSGILKEMDKFKTLSEKNNITQKLLQDFNRFLNTTFSFFPPFVSCIQDISCQHAALLSLDPAAVSAGCLASLQQPVGIRLLEEALLRLLPAELPAKRVRGKARLPPDVLRWVELAKLYRSIGEYDVLRGIFTSEIGTKQITQSALLAEARSDYSEAAKQYDEALNKQDWVDGEPTEAEKDFWELASLDCYNHLAEWKSLEYCSTASIDSENPPDLNKIWSEPFYQETYLPYMIRSKLKLLLQGEADQSLLTFIDKAMHGELQKAILELHYSQELSLLYLLQDDVDRAKYYIQNGIQSFMQNYSSIDVLLHQSRLTKLQSVQALTEIQEFISFISKQGNLSSQVPLKRLLNTWTNRYPDAKMDPMNIWDDIITNRCFFLSKIEEKLTPLPEDNSMNVDQDGDPSDRMEVQEQEEDISSLIRSCKFSMKMKMIDSARKQNNFSLAMKLLKELHKESKTRDDWLVSWVQSYCRLSHCRSRSQGCSEQVLTVLKTVSLLDENNVSSYLSKNILAFRDQNILLGTTYRIIANALSSEPACLAEIEEDKARRILELSGSSSEDSEKVIAGLYQRAFQHLSEAVQAAEEEAQPPSWSCGPAAGVIDAYMTLADFCDQQLRKEEENASVIDSAELQAYPALVVEKMLKALKLNSNEARLKFPRLLQIIERYPEETLSLMTKEISSVPCWQFISWISHMVALLDKDQAVAVQHSVEEITDNYPQAIVYPFIISSESYSFKDTSTGHKNKEFVARIKSKLDQGGVIQDFINALDQLSNPELLFKDWSNDVRAELAKTPVNKKNIEKMYERMYAALGDPKAPGLGAFRRKFIQTFGKEFDKHFGKGGSKLLRMKLSDFNDITNMLLLKMNKDSKPPGNLKECSPWMSDFKVEFLRNELEIPGQYDGRGKPLPEYHVRIAGFDERVTVMASLRRPKRIIIRGHDEREHPFLVKGGEDLRQDQRVEQLFQVMNGILAQDSACSQRALQLRTYSVVPMTSSDPRAPPCEYKDWLTKMSGKHDVGAYMLMYKGANRTETVTSFRKRESKVPADLLKRAFVRMSTSPEAFLALRSHFASSHALICISHWILGIGDRHLNNFMVAMETGGVIGIDFGHAFGSATQFLPVPELMPFRLTRQFINLMLPMKETGLMYSIMVHALRAFRSDPGLLTNTMDVFVKEPSFDWKNFEQKMLKKGGSWIQEINVAEKNWYPRQKICYAKRKLAGANPAVITCDELLLGHEKAPAFRDYVAVARGSKDHNIRAQEPESGLSEETQVKCLMDQATDPNILGRTWEGWEPWM

SEQ ID NO: 46569 - protein, 261 aa, Homo sapiens [sequence omitted]

SEQ ID NO: 46570 - protein, 93 aa, Homo sapiens [sequence omitted]

SEQ ID NO: 46571 - protein, 184 aa, Homo sapiens [sequence omitted]

SEQ ID NO: 46572 - protein, 842 aa, Homo sapiens
MFLFIEEREDCKILCLCSRAFVEDRKLYNLGLKGYYIRDSGNNSGDQATEEEEGGYSCGTAESHDSKGIGLDESELDSEAELMRSMGLPLQFGRITAHKDFEVSMNTRNKVKIKKKKHQKKYLDEIVQESWRKEYEEDDILASDDPSSIEQYENTRTYELQSKKDTETENPPVENTLSPKLEITEKWEKYWNEYGGGLLWQSWQEKHPGQALSSEPWNFPDTKEEWEQHYSQLYWYYLEQFQYWEAQGWTFDASQSCDTDTYTSKTEADDKNDEKCMKVDLVSFPSSPIMVDNDSSGTSDKDHSEILDGISNIKLNSEEVTQSQLDSCTSHDGHQQLSEVSSKRECPASGQSEPRNGGTNEESNSSGNTNTDPPAEDSQKSSGANTSKDRPHASGTDGDESEEDPPEHKPSKLKRSHELDIDENPASDFDDSGSLLGFKYGSGQKYGGIPNFSHRQVRYLEKNVKLKSKYLDMRRQIKMKNKHIFFTKESEKPFFKKSKILSKVEKFLTWVNKPMDEEASQESSSHDNVHDASTSSDSEEQDMSVKKGDDLLETNNPEPEKCQSVSSAGELETENYERDSLLATVPDEQDCVTQEVPDSRQAETEAEVKKKKNKKKNKKVNGLPPEIAAVPELAKYWAQRYRLFSRFDDGIKLDREGWFSVTPEKIAEHIAGRVSQSFKCDVVVDAFCGVGGNTIQFALTGMRVIAIDIDPVKIALARNNAEVYGIADKIEFICGDFLLLASFLKADVVFLSPPWGGPDYATAETFDIRTMMSPDGFEIFRLSKKITNNIVYFLPRNADIDQVASLAGPGGQVEIEQNFLNNKLKTITAYFGDLIRRPASET

SEQ ID NO: 46573 - protein, 643 aa, Homo sapiens
MGLPLQFGRITAHKDFEVSMNTRNKVKIKKKKHQKKYLDEIVQESWRKEYEEDDILASDDPSSIEQYENTRTYELQSKKDTETENPPVENTLSPKLEITEKWEKYWNEYGGGLLWQSWQEKHPGQALSSEPWNFPDTKEEWEQHYSQLYWYYLEQFQYWEAQGWTFDASQSCDTDTYTSKTEADDKNDEKCMKVDLVSFPSSPIMVDNDSSGTSDKDHSEILDGISNIKLNSEEVTQSQLDSCTSHDGHQQLSEVSSKRECPASGQSEPRNGGTNEESNSSGNTNTDPPAEDSQKSSGANTSKDRPHASGTDGDESEEDPPEHKPSKLKRSHELDIDENPASDFDDSGSLLGFKYGSGQKYGGIPNFSHRQVRYLEKNVKLKSKYLDMRRQIKMKNKHIFFTKESEKPFFKKSKILSKVEKFLTWVNKPMDEEASQESSSHDNVHDASTSSDSEEQDMSVKKGDDLLETNNPEPEKCQSVSSAGELETENYERDSLLATVPDEQDCVTQEVPDSRQAETEAEVKKKKNKKKNKKVNGLPPEIAAVPELAKYWAQRYRLFSRFDDGIKLDREGWFSVTPEKIAEHIAGRVSQSFKCDVVVDAFCGVGGNTIQFALTGMRDFLRRSLIILFIFFQEMLILTRWHP

SEQ ID NO: 46574 - protein, 423 aa, Homo sapiens
MKVLEEHGEWWKAKSLLTKKEGFIPSNYVAKLNTLETEEWFFKDITRKDAERQLLAPGNSAGAFLIRESETLKGSFSLSVRDFDPVHGDVIKHYKIRSLDNGGYYISPRITFPCISDMIKHYQKQADGLCRRLEKACISPKPQKPWDKDAWEIPRESIKLVKRLGAGQFGEVWMGYYNNSTKVAVKTLKPGTMSVQAFLEEANLMKTLQHDKLVRLYAVVTREEPIYIITEYMAKGSLLDFLKSDEGGKVLLPKLIDFSAQIAEGMAYIERKNYIHRDLRAANVLVSESLMCKIADFGLARVIEDNEYTAREGAKFPIKWTAPEAINFGCFTIKSDVWSFGILLYEIVTYGKIPYPGRTNADVMTALSQGYRMPRVENCPDELYDIMKMCWKEKAEERPTFDYLQSVLDDFYTATEGQYQQQP

SEQ ID NO: 46575 - protein, 297 aa, Homo sapiens [sequence omitted]

SEQ ID NO: 46576 - protein, 242 aa, Homo sapiens [sequence omitted]

SEQ ID NO: 46577 - protein, 750 aa, Homo sapiens
MITAILQSRLARTSFDKNRFQNISEKLHMECKAEMVTPLVTNPGHVCITDTNLYFQPLNGYPKPVVQITLQDVRRIYKRRHGLMPLGLEVFCTEDDLCSDIYLKFYEPQDRDDLYFYIATYLEHHVAEHTAESYMLQWQRGHLSNYQYLLHLNNLADRSCNDLSQYPVFPWIIHDYSSSELDLSNPGTFRDLSKPVGALNKERLERLLTRYQEMPEPKFMYGSHYSSPGYVLFYLVRIAPEYMLCLQNGRFDNADRMFNSIAETWKNCLDGATDFKELIPEFYGDDVSFLVNSLKLDLGKRQGGQMVDDVELPPWASSPEDFLQKSKDALESNYVSEHLHEWIDLIFGYKQKGSDAVGAHNVFHPLTYEGGVDLNSIQDPDEKVAMLTQILEFGQTPKQLFVTPHPRRITPKFKSLSQTSSYNASMADSPGEESFEDLTEESKTLAWNNITKLQLHEHYKIHKEAVTGITVSRNGSSVFTTSQDSTLKMFSKESKMLQRSISFSNMALSSCLLLPGDATVITSSWDNNVYFYSIAFGRRQDTLMGHDDAVSKICWHDNRLYSASWDSTVKVWSGVPAEMPGTKRHHFDLLAELEHDVSVDTISLNAASTLLVSGTKEGTVNIWDLTTATLMHQIPCHSGIVCDTAFSPDSRHVLSTGTDGCLNVIDVQTGMLISSMTSDEPQRCFVWDGNSVLSGSQSGELLVWDLLGAKISERIQGHTGAVTCIWMNEQCSSIITGGEDRQIIFWKLQY

SEQ ID NO: 46578 - protein, 700 aa, Homo sapiens
MVIALLGVWTSVAVVWFDLVDYEEVLGKLGIYDADGDGDFDVDDAKVLLGLKERSTSEPAVPPEEAEPHTEPEEQVPVEAEPQNIEDEAKEQIQSLLHEMVHAEHVEGEDLQQEDGPTGEPQQEDDEFLMATDVDDRFETLEPEVSHEETEHSYHVEETVSQDCNQDMEEMMSEQENPDSSEPVVEDERLHHDTDDVTYQVYEEQAVYEPLENEGIEITEVTAPPEDNPVEDSQVIVEEVSIFPVEEQQEVPPETNRKTDDPEQKAKVKKKKPKLLNKFDKTIKAELDAAEKLRKRGKIEEAVNAFKELVRKYPQSPRARYGKAQCEDDLAEKRRSNEVLRGAIETYQEVASLPDVPADLLKLSLKRRSDRQQFLGHMRGSLLTLQRLVQLFPNDTSLKNDLGVGYLLIGDNDNAKKVYEEVLSVTPNDGFAKVHYGFILKAQNKIAESIPYLKEGIESGDPGTDDGRFYFHLGDAMQRVGNKEAYKWYELGHKRGHFASVWQRSLYNVNGLKAQPWWTPKETGYTELVKSLERNWKLIRDEGLAVMDKAKGLFLPEDENLREKGDWSQFTLWQQGRRNENACKGAPKTCTLLEKFPETTGCRRGQIKYSIMHPGTHVWPHTGPTNCRLRMHLGLVIPKEGCKIRCANETKTWEEGKVLIFDDSFEHEVWQDASSFRLIFIVDVWHPELTPQQRRSLPAI

SEQ ID NO: 46579 - protein, 236 aa, Homo sapiens [sequence omitted]

SEQ ID NO: 46580 - protein, 269 aa, Homo sapiens
MVIALLGVWTSVAVVWFDLVDYEEVLAKAKDFRYNLSEVLQGKLGIYDADGDGDFDVDDAKVLLGLKERSTSEPAVPPEEAEPHTEPEEQVPVEAEPQNIEDEAKEQIQSLLHEMVHAEHVEGEDLQQEDGPTGEPQQEDDEFLMATDVDDRFETLEPEVSHEETEHSYHVEETVSQDCNQDMEEMMSEQENPDSSEPVVEDERLHHDTDDVTYQVYEEQVYEPLENEGIEITEVTAPPEDNPVEDSQVIVEEVSIFPVEEQQEVPPDT

SEQ ID NO: 46581 - protein, 112 aa, Homo sapiens
MPLNFTGGQLHSRMFQNFPTELLLSLAVEPLTANFHKWSLSVKNFTMNEKLKKFFNVLTTNTDGKIEFISTMEVFLGIFLNGVVKKKSKRIKGARMKKEMKKMTSVSSNIAD

SEQ ID NO: 46582 - protein, 437 aa, Homo sapiens [sequence omitted]

SEQ ID NO: 46583 - protein, 94 aa, Homo sapiens
MPNMLEILKEMNSVKLRSVKRSEQDVKPKPVDATDPAALIAEALKKKFAYRYRSDSQDEVEKGIPKSESEATSERVLSLPAGFIQPHVSKHCLG

SEQ ID NO: 46584 - protein, 327 aa, Homo sapiens
MAQKTWELANNMQEAQSIDEIYKYDKKQQQEILAAKPWTKDHHYFKYCKISALALLKMVMHARSGGNLEVMGLMLGKVDGETMIIMDSFALPVEGTETRVNAQAAAYEYMAAYIENAKQVGRLENAIGWYHSHPGYGCWLSGIDVSTQMLNQQFQEPFVAVVIDPTRTISAGKVNLGAFRTYPKGYKPPDEGPSEYQTIPLNKIEDFGVHCKQYYALEVSYFKSSLDRKLLELLWNKYWVNTLSSSSLLTNADYTTGQVFDLSEKLEQSEAQLGRGSFMLGLETHDRKSEDKLAKATRDSCKTTIEAIHGLMSQVIKDKLFNQINIS

SEQ ID NO: 46585 - protein, 288 aa, Homo sapiens
MSHHYFKYCKISALALLKMVMHARSGGNLEVMGLMLGKVDGETMIIMDSFALPVEGTETRVNAQAAAYEYMAAYIENAKQVGRLENAIGWYHSHPGYGCWLSGIDVSTQMLNQQFQEPFVAVVIDPTRTISAGKVNLGAFRTYPKGYKPPDEGPSEYQTIPLNKIEDFGVHCKQYYALEVSYFKSSLDRKLLELLWNKYWVNTLSSSSLLTNADYTTGQVFDLSEKLEQSEAQLGRGSFMLGLETHDRKSEDKLAKATRDSCKTTIEAIHGLMSQVIKDKLFNQINIS

SEQ ID NO: 46586 - protein, 809 aa, Homo sapiens
MNKTRKIMEHGGATFINAFVTTPMCCPSRSSMLTGKYVHNHNVYTNNENCSSPSWQAMHEPRTFAVYLNNTGYRTAFFGKYLNEYNGSYIPPGWREWLGLIKNSRFYNYTVCRNGIKEKHGFDYAKDYFTDLITNESINYFKMSKRMYPHRPVMMVISHAAPHGPEDSAPQFSKLYPNASQHITPSYNYAPNMDKHWIMQYTGPMLPIHMEFTNILQRKRLQTLMSVDDSVERLYNMLVETGELENTYIIYTADHGYHIGQFGLVKGKSMPYDFDIRVPFFIRGPSVEPGSIVPQIVLNIDLAPTILDIAGLDTPPDVDGKSVLKLLDPEKPGNRFRTNKKAKIWRDTFLVERGKFLRKKEESSKNIQQSNHLPKYERVKELCQQARYQTACEQPGQKWQCIEDTSGKLRIHKCKGPSDLLTVRQSTRNLYARGFHDKDKECSCRESGYRASRSQRKSQRQFLRNQGTPKYKPRFVHTRQTRSLSVEFEGEIYDINLEEEEELQVLQPRNIAKRHDEGHKGPRDLQASSGGNRGRMLADSSNAVGPPTTVRVTHKCFILPNDSIHCERELYQSARAWKDHKAYIDKEIEALQDKIKNLREVRGHLKRRKPEECSCSKQSYYNKEKGVKKQEKLKSHLHPFKEAAQEVDSKLQLFKENNRRRKKERKEKRRQRKGEECSLPGLTCFTHDNNHWQTAPFWNLGSFCACTSSNNNTYWCLRTVNETHNFLFCEFATGFLEYFDMNTDPYQLTNTVHTVERGILNQLHVQLMELRSCQGYKQCNPRPKNLDVGNKDGGSYDLHRGQLWDGWEG

SEQ ID NO: 46587 - protein, 552 aa, Homo sapiens
MQLTAENSPVTPVGAQKTALRISQSRMIGNSASRPTMPSGEWAPQSSAVRVTCAATTSAMNRPVQGGMIRNPAASIPMRPSSQPGQRQTLQSQVMNIGPSELEMNMGGPQYSQQQAPPNQTAPWPESILPIDQASFASQNRQPFGSSPDDLLCPHPAAESPSDEGALLDQLYLALRNFDGLEEIDRALGIPELVSQSQAVDPEQFSSQDSNIMLEQKAPVFPQQYASQAQMAQGSYSPMQDPNFHTMGQRPSYATLRMQPRPGLRPTGLVQNQPNQLRLQLQHRLQAQQNRQPLMNQISNVSNVNLTLRPGVPTQAPINAQMLAQRQREILNQHLRQRQMHQQQQVQQRTLMMRGQGLNMTPSMVAPSGMPATMSNPRIPQANAQQFPFPPNYGISQQPDPGFTGATTPQSPLMSPRMAHTQSPMMQQSQANPAYQAPSDINGWAQGNMGGNSMFSQQSPPHFGQQANTSMYSNNMNINVSMATNTGGMSSMNQMTGQISMTSVTSVPTSGLSSMGPEQVNDPALRGGNLFPNQLPGMDMIKQEGDTTRKYC

SEQ ID NO: 46588 - protein, 195 aa, Homo sapiens
MELRGLQREYPVPASKRPPLRGVERSYASPSDNSSAEEEDPDGEEERCALGTAGSAEGCKRKRPRVAGGGGAGGSAGGGGKKPLPAKGSAAECKQSQRNAANARERARMRVLSKAFSRLKTSLPWVPPDTKLSKLDTLRLASSYIAHLRQLLQEDRYENGYVHPVNLTWPFVVSGRPDSDTKEVSAANRLCGTTA

SEQ ID NO: 46589 - protein, 37 aa, Homo sapiens
MPSATSKSSLRPPQKQMLSCFLYSCRTTSNHPNTREH

SEQ ID NO: 46590 - protein, 259 aa, Homo sapiens
MALCALSRLWPGAQAGCAEAGRCCPGRDPACFARGWRLDRVYGTCFCDQACRFTGDCCFDYDRACPARPCFVGEWSPWSGCADQCKPTTRVRRRSVQQEPQNGGAPCPPLEERAGCLEYSTPQGQDCGHTYVPAFITTSAFNKERTRQATSPHWSTHTEDAGYCMEFKTESLTPHCALENWPLTRWMQYLREGYTVCVDCQPPAMNSVSLRCSGDGLDSDGNQTLHWQAIGNPRCQGTWKKVRRVDQCSCPAVHSFIFI

SEQ ID NO: 46591 - protein, 159 aa, Homo sapiens
MQTTGRRVEVWFPKRLQKELLALQNDPPPGMTLNEKSVQNSITQWIVDMEGAPGTLYEGEKFQLLFKFSSRYPFDSPQVMFTGENIPVHPHVYSNGHICLSILTEDWSPALSVQSVCLSIISMLSSCKEKRRPPDNSFYVRTCNKNPKKTKWWYHDDTC

SEQ ID NO: 46592 - protein, 74 aa, Homo sapiens
MLAETSTVFHQNDVKIPDAKHVFTTFYAKTKSLLVNPVLFPNREDYIHLMGYDKEEFILYMEETSEEKRHKDDK

SEQ ID NO: 46593 - protein, 96 aa, Homo sapiens [sequence omitted]

SEQ ID NO: 46594 - protein, 3521 aa, Homo sapiens
MEHHCPNARLPVLKDDNESEISELEDSDVENLTGEIVYQPDGSAYIIEDSKESGQNAQTGANSKLFSTAMFLDSLASAGEKSDQSASAPMSFYPQIINTFHIASSLGKPFTADQAFPNTSALAGVGPVLHSFRVYDLRHKREKDYLTSDGSAKNSCVSKDVPNNVDLSKFDGCVSDGKRKPVLMCFLCKLSFGYIRSFVTHAVHDHRMTLNDEEQKLLSNKCVSAIIQGIGKDKEPLISFLEPKKSTSVYPHFSTTNLIGPDPTFRGLWSAFHVENGDSLPAGFAFLKGSASTSSSAEQPLGITQMPKAEVNLGGLSSLVVNTPITSVSLSHSSSESSKMSESKDQENNCERPKESNVLHPNGECPVKSEPTEPGDEDEEDAYSNELDDEEVLGELTDSIGNKDFPLLNQSISPLSSSVLKFIEKGTSSSSATVSDDTEKKKQTAAVRASGSVASNYGISGKDFADASASKDSATAAHPSEIARGDEDSSATPHQHGFTPSTPGTPGPGGDGSPGSGIECPKCDTVLGSSRSLGGHMTMMHSRNSCKTLKCPKCNWHYKYQQTLEAHMKEKHPEPGGSCVYCKTGQPHPRLARGESYTCGYKPFRCEVCNYSTTTKGNLSIHMQSDKHLNNVQNLQNGNGEQVFGHSAPAPNTSLSGCGTPSPSKPKQKPTWRCEVCDYETNVARNLRIHMTSEKHMHNMMLLQQNMKQIQHNLHLGLAPAEAELYQYYLAQNIGLTGMKLENPADPQLMINPFQLDPATAAALAPGLVNNELPPEIRLASGQLMGDDLSLLTAGELSPYISDPALKLFQCAVCNKFTSDSLEALSVHVSSERSLPEEEWRAVIGDIYQCKLCNYNTQLKANFQLHCKTDKHMQKYQLVAHIKEGGKSNEWRLKCIAIGNPVHLKCNACDYYTNSVDKLRLHTTNHRHEAALKLYKHLQKQEGAVNPESCYYYCAVCDYTTKVKLNLVQHVRSVKHQQTEGLRKLQLHQQGLAPEEDNLSEIFFVKDCPPNELETASLGARTCDDDLTEQQLRSTSEEQSEEAEGAIKPTAVAEDDEKDTSERDNSEGKNSNKDSGIITPEKELKVSVAGGTQPLLLAKEEDVATKRSKPTEDNKFCHEQFYQCPYCNYNSRDQSRIQMHVLSQHSVQPVICCPLCQDVLSNKMHLQLHLTHLHSVSPDCVEKLLMTVPVPDVMMPNSMLLPAAASEKSERDTPAAVTAEGSGKYSGESPMDDKSMAGLEDSKANVEVKNEEQKPTKEPLEVSEWNKNSSKDVKIPDTLQDQLNEQQKRQPLSVSDRHVYKYRCNHCSLAFKTMQKLQIHSQYHAIRAATMCNLCQRSFRTFQALKKHLEAGHPELSEAELQQLYASLPVNGELWAESETMSQDDHGLEQEMEREYEVDHEGKASPVGSDSSSIPDDMGSEPKRTLPFRKGPNFTMEKFLDPSRPYKCTVCKESFTQKNILLVHYNSVSHLHKLKKVLQEASSPVPQETNSNTDNKPYKCSICNVAYSQSSTLEIHMRSVLHQTKARAAKLEPSGHVAGGHSIAANVNSPGQGMLDSMSLAAVNSKDTHLDAKELNKKQTPDLISAQPAHHPPQSPAQIQMQLQHELQQQAAFFQPQFLNPAFLPHFPMTPEALLQFQQPQFLFPFYIPGTEFSLGPDLGLPGSATFGMPGMTGMAGSLLEDLKQQIQTQHHVGQTQLQILQQQAQQYQATQPQLQPQKQQQQPPPPQQQQQQQASKLLKQEQSNIVSADCQIMKDVPSYKEAEDISEKPEKPKQEFISEGEGLKEGKDTKKQKSLEPSIPPPRIASGARGNAAKALLENFGFELVIQYNENRQKVQKKGKSGEGENTDKLECGTCGKLFSNVLILKSHQEHVHGQFFPYAALEKFARQYREAYDKLYPISPSSPETPPPPPPPPPLPPAPPQPSSMGPVKIPNTVSTPLQAPPPTPPPPPPPPPPPPPPPPPPPPSAPPQVQLPVSLDLPLFPSIMMQPVQHPALPPQLALQLPQMDALSADLTQLCQQQLGLDPNFLRHSQFKRPRTRITDDQLKILRAYFDINNSPSEEQIQEMAEKSGLSQKVIKHWFRNTLFKERQRNKDSPYNFSNPPITVLEDIRIDPQPTSLEHYKSDASFSKRSSRTRFTDYQLRVLQDFFDTNAYPKDDEIEQLSTVLNLPTRVIVVWFQNARQKARKSYENQAETKDNEKRELTNERYIRTSNMQYQCKKCNVVFPRIFDLITHQKKQCYKDEDDDAQDESQTEDSMDATDQVVYKHCTVSGQTDAAKNAAAPAASSGSGTSTPLIPSPKPEPEKTSPKPEYPAEKPKQSDPSPPSQGTKPALPLASTSSDPPQASTAQPQPQPQPPKQPQLIGRPPSASQTPVPSSPLQISMTSLQNSLPPQLLQYQCDQCTVAFPTLELWQEHQHMHFLAAQNQFLHSPFLERPMDMPYMIFDPNNPLMTGQLLGSSLTQMPPQASSSHTTAPTTVAASLKRKLDDKEDNNCSEKEGGNSGEDQHRDKRLRTTITPEQLEILYEKYLLDSNPTRKMLDHIAREVGLKKRVVQVWFQNTRARERKGQFRAVGPAQSHKRCPFCRALFKAKSALESHIRSRHWNEGKQAGYSLPPSPLISTEDGGESPQKYIYFDYPSLPLTKIDLSSENELASTVSTPVSKTAELSPKNLLSPSSFKAECSEDVENLNAPPAEAGYDQNKTDFDETSSINTAISDATTGDEGNTEMESTTGSSGDVKPALSPKEPKTLDTLPKPATTPTTEVCDDKFLFSLTSPSIHFNDKDGDHDQSFYITDDPDDNADRSETSSIADPSSPNPFGSSNPFKSKSNDRPGHKRFRTQMSNLQLKVLKACFSDYRTPTMQECEMLGNEIGLPKRVVQVWFQNARAKEKKFKINIGKPFMINQGGTEGTKPECTLCGVKYSARLSIRDHIFSKQHISKVRETVGSQLDREKDYLAPTTVRQLMAQQELDRIKKASDVLGLTVQQPGMMDSSSLHGISLPTAYPGLPGLPPVLLPGMNGPSSLPGFPQNSNTLTPPGAGMLGFPTSATSSPALSLSSAPTKPLLQTPPPPPPPPPPPPSSSLSGQQTEQQNKESEKKQTKPNKVKKIKEEELEATKPEKHPKKEEKISSALSVLGKVVGETHVDPIQLQALQNAIAGDPASFIGGQFLPYFIPGFASYFTPQLPGTVQGGYFPPVCGMESLFPYGPTMPQTLAGLSPGALLQQYQQYQQNLQESLQKQQKQQQEQQQKPVQAKTSKVESDQPQNSNDASETKEDKSTATESTKEEPQLESKSADFSDTYVVPFVKYEFICRKCQMMFTDEDAAVNHQKSFCYFGQPLIDPQETVLRVPVSKYQCLACDVAISGNEALSQHLQSSLHKEKTIKQAMRNAKEHVRLLPHSVCSPNPNTTSTSQSAASSNNTYPHLSCFSMKSWPNILFQASARRAASPPSSPPSLSLPSTVTSSLCSTSGVQTSLPTESCSDESDSELSQKLEDLDNSLEVKAKPASGLDGNFNSIRMDMFSV

SEQ ID NO: 46595 - protein, 61 aa, Homo sapiens
MRQGFHRRTWSKNSHCHSYRLSSLEGAAGTGKRDLQRRHGFQKRECEECKQSAKNKPVGCT

SEQ ID NO: 46596 - protein, 112 aa, Homo sapiens
MKEVGVGFATRKVAGMAKPNMIISVNGDVITIKSESTFKNTEISFILGQEFDEVTADDRKVKSTITLDGGVLVHVQKWDGKSTTIKRKREDDKLVVECVMKGVTSTRVYERA

SEQ ID NO: 46597 - protein, 240 aa, Homo sapiens
MGNPGTFKRGLLLSALSYLGFETYQVISQAAVVHATAKVEEILEQADYLYESGETEKLYQLLTQYKESEDAELLWRLARASRDVAQLSRTSEEEKKLLVYEALEYAKRALEKNESSFASHKKAIELNPKDATSIHLMGIWCYTFAEMPWYQRRIAKMLFATPPSSTYEKALGYFHRAEQVDPNFYSKNLLLLGKTYLKLHNKKLAAFWLMKAKDYPAHTEEDKQIQTEAAQLLTSFSEKN

SEQ ID NO: 46598 - protein, 421 aa, Homo sapiens
MKTGRPAGKGSITISAEEIKDNRVVLFEMEARKLDNKDLFGKSDPYLEFHKQTSDGNWLMVHRTEVVKNNLNPVWRPFKISLNSLCYGDMDKTIKVECYDYDNDGSHDLIGTFQTTMTKLKEASRSSPVEFECINEKKRQKKKSYKNSGVISVKQCEITVECTFLDYIMGGCQLNFTVGVDFTGSNGDPRSPDSLHYISPNGVNEYLTALWSVGLVIQDYDADKMFPAFGFGAQIPPQWQVSHEFPMNFNPSNPYCNGIQGIVEAYRSCLPQIKLYGPTNFSPIINHVARFAAAATQQQTASQYFVLLIITDGVITDLDETRQAIVNASRLPMSIIIVGVGGADFSAMEFLDGDGGSLRSPLGEVAIRDIVQFVPFRQFQNAPKEALAQCVLAEIPQQVVGYFNTYKLLPPKNPATKQQKQ

SEQ ID NO: 46599 - protein, 438 aa, Homo sapiens
MTTKNYCDPQGHPSTGLKTTTPGPSLSQGVSVDEKLMPSAPVNTTTYVADTESEQADTWDLSERPKEIKVSKMEQKFRMLSQDAPTVKESCKTSSNNNSMVSNTLAKMRIPNYQLSPTKLPSINKSKDRASQQQQTNSIRNYFQPSTKKRERDEENQEMSSCKSARIETSCSLLEQTQPATPSLWKNKEQHLSENEPVDTNSDNNLFTDTDLKSIVKNSASKSHAAEKLRSNKKREMDDVAIEDEVLEQLFKDTKPELEIDVKVQKQEEDVNVRKRPRMDIETNDTFSDEAVPESSKISQENEIGKKRELKEDSLWSAKEISNNDKLQDDSEMLPKKLLLTEFRSLVIKNSTSRNPSGINDDYGQLKNFKKFKKVTYPGAGKLPHIIGGSDLIAHHARKNTELEEWLRQEMEVQNQHAKEESLADDLFRYNPYLKRRR

SEQ ID NO: 46600 - protein, 116 aa, Homo sapiens [sequence omitted]

SEQ ID NO: 46601 - protein, 186 aa, Homo sapiens
MGLMMVGVLIGTFIAHVVCKRLLTAWVAARIQSSEKLSAVIRVVEGGSGLKVVALARLTPIPFGLQNAVFSITDLSLPNYLMASSVGLLPTQLLNSYLGTTLRTMEDVIAEQSVSGYFVFCLQIIISIGLMFYVVHRAQVELNAAIVACEMELKSSLVKGNQPNTSGSSFYNKRTLTFSGGGINVV

SEQ ID NO: 46602 - protein, 162 aa, Homo sapiens
MRRTLENRNAQTKQLQTAVSNVEKHFGELCQIFAAYVRKTARLRDKADLLVNEINAYAATETPHLKLGLMNFADEFAKLQDYRQAEVERLEAKVVEPLKTYGTIVKMKRDDLKATLTARNREAKQLTQLERTRQRNPSDRHVINFEEFSVKRRNIRNLYSLC

SEQ ID NO: 46603 - protein, 288 aa, Homo sapiens [sequence omitted]

SEQ ID NO: 46604 - protein, 717 aa, Homo sapiens
MGVISPDDFSSGRCFQLGGGSTAISHSSQVARKCFSNPFKSVCKPSSKENRQNDFQNCKPRHDPYTPNSLVMPRPDKNHQWVFNKNCFPLVDVVIDPYLVYHLRPHQKEGIIFLYECVMGMRMNGRCGAILADEMGLGKTLQCISLIWTLQCQGPYGGKPVIKKTLIVTPGSLVNNWKKEFQKWLGSERIKIFTVDQDHKVEEFIKSIFYSVLIISYEMLLRSLDQIKNIKFDLLICDEGHRLKNSAIKTTTALISLSCEKRIILTGTPIQNDLQEFFALIDFVNPGILGSLSSYRKIYEEPIILSREPSASEEEKELGERRAAELTCLTGLFILRRTQEIINKYLPPKIENVVFCRPGALQIELYRKLLNSQVVRFCLQGLLENSPHLICIGALKKLCNHPCLLFNSIKEKECSSTCDKNEEKSLYKGLLSVFPADYNPLLFTEKESGKLQVLSKLLAVIHELRPTEKVVLVSNYTQTLNILQEVCKRHGYAYTRLDGQTPISQRQQIVDGFNSQHSSFFIFLLSSKAGGVGLNLIGGSHLILYDIDWNPATDIQAMSRVWRDGQKYPVHIYRLLTTGTIEEKIYQRQISKQGLCGAVVDLTKTSEHIQFSVEELKNLFTLHESSDCVTHDLLDCECTGEEVHTGDSLEKFIVSRDCQLGPHHQKSNSLKPLSMSQLKQWKHFSGDHLNLTDPFLERITENVSFIFQNITTQATGT

SEQ ID NO: 46605 - protein, 1477 aa, Homo sapiens
MTYDPYDRELVPLLYFSCPYKTTFEIEISRMKDQGPDKENSGAIEASVKLTELLDLYREDRGAKWVTALEEIPSLIIKGLSYLQLKNTKQDSLGQLVDWTMQALNLQVALRQPIALNVRQLKAGTKLVSSLAECGAQGVTGLLQAGVISGLFELLFADHVSSSLKLNAFKALDSVISMTEGMEAFLRGRQNEKSGYQKLLELILLDQTVRVVTAGSAILQKCHFYEVLSEIKRLGDHLAEKTSSLPNHSEPDHDTDAGLERTNPEYENEVEASMDMDLLESSNISEGEIERLINLLEEVFHLMETAPHTMIQQPVKSFPTMARITGPPERDDPYPVLFRYLHSHHFLELVTLLLSIPVTSAHPGVLQATKDVLKFLAQSQKGLLFFMSEYEATNLLIRALCHFYDQDEEEGLQSDGVIDDAFALWLQDSTQTLQCITELFSHFQRCTASEETDHSDLLGTLHNLYLITFNPVGRSAVGHVFSLEKNLQSLITLMEYYSKEALGDSKSKKSVAYNYACILILVVVQSSSDVQMLEQHAASLLKLCKADENNAKLQELGKWLEPLKNLRFEINCIPNLIEYVKQNIDNLMTPEGVGLTTALRVLCNVACPPPPVEGQQKDLKWNLAVIQLFSAEGMDTFIRVLQKLNSILTQPWRLHVNMGTTLHRVTTISMARCTLTLLKTMLTELLRGGSFEFKDMRVPSALVTLHMLLCSIPLSGRLDSDEQKIQNDIIDILLTFTQGVNEKLTISEETLANNTWSLMLKEVLSSILKVPEGFFSGLILLSELLPLPLPMQTTQVIEPHDISVALNTRKLWSMHLHVQAKLLQEIVRSFSGTTCQPIQHMLRRICVQLCDLASPTALLIMRTVLDLIVEDLQSTSEDKEKQYTSQTTRLLALLDALASHKACKLAILHLINGTIKGDERYAEIFQDLLALVRSPGDSVIRQQCVEYVTSILQSLCDQDIALILPSSSEGSISELEQLSNSLPNKELMTSICDCLLATLANSESSYNCLLTCVRTMMFLAEHDYGLFHLKSSLRKNSSALHSLLKRVVSTFSKDTGELASSFLEFMRQILNSDTIGCCGDDNGLMEVEGAHTSRTMSINAAELKQLLQSKEESPENLFLELEKLVLEHSKDDDNLDSLLDSVVGLKQMLESSGDPLPLSDQDVEPVLSAPESLQNLFNNRTAYVLADVMDDQLKSMWFTPFQAEEIDTDLDLVKVDLIELSEKCCSDFDLHSELERSFLSEPSSPGRTKTTKGFKLGKHKHETFITSSGKSEYIEPAKRAHVVPPPRGRGRGGFGQGIRPHDIFRQRKQNTSRPPSMHVDDFVAAESKEVVPQDGIPPPKRPLKVSQKISSRGGFSGNRGGRGAFHSQNRFFTPPASKGNYSRREGTRGSSWSAQNTPRGNYNESRGGQSNFNRGPLPPLRPLSSTGYRPSPRDRASRGRGGLGPSWASANSGSGGSRGKFVSGGSGRGRHVRSFTR

SEQ ID NO: 46606 - protein, 812 aa, Homo sapiens
MTYDPYDRELVPLLYFSCPYKTTFEIEISRMKDQGPDKENSGAIEASVKLTELLDLYREDRGAKWVTALEEIPSLIIKGLSYLQLKNTKQDSLGQLVDWTMQALNLQVALRQPIALNVRQLKAGTKLVSSLAECGAQGVTGLLQAGVISGLFELLFADHVSSSLKLNAFKALDSVISMTEGMEAFLRGRQNEKSGYQKLLELILLDQTVRVVTAGSAILQKCHFYEVLSEIKRLGDHLAEKTSSLPNHSEPDHDTDAGLERTNPEYENEVEASMDMDLLESSNISEGEIERLINLLEEVFHLMETAPHTMIQQPVKSFPTMARITGPPERDDPYPVLFRYLHSHHFLELVTLLLSIPVTSAHPGVLQATKDVLKFLAQSQKGLLFFMSEYEATNLLIRALCHFYDQDEEEGLQSDGVIDDAFALWLQDSTQTLQCITELFSHFQRCTASEETDHSDLLGTLHNLYLITFNPVGRSAVGHVFSLEKNLQSLITLMEYYSKEALGDSKSKKSVAYNYACILILVVVQSSSDVQMLEQHAASLLKLCKADENNAKLQELGKWLEPLKNLRFEINCIPNLIEYVKQNIDNLMTPEGVGLTTALRVLCNVACPPPPVEGQQKDLKWNLAVIQLFSAEGMDTFIRVLQKLNSILTQPWRLHVNMGTTLHRVTTISMARCTLTLLKTMLTELLRGGSFEFKDMRVPSALVTLHMLLCSIPLSGRLDSDEQKIQNDIIDILLTFTQGVNEKLTISEETLANNTWSLMLKEVLSSILKVPEGFFSGLILLSELLPLPLPMQTTQVSLPYNMHLINDCSNTF

SEQ ID NO: 46607 - protein, 129 aa, Homo sapiens
MRDDTIYEDEDVKEAIRRLPENLYNDRMFRIKRALDLNLKHQILPKEQWTKYEEVFAVPALHSASYLDEKISPLSVPPDPKKSFCEANSHPLNCIETRQRPVDIHFFFFPKRLPPHNLSKQLITPSPQI

SEQ ID NO: 46608 - protein, 66 aa, Homo sapiens [sequence omitted]

SEQ ID NO: 46609 - protein, 455 aa, Homo sapiens [sequence omitted]

SEQ ID NO: 46610 - protein, 382 aa, Homo sapiens [sequence omitted]

SEQ ID NO: 46611 - protein, 953 aa, Homo sapiens
MLAGCFLLILGQIVLLPAEARERSRGRSISRGRHARTHPQTALLESSCENKRADLVFIIDSSRSVNTHDYAKVKEFIVDILQFLDIGPDVTRVGLLQYGSTVKNEFSLKTFKRKSEVERAVKRMRHLSTGTMTGLAIQYALNIAFSEAEGARPLRENVPRVIMIVTDGRPQDSVAEVAAKARDTGILIFAIGVGQVDFNTLKSIGSEPHEDHVFLVANFSQIETLTSVFQKKLCTAHMCSTLEHNCAHFCINIPGSYVCRCKQGYILNSDQTTCRIQDLCAMEDHNCEQLCVNVPGSFVCQCYSGYALAEDGKRCVAVDYCASENHGCEHECVNADGSYLCQCHEGFALNPDKKTCTKIDYCASSNHGCQHECVNTDDSYSCHCLKGFTLNPDKKTCRRINYCALNKPGCEHECVNMEESYYCRCHRGYTLDPNGKTCSRVDHCAQQDHGCEQLCLNTEDSFVCQCSEGFLINEDLKTCSRVDYCLLSDHGCEYSCVNMDRSFACQCPEGHVLRSDGKTCAKLDSCALGDHGCEHSCVSSEDSFVCQCFEGYILREDGKTCRRKDVCQAIDHGCEHICVNSDDSYTCECLEGFRLAEDGKRCRRKDVCKSTHHGCEHICVNNGNSYICKCSEGFVLAEDGRRCKKCTEGPIDLVFVIDGSKSLGEENFEVVKQFVTGIIDSLTISPKAARVGLLQYSTQVHTEFTLRNFNSAKDMKKAVAHMKYMGKGSMTGLALKHMFERSFTQGEGARPLSTRVPRAAIVFTDGRAQDDVSEWASKAKANGITMYAVGVGKAIEEELQEIASEPTNKHLFYAEDFSTMDEISEKLKKGICEALEDSDGRQDSPAGELPKTVQQPTESEPVTINIQDLLSCSNFAVQHRYLFEEDNLLRSTQKLSHSTKPSGSPLEEKHDQCKCENLIMFQNLANEEVRKLTQRLEEMTQRMEALENRLRYR

SEQ ID NO: 46612 - protein, 1012 aa, Homo sapiens [sequence omitted]

SEQ ID NO: 46613 - protein, 611 aa, Homo sapiens
MLYEKFSPAGPILSIRVCRDMITRRSLGYAYVNFQQPADAERALDTMNFDVIKGKPVRIMWSQRDPSLRKSGVGNIFIKNLDKSIDNKALYDTFSAFGNILSCKVVCDENGSKGYGFVHFETQEAAERAIEKMNGMLLNDRKVFVGRFKSRKEREAELGARAKEFTNVYIKNFGEDMDDERLKDLFGKFGPALSVKVMTDESGKSKGFGFVSFERHEDAQKAVDEMNGKELNGKQIYVGRAQKKVERQTELKRKFEQMKQDRITRYQGVNLYVKNLDDGIDDERLRKEFSPFGTITSAKVMMEGGRSKGFGFVCFSSPEEATKAVTEMNGRIVATKPLYVALAQRKEERQAHLTNQYMQRMASVRAVPNPVINPYQPAPPSGYFMAAIPQTQNRAAYYPPSQIAQLRPSPRWTAQGARPHPFQNMPGAIRPAAPRPPFSTMRPASSQVPRVMSTQRVANTSTQTMGPRPAAAAAAATPAVRTVPQYKYAAGVRNPQQHLNAQPQVTMQQPAVHVQGQEPLTASMLASAPPQEQKQMLGERLFPLIQAMHPTLAGKITGMLLEIDNSELLHMLESPESLRSKVDEAVAVLQAHQAKEAAQKAVNSATGVPTV

SEQ ID NO: 46614 - protein, 354 aa, Homo sapiens
MALVQELGVPPENIIYISPCKQVSQIKYAAKVGVNILTCDNEIELKKIARNHPNAKVLLHIATEDNIGGEEGNMKFGTTLKNCRHLLECAKELDVQIIGVKFHVSSACKESQVYVHALSDARCVFDMAGEIGFTMNMLDIGGGFTGTEFQLEEVNHVISPLLDIYFPEGSGVKIISEPGSYYVSSAFTLAVNIIAKKVVENDKFPSGVEKTGSDEPAFMYYMNDGVYGSFASKLSEDLNTIPEVHKKYKEDEPLFTSSLWGPSCDELDQIVESCLLPELNVGDWLIFDNMGADSFHEPSAFNDFQRPAIYYMMSFSDWYEMQDAGITSDSMMKNFFFVPSCIQLSQEDSFSAEA

SEQ ID NO: 46615 - protein, 150 aa, Homo sapiens [sequence omitted]

SEQ ID NO: 46616 - protein, 672 aa, Homo sapiens
MDECGDSSDEEICAKEANPPTAAAFQPCAYNQFQCLSRFTKVYTCLPESLKCDGNIDCLDLGDEIDCDVPTCGQWLKYFYGTFNSPNYPDFYPPGSNCTWLIDTGDHRKVILRFTDFKLDGTGYGDYVKIYDGLEENPHKLLRVLTAFDSHAPLTVVSSSGQIRVHFCADKVNAARGFNATYQVDGFCLPWEIPCGGNWGCYTEQQRCDGYWHCPNGRDETNCTMCQKEEFPCSRNGVCYPRSDRCNYQNHCPNGSDEKNCFFCQPGNFHCKNNRCVFESWVCDSQDDCGDGSDEENCPVIVPTRVITAAVIGSLICGLLLVIALGCTCKLYSLRMFERRSFETQLSRVEAELLRREAPPSYGQLIAQGLIPPVEDFPVCSPNQASVLENLRLAVRSQLGFTSVRLPMAGRSSNIWNRIFNFARSRHSGSLALVSADGDEVVPSQSTSREPERNHTHRSLFSVESDDTDTENERRDMAGASGGVAAPLPQKVPPTTAVEATVGACASSSTQSTRGGHADNGRDVTSVEPPSVSPARHQLTSALSRMTQGLRWVRFTLGRSSSLSQNQSPLRQLDNGVSGREDDDDVEMLIPISDGSSDFDVNDCSRPLLDLASDQGQGLRQPYNATNPGVRPSNRDGPCERCGIVHTAQIPDTCLEVTLKNETSDDEALLLC

SEQ ID NO: 46617 - protein, 390 aa, Homo sapiens
MKSEMAQIQQNAVQNHTATMLEIGTSLLSQTAEQTRKLTDVETQVLNQTSRLEIQLLENSLSTYKLEKQLLQQTNEILKIHEKNSLLEHKILEMEGKHKEELDTLKEEKENLQGLVTRQTYIIQELEKQLNRATTNNSVLQKQQLELMDTVHNLVNLCTKEVLLKGGKREEEKPFRDCADVYQAGFNKSGIYTIYINNMPEPKKVFCNMDVNGGGWTVIQHREDGSLDFQRGWKEYKMGFGNPSGEYWLGNEFIFAITSQRQYMLRIELMDWEGNRAYSQYDRFHIGNEKQNYRLYLKGHTGTAGKQSSLILHGADFSTKDADNDNCMCKCALMLTGGWWFDACGPSNLNGMFYTAGQNHGKLNGIKWHYFKGPSYSLRSTTMMIRPLDF

SEQ ID NO: 46618 - protein, 391 aa, Homo sapiens
MKSEMAQIQQNAVQNHTATMLEIGTSLLSQTAEQTRKLTDVETQVLNQTSRLEIQLLENSLSTYKLEKQLLQQTNEILKIHEKNSLLEHKILEMEGKHKEELDTLKEEKENLQGLVTRQTYIIQELEKQLNRATTNNSVLQKQQLELMDTVHNLVNLCTKEGVLLKGGKREEEKPFRDCADVYQAGFNKSGIYTIYINNMPEPKKVFCNMDVNGGGWTVIQHREDGSLDFQRGWKEYKMGFGNPSGEYWLGNEFIFAITSQRQYMLRIELMDWEGNRAYSQYDRFHIGNEKQNYRLYLKGHTGTAGKQSSLILHGADFSTKDADNDNCMCKCALMLTGGWWFDACGPSNLNGMFYTAGQNHGKLNGIKWHYFKGPSYSLRSTTMMIRPLDF

SEQ ID NO: 46619 - protein, 396 aa, Homo sapiens
MVDFAMDVYKNLYSDDIPHALREKRTTVVAQLKQLQAETEPIVKMFEDPETTRQMQSTRDGRMLFDYLADKHGFRQEYLDTLYRYAKFQYECGNYSGAAEYLYFFRVLVPATDRNALSSLWGKLASEILMQNWDAAMEDLTRLKETIDNNSVSSPLQSLQQRTWLIHWSLFVFFNHPKGRDNIIDLFLYQPQYLNAIQTMCPHILRYLTTAVITNKDVRKRRQVLKDLVKVIQQESYTYKDPITEFVECLYVNFDFDGAQKKLRECESVLVNDFFLVACLEDFIENARLFIFETFCRIHQCISINMLADKLNMTPEEAERWIVNLIRNARLDAKIDSKLGHVVMGNNAVSPYQQVIEKTKSLSFRSQMLAMNIEKKLNQNSRSEAPNWATQDSGFY

SEQ ID NO: 46620 - protein, 20 aa, Homo sapiens
MQIWQRTEIKWRPNNFANYS

SEQ ID NO: 46621 - protein, 116 aa, Homo sapiens
MTPTIRKTQKIVIKKREPLNFGIPDGSTGFSSRLAATQDLPFIHQSSELGDLDTWQENTNAWEEEEDAAWQAEEVLRQQKLADREKRAAEQQRKKMEKEAQRLMKKEQNKIGVKLS

SEQ ID NO: 46622 - protein, 143 aa, Homo sapiens
MVEEGNPHHYFVATQDQNLSVKVKKKPGVPLMFIIQNTMVLDKPSPKTIAFVKAVESGQLVSVHEKESIKHLKEEQGLVKNTEQSRRKKRKKISGPNPLSCLKKKKKAPDTQSSASEKKRKRKRIRNRSNPKVLSEKQNAEGE

SEQ ID NO: 46623 - protein, 532 aa, Homo sapiens
MLAKASISTENFRPNFDVSIPLFSKDHPRTGGERGFLKFNTIPPLRKYMLVFKGKRYLTGIGSDTRNALYHVHNGEDVVLLTTCKHGKDWQKHKDSRCDRDNTEYEKYDYREMLHNATFCLVPRGRRLGSFRFLEALQAACVPVMLSNGWELPFSEVINWNQAAVIGDERLLLQIPSTIRSIHQDKILALRQQTQFLWEAYFSSVEKIVLTTLEIIQDRIFKHISRNSLIWNKHPGGLFVLPQYSSYLGDFPYYYANLGLKPPSKFTAVIHAVTPLVSQSQPVLKLLVAAAKSQYCAQIIVLWNCDKPLPAKHRWPATAVPVVVIEGESKVMSSRFLPYDNIITDAVLSLDEDTVLSTTEVDFAFTVWQSFPERIVGYPARSHFWDNSKERWGYTSKWTNDYSMVLTGAAIYHKYYHYLYSHYLPASLKNMVDQLANCEDILMNFLVSAVTKLPPIKVTQKKQYKETMMGQTSRASRWADPDHFAQRQSCMNTFASWFGYMPLIHSQMRLDPVLFKDQVSILRKKYRDIERL

SEQ ID NO: 46624 - protein, 1789 aa, Homo sapiens [sequence omitted]

SEQ ID NO: 46625 - protein, 1773 aa, Homo sapiens [sequence omitted]

SEQ ID NO: 46626 - protein, 404 aa, Homo sapiens [sequence omitted]

SEQ ID NO: 46627 - protein, 482 aa, Homo sapiens
MKKSLETPIKLNKTVALCIAAYQEDPDYLRKCLQSVKRLTYPGIKVVMVIDGNSEDDLYMMDIFSEVMGRDKSATYIWKNNFHEKGPGETDESHKESSQHVTQLVLSNKSICIMQKWGGKREVMYTAFRALGRSVDYVQVCDSDTMLDPASSVEMVKVLEEDPMVGGVGGDVQILNKYDSWISFLSSVRYWMAFNIERACQSYFGCVQCISGPLGMYRNSLLHEFVEDWYNQEFMGNQCSFGDDRHLTNRVLSLGYATKYTARSKCLTETPIEYLRWLNQQTRWSKSYFREWLYNAMWFHKHHLWMTYEAIITGFFPFFLIATVIQLFYRGKIWNILLFLLTVQLVGLIKSSFASCLRGNIVMVFMSLYSVLYMSSLLPAKMFAIATINKAGWGTSGRKTIVVNFIGLIPVSVWFTILLGGVIFTIYKESKRPFSESKQTVLIVGTLLYACYWVMLLTLYVVLINKCGRRKKGQQYDMVLDV

SEQ ID NO: 46628 - protein, 290 aa, Homo sapiens [sequence omitted]

SEQ ID NO: 46629 - protein, 1220 aa, Homo sapiens
MLFDKLITNTAEAVLQKMDDMKKMRRQRMRELEDLGVFNETEESNLNMYTRGKQKDIQRTDEETTDNQEGSVESSEEGEDQEHEDDGEDEDDEDDDDDDDDDDDDDDEDDEDEEDGEEENQKRYYLRQRKATVYYQAPLEKPRHQRKPNIFYSGPASPARPRYRLSSAGPRSPYCKRMNRRRHAIHSSDSTSSSSSEDEQHFERRRKRSRNRAINRCLPLNFRKDELKGIYKDRMKIGASLADVDPMQLDSSVRFDSVGGLSNHIAALKEMVVFPLLYPEVFEKFKIQPPRGCLFYGPPGTGKTLVARALANECSQGDKRVAFFMRKGADCLSKWVGESERQLRLLFDQAYQMRPSIIFFDEIDGLAPVRSSRQDQIHSSIVSTLLALMDGLDSRGEIVVIGATNRLDSIDPALRRPGRFDREFLFSLPDKEARKEILKIHTRDWNPKPLDTFLEELAENCVGYCGADIKSICAEAALCALRRRYPQIYTTSEKLQLDLSSINISAKDFEVAMQKMIPASQRAVTSPGQALSTVVKPLLQNTVDKILEALQRVFPHAEFRTNKTLDSDISCPLLESDLAYSDDDVPSVYENGLSQKSSHKAKDNFNFLHLNRNACYQPMSFRPRILIVGEPGFGQGSHLAPAVIHALEKFTVYTLDIPVLFGVSTTSPEETCAQVIREAKRTAPSIVYVPHIHVWWEIVGPTLKATFTTLLQNIPSFAPVLLLATSDKPHSALPEEVQELFIRDYGEIFNVQLPDKEERTKFFEDLILKQAAKPPISKKKAVLQALEVLPVAPPPEPRSLTAEEVKRLEEQEEDTFRELRIFLRNVTHRLAIDKRFRVFTKPVDPDEVPDYVTVIKQPMDLSSVISKIDLHKYLTVKDYLRDIDLICSNALEYNPDRDPGDRLIRHRACALRDTAYAIIKEELDEDFEQLCEEIQESRKKRGCSSSKYAPSYYHVMPKQNSTLVGDKRSDPEQNEKLKTPSTPVACSTPAQLKRKIRKKSNWYLGTIKKRRKISQAKDDSQNAIDHKIESDTEETQDTSVDHNETGNTGESSVEENEKQQNASESKLELRNNSNTCNIENELEDSRKTTACTELRDKIACNGDASSSQIIHISDENEGKEMCVLRMTRARRSQVEQQQLITVEKALAILSQPTPSLVVDHERLKNLLKTVVKKSQNYNIFQLENLYAVISQCIYRHRKDHDKTSLIQKMEQEVENFSCSR

SEQ ID NO: 46630 - protein, 763 aa, Homo sapiens
MLYPYHLSDIMVKGLRITPFSYYTGIMEDIMNSEKSYDSLPNFTAADCLRLLGIGRNQYIDLMNQCRSSKKFFRRKTARDLLPIKPVEIAIEAWWVVQAGYITEDDIKICTLPEKCAVDKIIDSGPQLSGSLDYNVVHSLYNKGFIYLDVPISDDSCIAVPPLEGFVMNRVQGDYFETLLYKIFVSIDEHTNVAELANVLEIDLSLVKNAVSMYCRLGFAHKKGQVINLDQLHSSWKNVPSVNRLKSTLDPQKMLLSWDGGESRSPVQEASSATDTDTNSQEDPADTASVSSLSLSTGHTKRIAFLFDSTLTAFLMMGNLSPNLKSHAVTMFEVGKLSDESLDSFLIELEKVQSTGEGEAQRYFDHALTLRNTILFLRHNKDLVAQTAQPDQPNYGFPLDLLRCESLLGLDPATCSRVLNKNYTLLVSMAPLTNEIRPVSSCTPQHIGPAIPEVSSVWFKLYIYHVTGQGPPSLLLSKGTRLRKLPDIFQSYDRLLITSWGHDPGVVPTSNVLTMLNDALTHSAVLIQGHGLHGIGETVHVPFPFDETELQGEFTRVNMGVHKALQILRNRVDLQHLCGYVTMLNASSQLADRKLSDASDERGEPDLASGSDVNGSTESFEMVIEEATIDSATKQTSGATTEADWVPLELCFGIPLFSSELNRKVCRKIAAHGLCRKESLQNLLHSSRKLSLQVLNFVHSFQEGASILDIHTEPSFSSLLSQSSCADMGVPLPAKNLIFKDGVLSEWSGRSPSSLLIANLHLQ

SEQ ID NO: 46631 - protein, 714 aa, Homo sapiens [sequence omitted]

SEQ ID NO: 46632 - protein, 397 aa, Homo sapiens
MPDGSVALPVLGETLPEQHLQELRNRVAPGSPCMLTQLPDPVPSKRAQGCSPAQKLCLEVSRWVEGRGVKWSAELEADLPRSWQRHGNLLLLSEDCFQAKQWKNLGPELWETVALALGVQRLAKRGRVSPDGTRTPAVTLLLGDHGWVEHVDNGIRYKFDVTQCMFSFGNITEKLRVASLSCAGEVLVDLYAGIGYFTLPFLVHAGAAFVHACEWNPHAVVALRNNLEINGVADRCQIHFGDNRKLKLSNIADRVILGLIPSSEEGWPIACQVLRQDAGGILHIHQNVESFPGKNLQALGVSKVEKEHWLYPQQITTNQWKNGATRDSRGKMLSPATKPEWQRWAESAETRIATLLQQVHGKPWKTQILHIQPVKSYAPHVDHIVLDLECCPCPSVG

SEQ ID NO: 46633 - protein, 652 aa, Homo sapiens [sequence omitted]

SEQ ID NO: 46634 - protein, 21 aa, Homo sapiens
MALAPGQRAIFSASRWALPFP

SEQ ID NO: 46635 - protein, 159 aa, Homo sapiens
MRINNVPAEGENEVNNELANRMSLFYAEATPMLKTLSDATTKFVSENKNLPIENTTDCLSTMASVCRVMLETPEYRSRFTNEETVSFCLRVMVGVIILYDHVHPVGAFAKTSKIDMKGCIKVLKDQPPNSVEGLLNALRYTTKHLNDETTSKQIKSMLQ

SEQ ID NO: 46636 - protein, 1114 aa, Homo sapiens [sequence omitted]

SEQ ID NO: 46637 - protein, 346 aa, Homo sapiens
MGNPCASFDHYREFVVATLPQLKWLDGKEIEPSERIKALQDYSVIEPQIREQEKDHCLKRAKLKEEAQRKHQEEDKNEDKRSNAGFDGRWYTDINATLSSLESKDHLQAPDTEEHNTKKLDNSEDDLEFWNKPCLFTPESRLETLRHMEKQRKKQEKLSEKKKKVKPPRTLITEDGKALNVNEPKIDFSLKDNEKQIILDLAVYRYMDTSLIDVDVQPTYVRVMIKGKPFQLVLPAEVKPDSSSAKRSQTTGHLVICMPKVGEVITGGQRAFKSMKTTSDRSREQTNTRSKHMEKLEVDPSKHSFPDVTNIVQEKKHTPRRRPEPKIIPSEEDPTFEDNPEVPPLI

SEQ ID NO: 46638 - protein, 26 aa, Homo sapiens
MGRPVWAQLPREVVGSSGLLGRCLCH

SEQ ID NO: 46639 - protein, 85 aa, Homo sapiens [sequence omitted]

SEQ ID NO: 46640 - protein, 1142 aa, Homo sapiens
MQCAEDHQTLLVVVQPVGIVSEENFFRIYKRICSVSQISVRDSQRVLYIRYRHHYPPENNEWGDFQTHRKVVGLITITDCFSAKDWPQTFEKFHVQKEIYGSTLYDSRLFVFGLQGEIVEQPRTDVAFYPNYEDCQTVEKRIEDFIESLFIVLESKRLDRATDKSGDKIPLLCVPFEKKDFVGLDTDSRHYKKRCQGRMRKHVGDLCLQAGMLQDSLVHYHMSVELLRSVNDFLWLGAALEGLCSASVIYHYPGGTGGKSGARRFQGSTLPAEAANRHRPGAQEVLIDPGALTTNGINPDTSTEIGRAKNCLSPEDIIDKYKEAISYYSKYKNAGVIELEACIKAVRVLAIQKRSMEASEFLQNAVYINLRQLSEEEKIQRYSILSELYELIGFHRKSAFFKRVAAMQCVAPSIAEPGWRACYKLLLETLPGYSLSLDPKDFSRGTHRGWAAVQMRLLHELVYASRRMGNPALSVRHLSFLLQTMLDFLSDQEKKDVAQSLENYTSKCPGTMEPIALPGGLTLPPVPFTKLPIVRHVKLLNLPASLRPHKMKSLLGQNVSTKSPFIYSPIIAHNRGEERNKKIDFQWVQGDVCEVQLMVYNPMPFELRVENMGLLTSGVEFESLPAALSLPAESGLYPVTLVGVPQTTGTITVNGYHTTVFGVFSDCLLDNLPGIKTSGSTVEVIPALPRLQISTSLPRSAHSLQPSSGDEISTNVSVQLYNGESQQLIIKLENIGMEPLEKLEVTSKVLTTKEKLYGDFLSWKLEETLAQFPLQPGKVATFTINIKVKLDFSCQENLLQDLSDDGISVSGFPLSSPFRQVVRPRVEGKPVNPPESNKAGDYSHVKTLEAVLNFKYSGGPGHTEGYYRNLSLGLHVEVEPSVFFTRVSTLPATSTRQCHLLLDVFNSTEHELTVSTRSSEALILHAGECQRMAIQVDKFNFESFPESPGEKGQFANPKQLEEERREARGLEIHSKLGICWRIPSLKRSGEASVEGLLNQLVLEHLQLAPLQWDVLVDGQPCDREAVAACQVGDPVRLEVRLTNRSPRSVGPFALTVVPFQDHQNGVHNYDLHDTVSFVGSSTFYLDAVQPSGQSACLGALLFLYTGDFFLHIRFHEDSTSKELPPSWFCLPSVHVCALEAQA

SEQ ID NO: 46641 - protein, 813 aa, Homo sapiens
MDIPKIDIYHYELDIKPEKCPRRVNREIVEHMVQHFKTQIFGDRKPVFDGRKNLYTAMPLPIGRDKVELEVTLPGEGKDRIFKVSIKWVSCVSLQALHDALSGRLPSVPFETIQALDVVMRHLPSMRYTPVGRSFFTASEGCSNPLGGGREVWFGFHQSVRPSLWKMMLNIDVSATAFYKAQPVIEFVCEVLDFKSIEEQQKPLTDSQRVKFTKEIKGLKVEITHCGQMKRKYRVCNVTRRPASHQTFPLQQESGQTVECTVAQYFKDRHKLVLRYPHLPCLQVGQEQKHTYLPLEVCNIVAGQRCIKKLTDNQTSTMIRATARSAPDRQEEISKLMRSASFNTDPYVREFGIMVKDEMTDVTGRVLQPPSILYGGRNKAIATPVQGVWDMRNKQFHTGIEIKVWAIACFAPQRQCTEVHLKSFTEQLRKISRDAGMPIQGQPCFCKYAQGADSVEPMFRHLKNTYAGLQLVVVILPGKTPVYAEVKRVGDTVLGMATQCVQMKNVQRTTPQTLSNLCLKINVKLGGVNNILLPQGRPPVFQQPVIFLGADVTHPPAGDGKKPSIAAVVGSMDAHPNRYCATVRVQQHRQEIIQDLAAMVRELLIQFYKSTRFKPTRIIFYRDGVSEGQFQQVLHHELLAIREACIKLEKDYQPGITFIVVQKRHHTRLFCTDKNERVGKSGNIPAGTTVDTKITHPTEFDFYLCSHAGIQGTSRPSHYHVLWDDNRFSSDELQILTYQLCHTYVRCTRSVSIPAPAYYAHLVAFRARYHLVDKEHDSAEGSHTSGQSNGRDHQALAKAVQVHQDTLRTMYFA

SEQ ID NO: 46642 - protein, 950 aa, Homo sapiens
MSGYELRIRYLPKGFLNQFTEDKPTLNFFYQQVKSDYMLEIADQVDQEIALKLGCLEIRRSYWEMRGNALEKKSNYEVLEKDVGLKRFFPKSLLDSVKAKTLRKLIQQTFRQFANLNREESILKFFEILSPVYRFDKECFKCALGSSWIISVELAIGPEEGISYLTDKGCNPTHLADFTQVQTIQYSNSEDKDRKGMLQLKIAGAPEPLTVTAPSLTIAENMADLIDGYCRLVNGTSQSFIIRPQKEGERALPSIPKLANSEKQGMRTHAVSVSDEISGDETDDYAEIIDEEDTYTMPSKSYGIDEARDYEIQRERIELGRCIGEGQFGDVHQGIYMSPENPALAVAIKTCKNCTSDSVREKFLQEALTMRQFDHPHIVKLIGVITENPVWIIMELCTLGELRSFLQVRKYSLDLASLILYAYQLSTALAYLESKRFVHRDIAARNVLVSSNDCVKLGDFGLSRYMEDSTYYKASKGKLPIKWMAPESINFRRFTSASDVWMFGVCMWEILMHGVKPFQGVKNNDVIGRIENGERLPMPPNCPPTLYSLMTKCWAYDPSRRPRFTELKAQLSTILEEEKAQQEERMRMESRRQATVSWDSGGSDEAPPKPSRPGYPSPRSSEGFYPSPQHMVQTNHYQVSGYPGSHGITAMAGSIYPGQASLLDQTDSWNHRPQEIAMWQPNVEDSTVLDLRGIGQVLPTHLMEERLIRQQQEMEEDQRWLEKEERFLKPDVRLSRGSIDREDGSLQGPIGNQHIYQPVGKPDPAAPPKKPPRPGAPGHLGSLASLSSPADSYNEGVKPWRLQPQEISPPPTANLDRSNDKVYENVTGLVKAVIEMSSKIQPAPPEEYVPMVKEVGLALRTLLATVDETIPLLPASTHREIEMAQKLLNSDLGELINKMKLAQQYVMTSLQQEYKKQMLTAAHALAVDAKNLLDVIDQARLKMLGQTRPH

SEQ ID NO: 46643 - protein, 144 aa, Homo sapiens
MNNARYLREADFARVAHLTRCGVLGALRELRAHTVLAASCARHRRSLRLLEPFEVRTRLLGWDDRAFYLEARFVSLRDGFVCALLRFRQHLLGTSPERVVQHLCQRRVEPPELPADLQHWISYNEASSQLLRMESGLSDVTKDQ

SEQ ID NO: 46644 - protein, 104 aa, Homo sapiens
MGLPLAQALDCHVCAYNGDNCFNPMRCPAMVAYCMTTRTYYTPTRMKVSKSCVPRCFETVYDGYSKHASTTSCCQYDLCNGTGLATPATLALAPILLATLWGLL

SEQ ID NO: 46645 - protein, 480 aa, Homo sapiens
MAVEEREVIKSLDKCDFTEIHRYFVDKAAARKVLSREEKQKLKEEAEKLQQEFGYCILDGHQEKIGNFKIEPPGLFRGRGDHPKMGMLKRRITPEDVVINCSRDSKIPEPPAGHQWKEVRSDNTVTWLAAWTESVQNSIKYIMLNPCSKLKGETAWQKFETARRLRGFVDEIRSQYRADWKSREMKTRQRAVALYFIDKLALRAGNEKEDGEAADTVGCCSLRVEHVQLHPEADGCQHVVEFDFLGKDCIRYYNRVPVEKPVYKNLQLFMENKDPRDDLFDRLTTTSLNKHLQELMDGLTAKVFRTYNASITLQEQLRALTRAEDSIAAKILSYNRANRVVAILCNHQRATPSTFEKSMQNLQTKIQAKKEQVAEARAELRRARAEHKAQGDGKSRSVLEKKRRLLEKLQEQLAQLSVQATDKEENKQVALGTSKLNYLDPRISIAWCKRFRVPVEKIYSKTQRERFAWALAMAGEDFEF

SEQ ID NO: 46646 - protein, 399 aa, Homo sapiens
MDGQIQGSVELAAPGQAKIAGGAAVSDSSSTSMNVYSLSVDPNTWQTLLHERHLRQPEHKVLQQLRSRGDNVYVVTEVLQTQKEVEVTRTHKREGSGRFSLPGATCLQGEGQGHLSQKKTVTIPSGSTLAFRVAQLVIDSDLDVLLFPDKKQRTFQPPATGHKRSTSEGAWPQLPSGLSMMRCLHNFLTDGVPAEGAFTEDFQGLRAEVETISKELELLDRELCQLLLEGLEGVLRDQLALRALEEALEQGQSLGPVEPLDGPAGAVLECLVLSSGMLVPELAIPVVYLLGALTMLSETQHKLLAEALESQTLLGPLELVGSLLEQSAPWQERSTMSLPPGLLGNSWGEGAPAWVLLDECGLELGEDTPHVCWEPQAQGRMCALYASLALLSGLSQEPH

SEQ ID NO: 46647 - protein, 229 aa, Homo sapiens [sequence omitted]

SEQ ID NO: 46648 - protein, 69 aa, Homo sapiens
MNDNVLHSAFEVGARKVVSCLSTCIFPDKTTYPIDETMIHNGPPHNSNFGYSYAKRMIDVQNRSSRPSC

SEQ ID NO: 46649 - protein, 1092 aa, Homo sapiens
MDGSSGTYWPVNSDQAVPELDLGWPLTFGFQGTEVTTLVQPPPPDSPSIKDEARRMIRSAQQVVAVVMDMFTDVDLLSEVLEAAARRVPVYILLDEMNAQHFLDMADKCRVNLQHVDFLRVRTVAGPTYYCRTGKSFKGHVKEKFLLVDCAVVMSGSYSFMWSFEKIHRSLAHVFQGELVSSFDEEFRILFAQSEPLVPSAAALARMDAYALAPYAGAGPLVGVPGVGAPTPFSFPKRAHLLFPPPREEGLGFPSFLDPDRHFLSAFRREEPPRMPGGALEPHAGLRPLSRRLEAEAGPAGELAGARGFFQARHLEMDAFKRHSFATEGAGAVENFAAARQVSRQTFLSHGDDFRFQTSHFHRDQLYQQQYQWDPQLTPARPQGLFEKLRGGRAGFADPDDFTLGAGPRFPELGPDGHQRLDYVPSSASREVRHGSDPAFAPGPRGLEPSGAPRPNLTQRFPCQAAARPGPDPAPEAEPERRGGPEGRAGLRRWRLASYLSGCHGEDGGDDGLPAPMEAEAYEDDVLAPGGRAPAGDLLPSAFRVPAAFPTKVPVPGPGSGGNGPEREGPEEPGLAKQDSFRSRLNPLVQRSSRLRSSLIFSTSQAEGAAGAAAATEKVQLLHKEQTVSETLGPGGEAVRSAASTKVAELLEKYKGPARDPGGGAGAITVASHSKAVVSQAWREEVAAPGAVGGERRSLESCLLDLRDSFAQQLHQEAERQPGAASLTAAQLLDTLGRSGSDRLPSRFLSAQSHSTSPQGLDSPLPLEGSGAHQVLHNESKGSPTSAYPERKGSPTPGFSTRRGSPTTGFIEQKGSPTSAYPERRGSPVPPVPERRSSPVPPVPERRGSLTLTISGESPKAGPAEEGPSGPMEVLRKGSLRLRQLLSPKGERRMEDEGGFPVPQENGQPESPRRLSLGQGDSTEAATEERGPRARLSSATANALYSSNLRDDTKAILEQISAHGQKHRAVPAPSPGPTHNSPELGRPPAAGVLAPDMSDKDKCSAIFRSDSLGTQGRLSRTLPASAEERDRLLRRMESMRKEKRVYSRFEVFCKKEEASSPGAGEGPAEEGTRDSKVGKFVPKILGTFKSKK

SEQ ID NO: 46650 - protein, 443 aa, Homo sapiens [sequence omitted]

SEQ ID NO: 46651 - protein, 4449 aa, Homo sapiens
MRFHKLQNVQIALDYLRHRQVKLVNIRNDDIADGNPKLTLGLIWTIILHFQISDIQVSGQSEDMTAKEKLLLWSQRMVEGYQGLRCDNFTSSWRDGRLFNAIIHRHKPLLIDMNKVYRQTNLENLDQAFSVAERDLGVTRLLDPEDVDVPQPDEKSIITYVSSLYDAMPRVPDVQDGELQLRWQEYRELVLLLLQWMRHHTAAFEERRFPSSFEEIEILWSQFLKFKEMELPAKEADKNRSKGIYQSLEGAVQAGQLKVPPGYHPLDVEKEWGKLHVAILEREKQLRSEFERLECLQRIVTKLQMEAGLCEEQLNQADALLQSDVRLLAAGKVPQRAGEVERDLDKADSMIRLLFNDVQTLKDGRHPQGEQMYRRVYRLHERLVAIRTEYNLRLKAGVAAPATQVAQVTLQSVQRRPELEDSTLRYLQDLLAWVEENQHRVDGAEWGVDLPSVEAQLGSHRGLHQSIEEFRAKIERARSDEGQLSPATRGAYRDCLGRLDLQYAKLLNSSKARLRSLESLHSFVAAATKELMWLNEKEEEEVGFDWSDRNTNMTAKKESYSALMRELELKEKKIKELQNAGDRLLREDHPARPTVESFQAALQTQWSWMLQLCCCIEAHLKENAAYFQFFSDVREAEGQLQKLQEALRRKYSCDRSATVTRLEDLLQDAQDEKEQLNEYKGHLSGLAKRAKAVVQLKPRHPAHPMRGRLPLLAVCDYKQVEVTVHKGDECQLVGPAQPSHWKVLSSSGSEAAVPSVCFLVPPPNQEAQEAVTRLEAQHQALVTLWHQLHVDMKSLLAWQSLRRDVQLIRSWSLATFRTLKPEEQRQALHSLELHYQAFLRDSQDAGGFGPEDRLMAEREYGSCSHHYQQLLQSLEQGAQEESRCQRCISELKDIRLQLEACETRTVHRLRLPLDKEPARECAQRIAEQQKAQAEVEGLGKGVARLSAEAEKVLALPEPSPAAPTLRSELELTLGKLEQVRSLSAIYLEKLKTISLVIRGTQGAEEVLRAHEEQLKEAQAVPATLPELEATKASLKKLRAQAEAQQPTFDALRDELRGAQEVGERLQQRHGERDVEVERWRERVAQLLERWQAVLAQTDVRQRELEQLGRQLRYYRESADPLGAWLQDARRRQEQIQAMPLADSQAVREQLRQEQALLEEIERHGEKVEECQRFAKQYINAIKDYELQLVTYKAQLEPVASPAKKPKVQSGSESVIQEYVDLRTHYSELTTLTSQYIKFISETLRRMEEEERLAEQQRAEERERLAEVEAALEKQRQLAEAHAQAKAQAEREAKELQQRMQEEVVRREEAAVDAQQQKRSIQEELQQLRQSSEAEIQAKARQAEAAERSRLRIEEEIRVVRLQLEATERQRGGAEGELQALRARAEEAEAQKRQAQEEAERLRRQVQDESQRKRQAEVELASRVKAEAEAAREKQRALQALEELRLQAEEAERRLRQAEVERARQVQVALETAQRSAEAELQSKRASFAEKTAQLERSLQEEHVAVAQLREEAERRAQQQAEAERAREEAERELERWQLKANEALRLRLQAEEVAQQKSLAQAEAEKQKEEAEREARRRGKAEEQAVRQRELAEQELEKQRQLAEGTAQQRLAAEQELIRLRAETEQGEQQRQLLEEELARLQREAAAATQKRQELEAELAKVRAEMEVLLASKARAEEESRSTSEKSKQRLEAEAGRFRELAEEAARLRALAEEAKRQRQLAEEDAARQRAEAERVLAEKLAAIGEATRLKTEAEIALKEKEAENERLRRLAEDEAFQRRRLEEQAAQHKADIEERLAQLRKASDSELERQKGLVEDTLRQRRQVEEEILALKASFEKAAAGKAELELELGRIRSNAEDTLRSKEQAELEAARQRQLAAEEERRRREAEERVQKSLAAEEEAARQRKAALEEVERLKAKVEEARRLRERAEQESARQLQLAQEAAQKRLQAEEKAHAFAVQQKEQELQQTLQQEQSVLDQLRGEAEAARRAAEEAEEARVQAEREAAQSRRQVEEAERLKQSAEEQAQARAQAQAAAEKLRKEAEQEAARRAQAEQAALRQKQAADAEMEKHKKFAEQTLRQKAQVEQELTTLRLQLEETDHQKNLLDEELQRLKAEATEAARQRSQVEEELFSVRVQMEELSKLKARIEAENRALILRDKDNTQRFLQEEAEKMKQVAEEAARLSVAAQEAARLRQLAEEDLAQQRALAEKMLKEKMQAVQEATRLKAEAELLQQQKELAQEQARRLQEDKEQMAQQLAEETQGFQRTLEAERQRQLEMSAEAERLKLRVAEMSRAQARAEEDAQRFRKQAEEIGEKLHRTELATQEKVTLVQTLEIQRQQSDHDAERLREAIAELEREKEKLQQEAKLLQLKSEEMQTVQQEQLLQETQALQQSFLSEKDSLLQRERFIEQEKAKLEQLFQDEVAKAQQLREEQQRQQQQMEQERQRLVASMEEARRRQHEAEEGVRRKQEELQQLEQQRRQQEELLAEENQRLREQLQLLEEQHRAALAHSEEVTASQVAATKTLPNGRDALDGPAAEAEPEHSFDGLRRKVSAQRLQEAGILSAEELQRLAQGHTTVDELARREDVRHYLQGRSSIAGLLLKATNEKLSVYAALQRQLLSPGTALILLEAQAASGFLLDPVRNRRLTVNEAVKEGVVGPELHHKLLSAERAVTGYKDPYTGQQISLFQAMQKGLIVREHGIRLLEAQIATGGVIDPVHSHRVPVDVAYRRGYFDEEMNRVLADPSDDTKGFFDPNTHENLTYLQLLERCVEDPETGLCLLPLTDKAAKGGELVYTDSEARDVFEKATVSAPFGKFQGKTVTIWEIINSEYFTAEQRRDLLRQFRTGRITVEKIIKIIITVVEEQEQKGRLCFEGLRSLVPAAELLESRVIDRELYQQLQRGERSVRDVAEVDTVRRALRGANVIAGVWLEEAGQKLSIYNALKKDLLPSDMAVALLEAQAGTGHIIDPATSARLTVDEAVRAGLVGPEFHEKLLSAEKAVTGYRDPYTGQSVSLFQALKKGLIPREQGLRLLDAQLSTGGIVDPSKSHRVPLDVACARGCLDEETSRALSAPRADAKAYSDPSTGEPATYGELQQRCRPDQLTGLSLLPLSEKAARARQEELYSELQARETFEKTPVEVPVGGFKGRTVTVWELISSEYFTAEQRQELLRQFRTGKVTVEKVIKILITIVEEVETLRQERLSFSGLRAPVPASELLASGVLSRAQFEQLKDGKTTVKDLSELGSVRTLLQGSGCLAGIYLEDTKEKVSIYEAMRRGLLRATTAALLLEAQAATGFLVDPVRNQRLYVHEAVKAGVVGPELHEQLLSAEKAVTGYRDPYSGSTISLFQAMQKGLVLRQHGIRLLEAQIATGGIIDPVHSHRVPVDVAYQRGYFSEEMNRVLADPSDDTKGFFDPNTHENLTYRQLLERCVEDPETGLRLLPLKGAEKAEVVETTQVYTEEETRRAFEETQIDIPGGGSHGGSTMSLWEVMQSDLIPEEQRAQLMADFQAGRVTKERMIIIIIEIIEKTEIIRQQGLASYDYVRRRLTAEDLFEARIISLETYNLLREGTRSLREALEAESAWCYLYGTGSVAGVYLPGSRQTLSIYQALKKGLLSAEVARLLLEAQAATGFLLDPVKGERLTVDEAVRKGLVGPELHDRLLSAERAVTGYRDPYTEQTISLFQAMKKELIPTEEALRLLDAQLATGGIVDPRLGFHLPLEVAYQRGYLNKDTHDQLSEPSEVRSYVDPSTDERLSYTQLLRRCRRDDGTGQLLLPLSDARKLTFRGLRKQITMEELVRSQVMDEATALQLREGLTSIEEVTKNLQKFLEGTSCIAGVFVDATKERLSVYQAMKKGIIRPGTAFELLEAQAATGYVIDPIKGLKLTVEEAVRMGIVGPEFKDKLLSAERAVTGYKDPYSGKLISLFQAMKKGLILKDHGIRLLEAQIATGGIIDPEESHRLPVEVAYKRGLFDEEMNEILTDPSDDTKGFFDPNTEENLTYLQLMERCITDPQTGLCLLPLKEKKRERKTSSKSSVRKRRVVIVDPETGKEMSVYEAYRKGLIDHQTYLELSEQECEWEEITISSSDGVVKSMIIDRRSGRQYDIDDAIAKNLIDRSALDQYRAGTLSITEFADMLSGNAGGFRSRSSSVGSSSSYPISPAVSRTQLASWSDPTEETGPVAGILDTETLEKVSITEAMHRNLVDNITGQRLLEAQACTGGIIDPSTGERFPVTDAVNKGLVDKIMVDRINLAQKAFCGFEDPRTKTKMSAAQALKKGWLYYEAGQRFLEVQYLTGGLIEPDTPGRVPLDEALQRGTVDARTAQKLRDVGAYSKYLTCPKTKLKISYKDALDRSMVEEGTGLRLLEAAAQSTKGYYSPYSVSGSGSTAGSRTGSRTGSRAGSRRGSFDATGSGFSMTFSSSSYSSSGYGRRYASGSSASLGGPESAVA

SEQ ID NO: 46652 - protein, 706 aa, Homo sapiens
MTTGSGQEPGQSGTSLRTGPMGSLGQAEQVSSMPMGSLEHEGLVSLRPVGLQEQEGPMSLGPVGSAGPVETSKGLLGQEGLVEIAMDSPEQEGLVGPMEITMGSLEKAGPVSPGCVKLAGQEGLVEMVLLMEPGAMRFLQLYHEDLLAGLGDVALLPLEGPDMTGFRLCGAQASCQAAEEFLRSLLGSISCHVLCLEHPGSARFLLGPEGQHLLQGLEAQFQCVFGTERLATATLDTGLEEVDPTEALPVLPGNAHTLWTPDSTGGDQEDVSLEEVRELLATLEGLDLDGEDWLPRELEEEGPQEQPEEEVTPGHEEEEPVAPSTVAPRWLEEEAALQLALHRSLEPQGQVAEQEEAAALRQALTLSLLEQPPLEAEEPPDGGTDGKAQLVVHSAFEQDVEELDRALRAALEVHVQEETVGPWRRTLPAELRARLERCHGVSVALRGDCTILRGFGAHPARAARHLVALLAGPWDQSLAFPLAASGPTLAGQTLKGPWNNLERLAENTGEFQEVVRAFYDTLDAARSSIRVVRVERVSHPLLQQQYELYRERLLQRCERRPVEQVLYHGTTAPAVPDICAHGFNRSFCGRNATVYGKGVYFARRASLSVQDRYSPPNADGHKAVFVARVLTGDYGQGRRGLRAPPLRGPGHVLLRYDSAVDCICQPSIFVIFHDTQALPTHLITCEHVPRASPDDPSGLPGRSPDT

SEQ ID NO: 46653 - protein, 1210 aa, Homo sapiens
MGTTVATNALLERKGERVALLVTRGFRDLLHIGTQARGDLFDLAVPMPEVLYEEVLEVDERVVLHRGEAGTGTPVKGRTGDLLEVQQPVDLGALRGKLEGLLSRGIRSLAVVLMHSYTWAQHEQQVGVLARELGFTHVSLSSEAMPMVRIVPRGHTACADAYLTPAIQRYVQGFCRGFQGQLKDVQVLFMRSDGGLAPMDTFSGSSAVLSGPAGGVVGYSATTYQQEGGQPVIGFDMGGTSTDVSRYAGEFEHVFEASTAGVTLQAPQLDINTVAAGGGSRLFFRSGLFVVGPESAGAHPGPACYRKGGPVTVTDANLVLGRLLPASFPCIFGPGENQPLSPEASRKALEAVATEVNSFLTNGPCPASPLSLEEVAMGFVRVANEAMCRPIRALTQARGHDPSAHVLACFGGAGGQHACAIARALGMDTVHIHRHSGLLSALGLALADVVHEAQEPCSLLYAPETFVQLDQRLSRLEEQCVDALQAQGFPRSQISTESFLHLRYQGTDCALMVSAHQHPATARSPRAGDFGAAFVERYMREFGFVIPERPVVVDDVRVRGTGRSGLRLEDAPKAQTGPPRVDKMTQCYFEGGYQETPVYLLAELGYGHKLHGPCLIIDSNSTILVEPGCQAEVTKTGDICISVGAEVPGTVGPQLDPIQLSIFSHRFMSIAEQMGRILQRTAISTNIKERLDFSCALFGPDGGLVSNAPHIPVHLGAMQETVQFQIQHLGADLHPGDVLLSNHPSAGGSHLPDLTVITPVFWPGQTRPVFYVASRGHHADIGGITPGSMPPHSTMLQQEGAVFLSFKLVQGGVFQEEAVTEALRAPGKVPNCSGTRNLHDNLSDLRAQVAANQKGIQLVGELIGQYGLDVVQAYMGHIQANAELAVRDMLRAFGTSRQARGLPLEVSSEDHMDDGSPIRLRVQISLSQGSAVFDFSGTGPEVFGNLNAPRAVTLSALIYCLRCLVGRDIPLNQGCLAPVRVVIPRGSILDPSPEAAVVGGNVLTSQRVVDVILGAFGACAASQGCMNNVTLGNAHMGYYETVAGGAGAGPSWHGRSGVHSHMTNTRITDPEILESRYPVILRRFELRRGSGGRGRFRGGDGVTRELLFREEALLSVLTERRAFRPYGLHGGEPGARGLNLLIRKNGRTVNLGGKTSVTVYPGDVFCLHTPGGGGYGDPEDPAPPPGSPPQALAFPEHGSVYEYRRAQEAV

SEQ ID NO: 46654 - protein, 1636 aa, Homo sapiens
MKKLASTLLDAITDKDPLVQEQVCSALCSLGEARPVETLRACEEYLRQHDKLAHPYRAAVLRAMERVLSSRASELDKDTASTIILLASSEMTKTKDLVWDWQQAASGVLVAVGRQFISKVMEELLRRLHPGTLPHCAVLHTLASLSVANAFGVVPFLPSVLSSLLPVLGVAKQDTVRVAFCSALQRFSEGALEYLANLDRAPDPTVRKDAFATDIFSAYDVLFHQWLQSREAKLRLAVVEALGPMSHLLPSERLEEQLPKLLPGILALYKKHAETFYLSKSLGQILEAAVSVGSRTLETQLDALLAALHSQICVPVESSSPLVMSNQKEVLRCFTVLACSSPDRLLAFLLPRLDTSNERTRVGTLQVVRHVINSAAAQMEDKKPFILSSMRLPLLDTNSKVKRAVVQVISAMAHHGYLEQPGGEAMIEYIVQQCALPPEQEPEKPGPGSKDPKADSVRAISVRTLYLVSTTVDRMSHVLWPYLLQFLTPVRFTGALTPLCRSLVHLAQKRQEAGADAFLIQYDAHASLPSPYAVTGRLLVVSSSPYLGDGRGAAALRLLSVLHPNIHPLLGQHWETTVPLLLGYLDEHTEETLPQEEWEEKLLMFLRDTLAIISDNAWICQLSLELCRQLPCYDEAPQEKNFLYKCIGTTLGAASSKEVVRKHLQELLETARYQEEAEREGLACCFGICAISHLEDTLAQLEDFVRSEVFRKSIGILNIFKDRSENEVEKVKSALILCYGHVAARAPRELVLAKVESDILRNICQHFSTKVLGIKVETKDPALKLCLVQSVCMVSRAICSSTQAGSFHFTRKAELVAQMMEFIRAEPPDSLRTPIRKKAMLTCTYLVSVEPALDEQARADVIHGCLHSIMALLPEPKEEDGGCQKSLYLETLHALEDLLTSLLQRNMTPQGLQIMIEHLSPWIKSPRGHERARALGLSALLLRYFLEHLRVSALVPFHNLGLLIGLFSPRCADLWPATRQEAVDCVYSLLYLQLGYEGFSRDYRDDVAERLLSLKDGLVHPDPAILFHTCHSVGQIIAKRLPPDQLISLLLTMFEALGDPEKNCSRAATVMINCLLQERGGVLQEKVPEIVSVLRSKLQEAQGEHVLPAAQHSVYLLATQHCAAVVSSLLGSPLPLDSHTCMLWRALAVEPRLAAQVLGLLLEKMSRDVPFKESRAFLLGRTPDRVATLLPLSATCALFEVMSTPAAGPAVLELYPQLFVVLLLRVSCTVGVQLPRNLQAQERRGASPALATRNLEPCSSAVDTLRSMLLRSGSEDVVQRMDLEGGWELLRTSAGHEEGATRLARAMAEHAGPRLPLVLKTLACTHSSAYENQRVTTTAFLAELLNSNVANDLMLLDSLLESLAARQKDTCASVRRLVLRGLANLASGCPDKVRTHGPQLLTAMIGGLDDGDNPHSPVALEAMLGLARLVHLVESWDLRSGLLHVAIRIRPFFDSEKMEFRTASIRLFGHLNKVCHGDCEDVFLDQVVGGLAPLLLHLQDPQATVASACRFALRMCGPNLACEELSAAFQKHLQEGRALHFGEFLNTTCKHLMHHFPDLLGRLLTTCLFYFKSSWENVRAAAPLFTGFLVLHSEPRQQPQVDLDQLIAALQILLKDPAPEVRTRAAEALGRLVKLA

SEQ ID NO: 46655 - protein, 290 aa, Homo sapiens
MAHTILFLKLFSYRDVNSWCRRARAKAASAGKKASSAAAPHTVSYPDNLTYRDLYYFLFAPTLCYELNFPRSPRIRKRFLLRRILEMLFFTQLQVGLIQQWMVPTIQNSMKPFKDMDYSRIIERLLKLAVPNHLIWLIFFYWLFHSCLNAVAELMQFGDREFYRDWWNSESVTYFWQNWNIPVHKWCIRHFYKPMLRRGSSKWMARTGVFLASAFFHEYLVSVPLRMFRLWAFTGMMAQIPLAWFVGRFFQGNYGNAAVWLSLIIGQPIAVLMYVHDYYVLNYEAPAAEA

SEQ ID NO: 46656 - protein, 183 aa, Homo sapiens
MAELFAVVKTMQALEKAYIKDCVSPSEYTAACSRLLVQYKAAFRQVQGSEISSIDEFCRKFRLDCPLAMERIKEDRPITIKDDKGNLNRCIADVVSLFITVMDKLRLEIRAMDEIQPDLRELMETMHRMSHLPPDFEGRQTVSQWLQTLSGMSASDELDDSQVRQMLFDLESAYNAFNRFLHA

SEQ ID NO: 46657 - protein, 195 aa, Homo sapiens
MAELFAVVKTMQALEKAYIKDCVSPSEYTAACSRLLVQYKAAFRQVQGSEISSIDEFCRKFRLDCPLAMERIKEDRPITIKDDKGNLNRCIADVVSLFITVMDKLRLEIRAMDEIQPDLRELMETMHRMSHLPPDFEGRQTVSQWWVSLPARQSPAVPETLPARRSPAVPLRPSAPTCPVLHSQAADPERHVGVR

SEQ ID NO: 46658 - protein, 471 aa, Homo sapiens
MNPRVRRVEYAVRGPIVQRALELEQELRQGVKKPFTEVIRANIGDAQAMGQRPITFLRQVLALCVNPDLLSSPNFPDDAKKRAERILQACGGHSLGAYSVSSGIQLIREDVARYIERRDGGIPADPNNVFLSTGASDAIVTVLKLLVAGEGHTRTGVLIPIPQYPLYSATLAELGAVQVDYYLDEERAWALDVAELHRALGQARDHCRPRALCVINPGNPTGQVQTRECIEAVIRFAFEERLFLLADEVYQDNVYAAGSQFHSFKKVLMEMGPPYAGQQELASFHSTSKGYMGECGFRGGYVEVVNMDAAVQQQMLKLMSVRLCPPVPGQALLDLVVSPPAPTDPSFAQFQAEKQAVLAELAAKAKLTEQVFNEAPGISCNPVQGAMYSFPRVQLPPRAVERAQELGLAPDMFFCLRLLEETGICVVPGSGFGQREGTYHFRMTILPPLEKLRLLLEKLSRFHAKFTLEYS

SEQ ID NO: 46659 - protein, 628 aa, Homo sapiens
MLENYGNVASLGFPVPKPELISQLEQGKELWVLNLLGAEEPDILKSCQKDSEVGTKKELSILNQKFSEEVKTPEFVSRRLLRDNAQAAEFREAWGREGKLKERVGNSAGQSLNKPNIHKRVLTEATVGRERSLGERTQECSAFDRNLNLDQNVVRLQRNKTGERVFKCDICSKTFKYNSDLSRHQRSHTGEKPYECGRCGRAFTHSSNLVLHHHIHTGNKPFKCDECGKTFGLNSHLRLHRRIHTGEKPFGCGECGKAFSRSSTLIQHRIIHTGEKPYKCNECGRGFSQSPQLTQHQRIHTGEKPHECSHCGKAFSRSSSLIQHERIHTGEKPHKCNQCGKAFSQSSSLFLHHRVHTGEKPYVCNECGRAFGFNSHLTEHVRIHTGEKPYVCNECGKAFRRSSTLVQHRRVHTGEKPYQCVECGKAFSQSSQLTLHQRVHTGEKPYDCGDCGKAFSRRSTLIQHQKVHSGETRKCRKHGPAFVHGSSLTADGQIPTGEKHGRAFNHGANLILRWTVHTGEKSFGCNEYGKAFSPTSRPTEDQIMHAGEKPYKCQECGNAFSGKSTLIQHQVTHTGQKPCHCSVYGKAFSQSSQLTPPQQTRVGEKPALNDGSKRYFIHIKKIFQERHF

SEQ ID NO: 46660 - protein, 151 aa, Homo sapiens
MPEGTIVCCLEEKPGDRGKLARASGNYATVISHNPETKKTRVKLPSGSKKVISSANRAVVGVVAGGGRIDKPILKAGRAYHKYKAKRNCWPRVRGVAMNPVEHPFGGGNHQHIGKPSTIRRDAPAGRKVGLIAARRTGRLRGTKTVQEKEN

SEQ ID NO: 46661 - protein, 486 aa, Homo sapiens
MPGPQEAVVFEDVAVYFTRIEWSCLAPDQQALYRDVMLENYGNLASLGFLVAKPALISLLEQGEEPGALILQVAEQSVAKASLCTDSRMEAGIMESPLQRKLSRQAGLPGTVWGCLPWGHPVGGHPAPPHPHGGPEDGSDKPTHPRAREHSASPRVLQEDLGRPVGSSAPRYRCVCGKAFRYNSLLLRHQIIHTGAKPFQCTECGKAFKQSSILLRHQLIHTEEKPFQCGECGKAFRQSTQLAAHHRVHTRERPYACGECGKAFSRSSRLLQHQKFHTGEKPFACTECGKAFCRRFTLNEHGRIHSGERPYRCLRCGQRFIRGSSLLKHHRLHAQEGAQDGGVGQGALLGAAQRPQAGDPPHECPVCGRPFRHNSLLLLHLRLHTGEKPFECAECGKAFGRKSNLTLHQKIHTKEKPFACTECGKAFRRSYTLNEHYRLHSGERPYRCRACGRACSRLSTLIQHQKVHGREPGEDTEGRRAPCWAS

SEQ ID NO: 46662 - protein, 189 aa, Homo sapiens [sequence omitted]

SEQ ID NO: 46663 - protein, 498 aa, Homo sapiens
MGGQSFQHSVDLTGHEGVPTAESPLICNECGKTFQGNPDLIQRQIVHTGEASFMCDDCGKTFSQNSVLKNRHRSHMSEKAYQCSECGKAFRGHSDFSRHQSHHSSERPYMCNECGKAFSQNSSLKKHQKSHMSEKPYECNECGKAFRRSSNLIQHQRIHSGEKPYVCSECGKAFRRSSNLIKHHRTHTGEKPFECGECGKAFSQSAHLRKHQRVHTGEKPYECNDCGKPFSRVSNLIKHHRVHTGEKPYKCSDCGKAFSQSSSLIQHRRIHTGEKPHVCNVCGKAFSYSSVLRKHQIIHTGEKPYRCSVCGKAFSHSSALIQHQGVHTGDKPYACHECGKTFGRSSNLILHQRVHTGEKPYECTECGKTFSQSSTLIQHQRIHNGLKPHECNQCGKAFNRSSNLIHHQKVHTGEKPYTCVECGKGFSQSSHLIQHQIIHTGERPYKCSECGKAFSQRSVLIQHQRIHTGVKPYDCAACGKAFSQRSKLIKHQLIHTRE

SEQ ID NO: 46664 - protein, 1548 aa, Homo sapiens
MMGPSPGPPSVSHPMPTMGSTDFPQEGMHQMHKPIDGIHDKGIVEDIHCGSMKGTGMRPPHPGMGPPQSPMDQHSQGYMSPHPSPLGAPEHVSSPMSGGGPTPPQMPPSQPGALIPGDPQAMSQPNRGPSPFSPVQLHQLRAQILAYKMLARGQPLPETLQLAVQGKRTLPGLQQQQQQQQQQQQQQQQQQQQQQQPQQQPPQPQTQQQQQPALVNYNRPSGPGPELSGPSTPQKLPVPAPGGRPSPAPPAAAQPPAAAVPGPSVPQPAPGQPSPVLQLQQKQSRISPIQKPQGLDPVEILQEREYRLQARIAHRIQELENLPGSLPPDLRTKATVELKALRLLNFQRQLRQEVVACMRRDTTLETALNSKAYKRSKRQTLREARMTEKLEKQQKIEQERKRRQKHQEYLNSILQHAKDFKEYHRSVAGKIQKLSKAVATWHANTEREQKKETERIEKERMRRLMAEDEEGYRKLIDQKKDRRLAYLLQQTDEYVANLTNLVWEHKQAQAAKEKKKRRRRKKKAEENAEGGESALGPDGEPIDESSQMSDLPVKVTHTETGKVLFGPEAPKASQLDAWLEMNPGYEVAPRSDSEESDSDYEEEDEEEESSRQETEEKILLDPNSEEVSEKDAKQIIETAKQDVDDEYSMQYSARGSQSYYTVAHAISERVEKQSALLINGTLKHYQLQGLEWMVSLYNNNLNGILADEMGLGKTIQTIALITYLMEHKRLNGPYLIIVPLSTLSNWTYEFDKWAPSVVKISYKGTPAMRRSLVPQLRSGKFNVLLTTYEYIIKDKHILAKIRWKYMIVDEGHRMKNHHCKLTQVLNTHYVAPRRILLTGTPLQNKLPELWALLNFLLPTIFKSCSTFEQWFNAPFAMTGERVDLNEEETILIIRRLHKVLRPFLLRRLKKEVESQLPEKVEYVIKCDMSALQKILYRHMQAKGILLTDGSEKDKKGKGGAKTLMNTIMQLRKICNHPYMFQHIEESFAEHLGYSNGVINGAELYRASGKFELLDRILPKLRATNHRVLLFCQMTSLMTIMEDYFAFRNFLYLRLDGTTKSEDRAALLKKFNEPGSQYFIFLLSTRAGGLGLNLQAADTVVIFDSDWNPHQDLQAQDRAHRIGQQNEVRVLRLCTVNSVEEKILAAAKYKLNVDQKVIQAGMFDQKSSSHERRAFLQAILEHEEENEEEDEVPDDETLNQMIARREEEFDLFMRMDMDRRREDARNPKRKPRLMEEDELPSWIIKDDAEVERLTCEEEEEKIFGRGSRQRRDVDYSDALTEKQWLRAIEDGNLEEMEEEVRLKKRKRRRNVDKDPAKEDVEKAKKRRGRPPAEKLSPNPPKLTKQMNAIIDTVINYKDRCNVEKVPSNSQLEIEGNSSGRQLSEVFIQLPSRKELPEYYELIRKPVDFKKIKERIRNHKYRSLGDLEKDVMLLCHNAQTFNLEGSQIYEDSIVLQSVFKSARQKIAKEEESEDESNEEEEEEDEEESESEAKSVKVKIKLNKKDDKGRDKGKGKKRPNRGKAKPVVSDFDSDEEQDEREQSEGSGTDDE

SEQ ID NO: 46665 - protein, 1530 aa, Homo sapiens
MMGPSPGPPSVSHPMPTMGSTDFPQEGMHQMHKPIDGIHDKGIVEDIHCGSMKGTGMRPPHPGMGPPQSPMDQHSQGYMSPHPSPLGAPEHVSSPMSGGGPTPPQMPPSQPGALIPGDPQAMSQPNRGPSPFSPVQLHQLRAQILAYKMLARGQPLPETLQLAVQGKRTLPGLQQQQQQQQQQQQQQQQQQQQQQQPQQQPPQPQTQQQQQPALVNYNRPSGPGPELSGPSTPQKLPVPAPGGRPSPAPPAAAQPPAAAVPGPSVPQPAPGQPSPVLQLQQKQSRISPIQKPQGLDPVEILQEREYRLQARIAHRIQELENLPGSLPPDLRTKATVELKALRLLNFQRQLRQEVVACMRRDTTLETALNSKAYKRSKRQTLREARMTEKLEKQQKIEQERKRRQKHQEYLNSILQHAKDFKEYHRSVAGKIQKLSKAVATWHANTEREQKKETERIEKERMRRLMAEDEEGYRKLIDQKKDRRLAYLLQQTDEYVANLTNLVWEHKQAQAAKEKKKRRRRKKKAEENAEGGESALGPDGEPIDESSQMSDLPVKVTHTETGKVLFGPEAPKASQLDAWLEMNPGYEVAPRSDSEESDSDYEEEDEEEESSRQETEEKILLDPNSEEVSEKDAKQIIETAKQDVDDEYSMQYSARGSQSYYTVAHAISERVEKQSALLINGTLKHYQLQGLEWMVSLYNNNLNGILADEMGLGKTIQTIALITYLMEHKRLNGPYLIIVPLSTLSNWTYEFDKWAPSVVKISYKGTPAMRRSLVPQLRSGKFNVLLTTYEYIIKDKHILAKIRWKYMIVDEGHRMKNHHCKLTQVLNTHYVAPRRILLTGTPLQNKLPELWALLNFLLPTIFKSCSTFEQWFNAPFAMTGERVDLNEEETILIIRRLHKVLRPFLLRRLKKEVESQLPEKVEYVIKCDMSALQKILYRHMQAKGILLTDGSEKDKKGKGGAKTLMNTIMQLRKICNHPYMFQHIEESFAEHLGYSNGVINGAELYRASGKFELLDRILPKLRATNHRVLLFCQMTSLMTIMEDYFAFRNFLYLRLDGTTKSEDRAALLKKFNEPGSQYFIFLLSTRAGGLGLNLQAADTVVIFDSDWNPHQDLQAQDRAHRIGQQNEVRVLRLCTVNSVEEKILAAAKYKLNVDQKVIQAGMFDQKSSSHERRAFLQAILEHEEENEEEDEVPDDETLNQMIARREEEFDLFMRMDMDRRREDARNPKRKPRLMEEDELPSWIIKDDAEVERLTCEEEEEKIFGRGSRQRRDVDYSDALTEKQWLRAIEDGNLEEMEEEVRLKKRKRRRNVDKDPAKEDVEKAKKRRGRPPAEKLSPNPPKLTKQMNAIIDTVINYKDSSGRQLSEVFIQLPSRKELPEYYELIRKPVDFKKIKERIRNHKYRSLGDLEKDVMLLCHNAQTFNLEGSQIYEDSIVLQSVFKSARQKIAKEEESEDESNEEEEEEDEEESESEAKSVKVKIKLNKKDDKGRDKGKGKKRPNRGKAKPVVSDFDSDEEQDEREQSEGSGTDDE

SEQ ID NO: 46666 - protein, 237 aa, Homo sapiens
MMGPSPGPPSVSHPMPTMGSTDFPQEGMHQMHKPIDGIHDKGIVEDIHCGSMKGTGMRPPHPGMGPPQSPMDQHSQGYMSPHPSPLGAPEHVSSPMSGGGPTPPQMPPSQPGALIPGDPQAMSQPNRGPSPFSPVQLHQLRAQILAYKMLARGQPLPETLQLAVQGKRTLPGLQQQQQQQQQQQQQQQQQQQQQQQPQQQPPQPQTQQQQQPALVNYNRPSGRLIRNQMNNAMVQLG

SEQ ID NO: 46667 - protein, 425 aa, Homo sapiens
MYGSKPQIAEIIRSFKGHVRKMLRHAEASAIVEYAYNDKAILEQRNMLTEELYGNTFQLYKSADHRTLDKVLEVQPEKLELIMDEMKQILTPMAQKEAVIKHSLVHKVFLDFFTYAPPKLRSEMIEAIREAVVYLAHTHDGARVAMHCLWHGTPKDRKVIVKTMKTYVEKVANGQYSHLVLLAAFDCIDDTKLVKQIIISEIISSLPSIVNDKYGRKVLLYLLSPRDPAHTVREIIEVLQKGDGNAHSKKDTEVRRRELLESISPALLSYLQEHAQEVVLDKSACVLVSDILGSATGDVQPTMNAIASLAATGLHPGGKDGELHIAEHPAGHLVLKWLIEQDKKMKENGREGCFAKTLVEHVGMKNLKSWASVNRGAIILSSLLQSCDLEVANKVKAALKSLIPTLEKTKSTSKGIEILLEKLST

SEQ ID NO: 46668 - protein, 162 aa, Homo sapiens [sequence omitted]

SEQ ID NO: 46669 - protein, 179 aa, Homo sapiens [sequence omitted]

SEQ ID NO: 46670 - protein, 135 aa, Homo sapiens
MKNQKEFMLMNARLQLERQLIMQSEMRERQMAMQIAWSREFLKYFGTFFGLAAISLTAGAIKKKKPAFLVPIVPLSFILTYQYDLGYGTLLERMKGEAEDILETEKSKLQLPRGMITFESIEKARKEQSRFFIDK

SEQ ID NO: 46671 - protein, 54 aa, Homo sapiens [sequence omitted]

SEQ ID NO: 46672 - protein, 1682 aa, Homo sapiens
MGPQLKVVERTRTATMLCAASGNPDPEITWFKDFLPVDTSNNNGRIKQLRSGALQIEQSEESDQGKYECVATNSAGTRYSAPANLYVRVRRVPPRFSIPPTNHEIMPGGSVNITCVAVGSPMPYVKWMLGAEDLTPEDDMPIGRNVLELNDVRQSANYTCVAMSTLGVIEAIAQITVKALPKPPGTPVVTESTATSITLTWDSGNPEPVSYYIIQHKPKNSEELYKEIDGVATTRYSVAGLSPYSDYEFRVVAVNNIGRGPPSEPVLTQTSEQAPSSAPRDVQARMLSSTTILVQWKEPEEPNGQIQGYRVYYTMDPTQHVNNWMKHNVADSQITTIGNLVPQKTYSVKVLAFTSIGDGPLSSDIQVITQTGVPGQPLNFKAEPESETSILLSWTPPRSDTIANYELVYKDGEHGEEQRITIEPGTSYRLQGLKPNSLYYFRLAARSPQGLGASTAEISARTMQSIPSGPPRKVEVEAVNSTSVKVSWRSPVPNKQHGQIRGYQVHYVRMENGEPKGQPMLKDVMLADAQWEFDDTTEHDMIISGLQPETSYSLTVTAYTTKGDGARSKPKLVSTTGAVPGKPRLVINHTQMNTALIQWHPPVDTFGPLQGYRLKFGRKDMEPLTTLEFSEKEDHFTATDIHKGASYVFRLSARNKVGFGEEMVKEISIPEEVPTGFPQNLHSEGTTSTSVQLSWQPPVLAERNGIITKYTLLYRDINIPLLPMEQLIVPADTTMTLTGLKPDTTYDVKVRAHTSKGPGPYSPSVQFRTLPVDQVFAKNFHVKAVMKTSVLLSWEIPENYNSAMPFKILYDDGKMVEEVDGRATQKLIVNLKPEKSYSFVLTNRGNSAGGLQHRVTAKTAPDVLRTKPAFIGKTNLDGMITVQLPEVPANENIKGYYIIIVPLKKSRGKFIKPWESPDEMELDELLKEISRKRRSIRYGREVELKPYIAAHFDVLPTEFTLGDDKHYGGFTNKQLQSGQEYVFFVLAVMEHAESKMYATSPYSDPVVSMDLDPQPITDEEEGLIWVVGPVLAVVFIICIVIAILLYKRKRAESDSRKSSIPNNKEIPSHHPTDPVELRRLNFQTPGSDDSGYPGNLHSSSMASHPPIPILELADHIERLKANDNLKFSQEYESIDPGQQFTWEHSNLEVNKPKNRYANVIAYDHSRVLLSAIEGIPGSDYVNANYIDGYRKQNAYIATQGSLPETFGDFWRMIWEQRSATVVMMTKLEERSRVKCDQYWPSRGTETHGLVQVTLLDTVELATYCVRTFALYKNGSSEKREVRQFQFTAWPDHGVPEHPTPFLAFLRRVKTCNPPDAGPMVVHCSAGVGRTGCFIVIDAMLERIKHEKTVDIYGHVTLMRAQRNYMVQTEDQYIFIHDALLEAVTCGNTEVPARNLYAYIQKLTQIETGENVTGMELEFKRLASSKAHTSRFISANLPCNKFKNRLVNIMPYESTRVCLQPIRGVEGSDYINASFIDGYRQQKAYIATQGPLAETTEDFWRMLWEHNSTIVVMLTKLREMGREKCHQYWPAERSARYQYFVVDPMAEYNMPQYILREFKVTDARDGQSRTVRQFQFTDWPEQGVPKSGEGFIDFIGQVHKTKEQFGQDGPISVHCSAGVGRTGVFITLSIVLERMRYEGVVDIFQTVKMLRTQRPAMVQTEDQYQFSYRAALEYLGSFDHYAT

SEQ ID NO: 46673 - protein, 125 aa, Homo sapiens [sequence omitted]

SEQ ID NO: 46674 - protein, 1816 aa, Homo sapiens
METIELVNDGSGLGFGIIGGKATGVIVKTILPGGVADQHGRLCSGDHILKIGDTDLAGMSSEQVAQVLRQCGNRVKLMIARGAIEERTAPTALGITLSSSPTSTPELRVDASTQKGEESETFDVELTKNVQGLGITIAGYIGDKKLEPSGIFVKSITKSSAVEHDGRIQIGDQIIAVDGTNLQGFTNQQAVEVLRHTGQTVLLTLMRRGMKQEAELMSREDVTKDADLSPVNASIIKENYEKDEDFLSSTRNTNILPTEEEGYPLLSAEIEEIEDAQKQEAALLTKWQRIMGINYEIVVAHVSKFSENSGLGISLEATVGHHFIRSVLPEGPVGHSGKLFSGDELLEVNGITLLGENHQDVVNILKELPIEVTMVCCRRTVPPTTQSELDSLDLCDIELTEKPHVDLGEFIGSSETEDPVLAMTDAGQSTEEVQAPLAMWEAGIQHIELEKGSKGLGFSILDYQDPIDPASTVIIIRSLVPGGIAEKDGRLLPGDRLMFVNDVNLENSSLEEAVEALKGAPSGTVRIGVAKPLPLSPEEGYVSAKEDSFLYPPHSCEEAGLADKPLFRADLALVGTNDADLVDESTFESPYSPENDSIYSTQASILSLHGSSCGDGLNYGSSLPSSPPKDVIENSCDPVLDLHMSLEELYTQNLLQRQDENTPSVDISMGPASGFTINDYTPANAIEQQYECENTIVWTESHLPSEVISSAELPSVLPDSAGKGSEYLLEQSSLACNAECVMLQNVSKESFERTINIAKGNSSLGMTVSANKDGLGMIVRSIIHGGAISRDGRIAIGDCILSINEESTISVTNAQARAMLRRHSLIGPDIKITYVPAEHLEEFKISLGQQSGRVMALDIFSSYTGRDIPELPEREEGEGEESELQNTAYSNWNQPRRVELWREPSKSLGISIVGGRGMGSRLSNGEVMRGIFIKHVLEDSPAGKNGTLKPGDRIVEVDGMDLRDASHEQAVEAIRKAGNPVVFMVQSIINRPRKSPLPSLLHNLYPKYNFSSTNPFADSLQINADKAPSQSESEPEKAPLCSVPPPPPSAFAEMGSDHTQSSASKISQDVDKEDEFGYSWKNIRERYGTLTGELHMIELEKGHSGLGLSLAGNKDRSRMSVFIVGIDPNGAAGKDGRLQIADELLEINGQILYGRSHQNASSIIKCAPSKVKIIFIRNKDAVNQMAVCPGNAVEPLPSNSENLQNKETEPTVTTSDAAVDLSSFKNVQHLELPKDQGGLGIAISEEDTLSGVIIKSLTEHGVAATDGRLKVGDQILAVDDEIVVGYPIEKFISLLKTAKMTVKLTIHAENPDSQAVPSAAGAASGEKKNSSQSLMVPQSGSPEPESIRNTSRSSTPAIFASDPATCPIIPGCETTIEISKGRTGLGLSIVGGSDTLLGAIIIHEVYEEGAACKDGRLWAGDQILEVNGIDLRKATHDEAINVLRQTPQRVRLTLYRDEAPYKEEEVCDTLTIELQKKPGKGLGLSIVGKRNDTGVFVSDIVKGGIADADGRLMQGDQILMVNGEDVRNATQEAVAALLKCSLGTVTLEVGRIKAGPFHSERRPSQSSQVSEGSLSSFTFPLSGSSTSESLESSSKKNALASEIQGLRTVEMKKGPTDSLGISIAGGVGSPLGDVPIFIAMMHPTGVAAQTQKLRVGDRIVTICGTSTEGMTHTQAVNLLKNASGSIEMQVVAGGDVSVVTGHQQEPASSSLSFTGLTSSSIFQDDLGPPQCKSITLERGPDGLGFSIVGGYGSPHGDLPIYVKTVFAKGAASEDGRLKRGDQIIAVNGQSLEGVTHEEAVAILKRTKGTVTLMVLS

SEQ ID NO: 46675 - protein, 981 aa, Homo sapiens
MTVSANKDGLGMIVRSIIHGGAISRDGRIAIGDCILSINEESTISVTNAQARAMLRRHSLIGPDIKITYVPAEHLEEFKISLGQQSGRVMALDIFSSYTGRDIPELPEREEGEGEESELQNTAYSNWNQPRRVELWREPSKSLGISIVGGRGMGSRLSNGEVMRGIFIKHVLEDSPAGKNGTLKPGDRIVEAPSQSESEPEKAPLCSVPPPPPSAFAEMGSDHTQSSASKISQDVDKEDEFGYSWKNIRERYGTLTGELHMIELEKGHSGLGLSLAGNKDRSRMSVFIVGIDPNGAAGKDGRLQIADELLEINGQILYGRSHQNASSIIKCAPSKVKIIFIRNKDAVNQMAVCPGNAVEPLPSNSENLQNKETEPTVTTSDAAVDLSSFKNVQHLELPKDQGGLGIAISEEDTLSGVIIKSLTEHGVAATDGRLKVGDQILAVDDEIVVGYPIEKFISLLKTAKMTVKLTIHAENPDSQAVPSAAGAASGEKKNSSQSLMVPQSGSPEPESIRNTSRSSTPAIFASDPATCPIIPGCETTIEISKGRTGLGLSIVGGSDTLLGAIIIHEVYEEGAACKDGRLWAGDQILEVNGIDLRKATHDEAINVLRQTPQRVRLTLYRDEAPYKEEEVCDTLTIELQKKPGKGLGLSIVGKRNDTGVFVSDIVKGGIADADGRLMQGDQILMVNGEDVRNATQEAVAALLKCSLGTVTLEVGRIKAGPFHSERRPSQSSQVSEGSLSSFTFPLSGSSTSESLESSSKKNALASEIQGLRTVEMKKGPTDSLGISIAGGVGSPLGDVPIFIAMMHPTGVAAQTQKLRVGDRIVTICGTSTEGMTHTQAVNLLKNASGSIEMQVVAGGDVSVVTGHQQEPASSSLSFTGLTSSSIFQDDLGPPQCKSITLERGPDGLGFSIVGGYGSPHGDLPIYVKTVFAKGAASEDGRLKRGDQIIAVNGQSLEGVTHEEAVAILKRTKGTVTLMVLS

SEQ ID NO: 46676 - protein, 560 aa, Homo sapiens [sequence omitted]

SEQ ID NO: 46677 - protein, 569 aa, Homo sapiens [sequence omitted]

SEQ ID NO: 46678 - protein, 419 aa, Homo sapiens [sequence omitted]

SEQ ID NO: 46679 - protein, 253 aa, Homo sapiens [sequence omitted]

SEQ ID NO: 46680 - protein, 61 aa, Homo sapiens
MTRDFKPGDLIFAKMKGYPHWPARVDEVPDGAVKPPTNKLPIFFFGTHETLLGGRDLPCLR

SEQ ID NO: 46681 - protein, 1021 aa, Homo sapiens
MQFGTRTTTAEPGFMGTWQNADTNLLFRMSQQAIRCTLVNCTCECFQPGKINLRTCDQCKHGWVAHALDKLSTQHLYHPTQVEIVQSNVVFDISSLMLYGTQAVPVRLKILLDRLFSVLKQEEVLHILHGLGWTLRDYVRGYILQDAAGKVLDRWAIMSREEEIITLQQFLRFGETKSIVELMAIQEKEGQAVAVPSSKTDSDIRTFIESNNRTRSPSLLAHLENSNPSSIHHFENIPNSLAFLLPFQYINPVSAPLLGLPPNGLLLEQPGLRLREPSLSTQNEYNESSESEVSPTPYKNDQTPNRNALTSITNVEPKTEPACVSPIQNSAPVSDLTKTEHPKSSFRIHRMRRMGSASRKGRVFCNACGKTFYDKGTLKIHYNAVHLKIKHRCTIEGCNMVFSSLRSRNRHSANPNPRLHMPMLRNNRDKDLIRATSGAATPVIASTKSNLALTSPGRPPMGFTTPPLDPVLQNPLPSQLVFSGLKTVQPVPPFYRSLLTPGEMVSPPTSLPTSPIIPTSGTIEQHPPPPSEPVVPAVMMATHEPSADLAPKKKPRKSSMPVKIEKEIIDTADEFDDEDDDPNDGGAVVNDMSHDNHCHSQEEMSPGMSVKDFSKHNRTRCISRTEIRRADSMTSEDQEPERDYENESESSEPKLGEESMEGDEHIHSEVSEKVLMNSERPDENHSEPSHQDVIKVKEEFTDPTYDMFYMSQYGLYNGGGASMAALHESFTSSLNYGSPQKFSPEGDLCSSPDPKICYVCKKSFKSSYSVKLHYRNVHLKEMHVCTVAGCNAAFPSRRSRDRHSANINLHRKLLTKELDDMGLDSSQPSLSKDLRDEFLVKIYGAQHPMGLDVREDASSPAGTEDSHLNGYGRGMAEDYMVLDLSTTSSLQSSSSIHSSRESDAGSDEGILLDDIDGASDSGESAHKAEAPALPGSLGAEVSGSLMFSSLSGSNGGIMCNICHKMYSNKGTLRVHYKTVHLREMHKCKVPGCNMMFSSVRSRNRHSQNPNLHKNIPFTSVD

SEQ ID NO: 46682 - protein, 861 aa, Homo sapiens
MSEEAEVDVRERETQRDREPKRARDLTLRDSCTDNSMQFGTRTTTAEPGFMGTWQNADTNLLFRMSQQAIRCTLVNCTCECFQPGKINLRTCDQCKHGWVAHALDKLSTQHLYHPTQVEIVQSNVVFDISSLMLYGTQAVPVRLKILLDRLFSVLKQEEVLHILHGLGWTLRDYVRGYILQDAAGKVLDRWAIMSREEEIITLQQFLRFGETKSIVELMAIQEKEGQAVAVPSSKTDSDIRTFIESNNRTRSPSLLAHLENSNPSSIHHFENIPNSLAFLLPFQYINPVSAPLLGLPPNGLLLEQPGLRLREPSLSTQNEYNESSESEVSPTPYKNDQTPNRNALTSITNVEPKTEPACVSPIQNSAPVSDLTKTEHPKSSFRIHRMRRMGSASRKGRVFCNACGKTFYDKGTLKIHYNAVHLKIKHRCTIEGCNMVFSSLRSRNRHSANPNPRLHMPMLRNNRDKDLIRATSGAATPVIASTKSNLALTSPGRPPMGFTTPPLDPVLQNPLPSQLVFSGLKTVQPVPPFYRSLLTPGEMVSPPTSLPTSPIIPTSGTIEQHPPPPSEPVVPAVMMATHEPSADLAPKKKPRKSSMPVKIEKEIIDTADEFDDEDDDPNDGGAVVNDMSHDNHCHSQEEMSPGMSVKDFSKHNRTRCISRTEIRRADSMTSEDQEPERDYENESESSEPKLGEESMEGDEHIHSEVSEKVLMNSERPDENHSEPSHQDVIKVKEEFTDPTYDMFYMSQYGLYNGGGASMAALHESFTSSLNYGSPQKFSPEGDLCSSPDPKICYVCKKSFKSSYSVKLHYRNVHLKEMHVCTVAGCNAAFPSRRSRDRNRNLRMERTIGPGHRDSLHLLPT

SEQ ID NO: 46683 - protein, 317 aa, Homo sapiens
MATHEPSADLAPKKKPRKSSMPVKIEKEIIDTADEFDDEDDDPNDGGAVVNDMSHDNHCHSQEEMSPGMSVKDFSKHNRTRCISRTEIRRADSMTSEDQEPERDYENESESSEPKLGEESMEGDEHIHSEVSEKVLMNSERPDENHSEPSHQDVIKVKEEFTDPTYDMFYMSQYGLYNGGGASMAALHESFTSSLNYGSPQKFSPEGDLCSSPDPKICYVCKKSFKSSYSVKLHYRNVHLKEMHVCTVAGCNAAFPSRRSRDRNRNLRMERTIGPGHRDSLHLRRGNSNRPGTCCLHTGDSLEESVIVRISCKRLES

SEQ ID NO: 46684 - protein, 1612 aa, Homo sapiens
MCISGLCQIVGCDHQLGSTVKEDNCGVCNGDGSTCRLVRGQYKSQLSATKSDDTVVAIPYGSRHIRLVLKGPDHLYLETKTLQGTKGENSLSSTGTFLVDNSSVDFQKFPDKEILRMAGPLTADFIVKIRNSGSADSTVQFIFYQPIIHRWRETDFFPCSATCGGGYQLTSAECYDLRSNRVVADQYCHYYPENIKPKPKLQECNLDPCPASDGYKQIMPYDLYHPLPRWEATPWTACSSSCGGGIQSRAVSCVEEDIQGHVTSVEEWKCMYTPKMPIAQPCNIFDCPKWLAQEWSPCTVTCGQGLRYRVVLCIDHRGMHTGGCSPKTKPHIKEECIVPTPCYKPKEKLPVEAKLPWFKQAQELEEGAAVSEEPSFIPEAWSACTVTCGVGTQVRIVRCQVLLSFSQSVADLPIDECEGPKPASQRACYAGPCSGEIPEFNPDETDGLFGGLQDFDELYDWEYEGFTKCSESCGGGVQEAVVSCLNKQTREPAEENLCVTSRRPPQLLKSCNLDPCPARWEIGKWSPCSLTCGVGLQTRDVFCSHLLSREMNETVILADELCRQPKPSTVQACNRFNCPPAWYPAQWQPCSRTCGGGVQKREVLCKQRMADGSFLELPETFCSASKPACQQACKKDDCPSEWLLSDWTECSTSCGEGTQTRSAICRKMLKTGLSTVVNSTLCPPLPFSSSIRPCMLATCARPGRPSTKHSPHIAAARKVYIQTRRQRKLHFVVGGFAYLLPKTAVVLRCPARRVRKPLITWEKDGQHLISSTHVTVAPFGYLKIHRLKPSDAGVYTCSAGPAREHFVIKLIGGNRKLVARPLSPRSEEEVLAGRKGGPKEALQTHKHQNGIFSNGSKAEKRGLAANPGSRYDDLVSRLLEQGGWPGELLASWEAQDSAERNTTSEEDPGAEQVLLHLPFTMVTEQRRLDDILGNLSQQPEELRDLYSKHLVAQLAQEIFRSHLEHQDTLLKPSERRTSPVTLSPHKHVSGFSSSLRTSSTGDAGGGSRRPHRKPTILRKISAAQQLSASEVVTHLGQTVALASGTLSVLLHCEAIGHPRPTISWARNGEEVQFSDRILLQPDDSLQILAPVEADVGFYTCNATNALGYDSVSIAVTLAGKPLVKTSRMTVINTEKPAVTVDIGSTIKTVQGVNVTINCQVAGVPEAEVTWFRNKSKLGSPHHLHEGSLLLTNVSSSDQGLYSCRAANLHGELTESTQLLILDPPQVPTQLEDIRALLAATGPNLPSVLTSPLGTQLVLDPGNSALLGCPIKGHPVPNITWFHGGQPIVTATGLTHHILAAGQILQVANLSGGSQGEFSCLAQNEAGVLMQKASLVIQDYWWSVDRLATCSASCGNRGVQQPRLRCLLNSTEVNPAHCAGKVRPAVQPIACNRRDCPSRWMVTSWSACTRSCGGGVQTRRVTCQKLKASGISTPVSNDMCTQVAKRPVDTQACNQQLCVEWAFSSWGQCNGPCIGPHLAVQHRQVFCQTRDGITLPSEQCSALPRPVSTQNCWSEACSVHWRVSLWTLCTATCGNYGFQSRRVECVHARTNKAVPEHLCSWGPRPANWQRCNITPCENMECRDTTRYCEKVKQLKLCQLSQFKSRCCGTCGKA

SEQ ID NO: 46685 - protein, 308 aa, Homo sapiens
MKKKVLLMGKSGSGKTSMRSIIFANYIARDTRRLGATIDVEHSHVRFLGNLVLNLWDCGGQDTFMENYFTSQRDNIFRNVEVLIYVFDVESRELEKDMHYYQSCLEAILQNSPDAKIFCLVHKMDLVQEDQRDLIFKEREEDLRRLSRPLECACFRTSIWDETLYKAWSSIVYQLIPNVQQLEMNLRNFAQIIEADEVLLFERATFLVISHYQCKEQRDVHRFEKISNIIKQFKLSCSKLAASFQSMEVRNSNFAAFIDIFTSNTYVMVVMSDPSIPSAATLINIRNARKHFEKLERVDGPKHSLLMR

SEQ ID NO: 46686 - protein, 100 aa, Homo sapiens
MGVMAGDIYSVFRNAASFKEVSDSLLTSSKGQLQKMKESLDDVMDYLVNNTPLNWLVFDFTTIDLTSETDEIPDIIALEEENGSNNSHANGPVLSGQDVE

SEQ ID NO: 46687 - protein, 1722 aa, Homo sapiens
MGATIECWDPETKYPLPVFSTFVLTGSSAKKVYGAAIQFYEPYSRELLSEKQLMHLGLLTPVERKMVSKSINTNKCICLLSHWPFFEAFRKFLMFIYKLSVSGPHPLPIEKHISHFMQNIPFPSPQRPRILVQLSVHDALILSQPVSTPLPLSGANFSTLLMNLGPENCATLLLFVLLESKILLHSLRPAVLTGVAEAVVAMIFPFQWQCPYIPLCPLSLAAVLSAPLPFIVGVDSRYFDLHDPPQDVVCIDLDTNMLYVSDEKKNMNWKQLPKKPCKNLLSTLKKLYPQLSSVHQKTQEGSAIDMTPIEADFSWQKKMTQLEMEIQEAFLRFMASILKGYRTYLRPITEAPSNKATAADSLFDRQGFLKSRDRAYAKFYTLLSKTQIFIRFIEECSFVSDKDTGLAFFDDCIEKLFPDKGTEKTDKVDFDSAEDTRLIELDDSQKSEHTVFIMPPEPPPDDGKDLSPKYSYKYFPRLDLKLFDRPQELKLCFSRHPTGNSITKSPPLMAKRTKQEIKTAHKLAKRCYTNPPQWAKCLFSHCYSLWFICLPAYVRVSHPKVRALQQAYDVLIKMRKTDVDPLDEVCYRVVMQLCGLWGHPVLAVRVLFEMKTARIKPNAITYGYYNKVVLESPWPSSTRSGIFLWTKVRNVVRGLAQFRQPLKKTVQRSQVSSISALQNVTGGSDGDTVSHGSVDSSNDANNGEHTVFVRDLIRLESIDNHSSTGGQSDQGYGSKDELIKDDAEIHVPEEQAARELITKTKMQTEEVCDASAIVAKHSQPSPEPHSPTEPPAWGSSIVKVPSGIFDVNSRKSSTGSISNVLFSTQDPVEDAVFGEATNLKKNGDRGEKRQKHFPERSCSFSSESRAGMLLKKSSLDSNSSEMAIMMGADAKILTAALTCPKTSLLHIARTHSFENVSCHLPDSRTCMSESTWNPEHRSSPVPEMLEESQELLEPVVDDVPKTTATVDTYESLLSDSNSNQSRDLKTVSKDLRNKRSSLYGIAKVVQREDVETGLDPLSLLATECTGGKTPDSEDKLFSPVIARNLADEIESYMNLKSPLGSKSSSMELHREENRESGMTTAFIHALERRSSLPLDHGSPAQENPESEKSSPAVSRSKTFTGRFKQQTPSRTHKERSTSLSALVRSSPHGSLGSVVNSLSGLKLDNILSGPKIDVLKSGMKQAATVASKMWVAVASAYSYSDDEEETNRDYSFPAGLEDHILGENISPNTSISGLVPSELTQSNTSLGSSSSSGDVGKLHYPTGEVPFPRGMKGQDFEKSDHGSSQNTSMSSIYQNCAMEVLMSSCSQCRACGALVYDEEIMAGWTADDSNLNTACPFCKSNFLPLLNIEFKDLRGSASFFLKPSTSGDSLQSGSIPLANESLEHKPVSSLAEPDLINFMDFPKHNQIITEETGSAVEPSDEIKRASGDVQTMKISSVPNSLSKRNVSLTRSHSVGGPLQNIDFTQRPFHGISTVSLPNSLQEVVDPLGKRPNPPPVSVPYLSPLVLRKELESLLENEGDQVIHTSSFINQHPIIFWNLVWYFRRLDLPSNLPGLILTSEHCNEGVQLPLSSLSQDSKLVYIQLLWDNINLHQEPREPLYVSWRNFNSEKKSSLLSEEQQETSTLVETIRQSIQHNNVLKPINLLSQQMKPGMKRQRSLYREILFLSLVSLGRENIDIEAFDNEYGIAYNSLSSEILERLQKIDAPPSASVEWCRKCFGAPLI

SEQ ID NO: 46688 - protein, 536 aa, Homo sapiens
MVFVRGPEHSNIQHFVEKVVFHLHESFPRPKRVCKDPPYKVEESGYAGFILPIEVYFKNKEEPRKVRFDYDLFLHLEGHPPVNHLRCEKLTFNNPTEDFRRKLLKAGGDPNRSIHTSSSSSSSSSSSSSSSSSSSSSSSSSSSSSSSSSSSSSSSSSSTSFSKPHKLMKEHKEKPSKDSREHKSAFKEPSRDHNKSSKESSKKPKENKPLKEEKIVPKMAFKEPKPMSKEPKPDSNLLTITSGQDKKAPSKRPPISDSEELSAKKRKKSSSEALFKSFSSAPPLILTCSADKKQIKDKSHVKMGKVKIESETSEKKKSTLPPFDDIVDPNDSDVEENISSKSDSEQPSPASSSSSSSSSFTPSQTRQQGPLRSIMKDLHSDDNEEESDEVEDNDNDSEMERPVNRGGSRSRRVSLSDGSDSESSSASSPLHHEPPPPLLKTNNNQILEVKSPIKQSKSDKQIKNGECDKAYLDELVELHRRLMTLRERHILQQIVNLIEETGHFHITNTTFDFDLCSLDKTTVRKLQSYLETSGTS

SEQ ID NO: 46689 - protein, 63 aa, Homo sapiens
MLPDVLKNCSIEEIKKLCQEQLELLSEKKILKILEVSFIYKVTMEWTLIWKRKQMMVLRWDLI

SEQ ID NO: 46690 - protein, 738 aa, Homo sapiens
MHCMSGHSNFVSCVCIIPSSDIYPHGLIATGGNDHNICIFSLDSPMPLYILKGHKNTVCSLSSGKFGTLLSGSWDTTAKVWLNDKCMMTLQGHTAAVWAVKILPEQGLMLTGSADKTVKLWKAGRCERTFSGHEDCVRGLAILSETEFLSCANDASIRRWQITGECLEVYYGHTNYIYSISVFPNCRDFVTTAEDRSLRIWKHGECAQTIRLPAQSIWCCCVLDNGDIVVGASDGIIRVFTESEDRTASAEEIKAFEKELSHATIDSKTGDLGDINAEQLPGREHLNEPGTREGQTRLIRDGEKVEAYQWSVSEGRWIKIGDVVGSSGANQQTSGKVLYEGKEFDYVFSIDVNEGGPSYKLPYNTSDDPWLTAYNFLQKNDLNPMFLDQVAKFIIDNTKGQMLGLGNPSFSDPFTGGGRYVPGSSGSSNTLPTADPFTGAGRYVPGSASMGTTMAGVDPFTGNSAYRSAASKTMNIYFPKKEAVTFDQANPTQILGKLKELNGTAPEEKKLTEDDLILLEKILSLICNSSSEKPTVQQLQILWKAINCPEDIVFPALDILRLSIKHPSVNENFCNEKEGAQFSSHLINLLNPKGKPANQLLALRTFCNCFVGQAGQKLMMSQRESLMSHAIELKSGSNKNIHIALATLALNYSVCFHKDHNIEGKAQCLSLISTILEVVQDLEATFRLLVALGTLISDDSNAVQLAKSLGVDSQIKKYSSVSEPAKVSECCRFILNLL

SEQ ID NO: 46691 - protein, 790 aa, Homo sapiens
MRDAVKKLGGDPEKINPVCPADLVIDHSIQVDFNRRADSLQKNQDLEFERNRERFEFLKWGSQAFHNMRIIPPGSGIIHQVNLEYLARVVFDQDGYYYPDSLVGTDSHTTMIDGLGILGWGVGGIEAEAVMLGQPISMVLPQVIGYRLMGKPHPLVTSTDIVLTITKHLRQVGVVGKFVEFFGPGVAQLSIADRATIANMCPEYGATAAFFPVDEVSITYLVQTGRDEEKLKYIKKYLQAVGMFRDFNDPSQDPDFTQVVELDLKTVVPCCSGPKRPQDKVAVSDMKKDFESCLGAKQGFKGFQVAPEHHNDHKTFIYDNTEFTLAHGSVVIAAITSCTNTSNPSVMLGAGLLAKKAVDAGLNVMPYIKTSLSPGSGVVTYYLQESGVMPYLSQLGFDVVGYGCMTCIGNSGPLPEPVVEAITQGDLVAVGVLSGNRNFEGRVHPNTRANYLASPPLVIAYAIAGTIRIDFEKEPLGVNAKGQQVFLKDIWPTRDEIQAVERQYVIPGMFKEVYQKIETVNESWNALATPSDKLFFWNSKSTYIKSPPFFENLTLDLQPPKSIVDAYVLLNLGDSVTTDHISPAGNIARNSPAARYLTNRGLTPREFNSYGSRRGNDAVMARGTFANIRLLNRFLNKQAPQTIHLPSGEILDVFDAAERYQQAGLPLIVLAGKEYGAGSSRDWAAKGPFLLGIKAVLAESYERIHRSNLVGMGVIPLEYLPGENADALGLTGQERYTIIIPENLKPQMKVQVKLDTGKTFQAVMRFDTDVELTYFLNGGILNYMIRKMAK

SEQ ID NO: 46692 - protein, 897 aa, Homo sapiens
MAPWFREEEVQYIQAEKNNKGPMEAATLFLKFLLELQEEGWFRGFLDALDHAGYSGLYEAIESWDFKKIEKLEEYRLLLKRLQPEFKTRIIPTDIISDLSECLINQECEEILQICSTKGMMAGAEKLVECLLRSDKENWPKTLKLALEKERNKFSELWIVEKGIKDVETEDLEDKMETSDIQIFYQEDPECQNLSENSCPPSEVSDTNLYSPFKPRNYQLELALPAMKGKNTIICAPTGCGKTFVSLLICEHHLKKFPQGQKGKVVFFANQIPVYEQQKSVFSKYFERHGYRVTGISGATAENVPVEQIVENNDIIILTPQILVNNLKKGTIPSLSIFTLMIFDECHNTSKQHPYNMIMFNYLDQKLGGSSGPLPQVIGLTASVGVGDAKNTDEALDYICKLCASLDASVIATVKHNLEELEQVVYKPQKFFRKVESRISDKFKYIIAQLMRDTESLAKRICKDLENLSQIQNREFGTQKYEQWIVTVQKACMVFQMPDKDEESRICKALFLYTSHLRKYNDALIISEHARMKDALDYLKDFFSNVRAAGFDEIEQDLTQRFEEKLQELESVSRDPSNENPKLEDLCFILQEEYHLNPETITILFVKTRALVDALKNWIEGNPKLSFLKPGILTGRGKTNQNTGMTLPAQKCILDAFKASGDHNILIATSVADEGIDIAQCNLVILYEYVGNVIKMIQTRGRGRARGSKCFLLTSNAGVIEKEQINMYKEKMMNDSILRLQTWDEAVFREKILHIQTHEKFIRDSQEKPKPVPDKENKKLLCRKCKALACYTADVRVIEECHYTVLGDAFKECFVSRPHPKPKQFSSFEKRAKIFCARQNCSHDWGIHVKYKTFEIPVIKIESFVVEDIATGVQTLYSKWKDFHFEKIPFDPAEMSK

SEQ ID NO: 46693 - protein, 341 aa, Homo sapiens [sequence omitted]

SEQ ID NO: 46694 - protein, 287 aa, Homo sapiens [sequence omitted]

SEQ ID NO: 46695 - protein, 291 aa, Homo sapiens
MRVCWLVRQDSRHQRIRLPHLEAVVIGRGPETKITDKKCSRQQVQLKAECNKGYVKVKQVGVNPTSIDSVVIGKDQEVKLQPGQVLHMVNELYPYIVEFEEEAKNPGLETHRKRKRSGNSDSIERDAAQEAEAGTGLEPGSNSGQCSVPLKKGKDAPIKKESLGHWSQGLKISMQDPKMQVYKDEQVVVIKDKYPKARYHWLVLPWTSISSLKAVAREHLELLKHMHTVGEKVIVDFAGSSKLRFRLGYHAIPSMSHVHLHVISQDFDSPCLKNKKHWNSFNTEYFLESQE

SEQ ID NO: 46696 - protein, 48 aa, Homo sapiens
MRVCWLVRQDSRHQRIRLPHLEAVVIGRGPETKITDKKCSRQQVESRV

SEQ ID NO: 46697 - protein, 313 aa, Homo sapiens
MDIFDMFFGGGGRMQRERRGKNVVHQLSVTLEDLYNGATRKLALQKNVICDKCEGRGGKKGAVECCPNCRGTGMQIRIHQIGPGMVQQIQSVCMECQGHGERISPKDRCKSCNGRKIVREKKILEVHIDKGMKDGQKITFHGEGDQEPGLEPGDIIIVLDQKDHAVFTRRGEDLFMCMDIQLVEALCGFQKPISTLDNRTIVITSHPGQIVKHGDIKCVLNEGMPIYRRPYEKGRLIIEFKVNFPENGFLSPDKLSLLEKLLPERKEVEETDEMDQVELVDFDPNQERRRHYNGEAYEDDEHHPRGGVQCQTS

SEQ ID NO: 46698 - protein, 556 aa, Homo sapiens
MGPIPKDDLNERPAKSTCDSENLAVINKSSRRVDQEKCTVRRQDPQVVSPFSRGKQNHVLKNVETHTGSLIEQLTTEKYECMVCCELVRVTAPVWSCQSCYHVFHLNCIKKWARSPASQADGQSGWRCPACQNVSAHVPNTYTCFCGKVKNPEWSRNEIPHSCGEVCRKKQPGQDCPHSCNLLCHPGPCPPCPAFMTKTCECGRTRHTVRCGQAVSVHCSNPCENILNCGQHQCAELCHGGQCQPCQIILNQVCYCGSTSRDVLCGTDVGKSDGFGDFSCLKICGKDLKCGNHTCSQVCHPQPCQQCPRLPQLVRCCPCGQTPLSQLLELGSSSRKTCMDPVPSCGKVCGKPLPCGSLDFIHTCEKLCHEGDCGPCSRTSVISCRCSFRTKELPCTSLKSEDATFMCDKRCNKKRLCGRHKCNEICCVDKEHKCPLICGRKLRCGLHRCEEPCHRGNCQTCWQASFDELTCHCGASVIYPPVPCGTRPPECTQTCARVHECDHPVYHSCHSEEKCPPCTFLTQKWCMGKHEQSHYWASTQKKRSHYMKKIPAHACL

SEQ ID NO: 46699 - protein, 843 aa, Homo sapiens
MGPIPKDDLNERPAKSTCDSENLAVINKSSRRVDQEKCTVRRQDPQVVSPFSRGKQNHVLKNVETHTGSLIEQLTTEKYECMVCCELVRVTAPVWSCQSCYHVFHLNCIKKWARSPASQADGQSGWRCPACQNVSAHVPNTYTCFCGKVKNPEWSRNEIPHSCGEVCRKKQPGQDCPHSCNLLCHPGPCPPCPAFMTKTCECGRTRHTVRCGQAVSVHCSNPCENILNCGQHQCAELCHGGQCQPCQIILNQVCYCGSTSRDVLCGTDVGKSDGFGDFSCLKICGKDLKCGNHTCSQVCHPQPCQQCPRLPQLVRCCPCGQTPLSQLLELGSSSRKTCMDPVPSCGKVCGKPLPCGSLDFIHTCEKLCHEGDCGPCSRTSVISCRCSFRTKELPCTSLKSEDATFMCDKRCNKKRLCGRHKCNEICCVDKEHKCPLICGRKLRCGLHRCEEPCHRGNCQTCWQASFDELTCHCGASVIYPPVPCGTRPPECTQTCARVHECDHPVYHSCHSEEKCPPCTFLTQKWCMGKHEFRSNIPCHLVDISCGLPCSATLPCGMHKCQRLCHKGECLVDEPCKQPCTTPRADCGHPCMAPCHTSSPCPVTACKAKVELQCECGRRKEMVICSEASSTYQRIAAISMASKITDMQLGGSVEISKLITKKEVHQARLECDEECSALERKKRLAEAFHISEDSDPFNIRSSGSKFSDSLKEDARKDLKFVSDVEKEMETLVEAVNKGKNSKKSHSFPPMNRDHRRIIHDLAQVYGLESVSYDSEPKRNVVVTAIRGKSVCPPTTLTGVLEREMQARPPPPIPHHRHQSDKNPGSSNLQKITKEPIIDYFDVQD

SEQ ID NO: 46700 - protein, 152 aa, Homo sapiens
MQPLDPAAASISDGDCDAREEKQRELARKGSLKNGSMGSPVNQQPKKNNVMARTRLVVPNKGYSSLDQSPDEKPLVALDTDSDDDFDMSRYSSSGYSSAEQINQDLNIQLLKDGYRLDEIPDDEDLDLIPPKSVNPTCMCCQATSSTACHIQ

SEQ ID NO: 46701 - protein, 169 aa, Homo sapiens
MQPLDPAAASISDGDCDAREGESVAMNYKPSPLQVKLEKQRELARKGSLKNGSMGSPVNQQPKKNNVMARTRLVVPNKGYSSLDQSPDEKPLVALDTDSDDDFDMSRYSSSGYSSAEQINQDLNIQLLKDGYRLDEIPDDEDLDLIPPKSVNPTCMCCQATSSTACHIQ

SEQ ID NO: 46702 - protein, 111 aa, Homo sapiens
MVSLPNLASIMKKLLTKYDNLFETSFPYSMGWHGAPTGSEAGANWNHWQLHAHYYPPLLRSATVRKFMVGYEMLAQAQRDLTPEQAAERLRALPEVHYHLGQKDRETATIA

SEQ ID NO: 46703 - protein, 113 aa, Homo sapiens
MWEENGLKYTGEAIKKLSKRHQYHICACDPKGGLDKARHLTGFHETSNINNFSAGVANRSASICIPWTVGQEKKGYFEDHHPSANCDPFSVTEALIRTCLLNETGDEPFQYKN

SEQ ID NO: 46704 - protein, 6 aa, Homo sapiens
MDQTAS

SEQ ID NO: 46705 - protein, 523 aa, Homo sapiens
MNRLRHPNILRFMGVCVHQGQLHALTEYMNGGTLEQLLSSPEPLSWPVRLHLALDIARGLRYLHSKGVFHRDLTSKNCLVRREDRGFTAVVGDFGLAEKIPVYREGARKEPLAVVGSPYWMAPEVLRGELYDEKADVFAFGIVLCELIARVPADPDYLPRTEDFGLDVPAFRTLVGDDCPLPFLLLAIHCCNLEPSTRAPFTEITQHLEWILEQLPEPAPLTRTALTHNQGSVARGGPSATLPRPDPRLSRSRSDLFLPPSPESPPNWGDNLTRVNPFSLREDLRGGKIKLLDTPSKPVLPLVPPSPFPSTQLPLVTTPETLVQPGTPARRCRSLPSSPELPRRMETALPGPGPPAVGPSAEEKMECEGSSPEPEPPGPAPQLPLAVATDNFISTCSSASQPWSPRSGPVLNNNPPAVVVNSPQGWAGEPWNRAQHSLPRAAALERTEPSPPPSAPREPDEGLPCPGCCLGPFSFGFLSMCPRPTPAVARYRNLNCEAGSLLCHRGHHAKPPTPSLQLPGARS

SEQ ID NO: 46706 - protein, 2470 aa, Homo sapiens [sequence omitted]

SEQ ID NO: 46707 - protein, 189 aa, Homo sapiens [sequence omitted]

SEQ ID NO: 46708 - protein, 336 aa, Homo sapiens
MPQSLGNQPLPPEPPSLGTPAEGPGTTSPPEHCWPVRPTLRNELDTFSVHFYIFFGPSVALPPERPAVFAMRLLPVLDSGGVLSLELQLNASSVRQENVTVFGCLTHEVPLSLGDAAVTCSKESLAGFLLSVSATTRVARLRIPFPQTGTWFLALRSLCGVGPRFVRCRNATAEVRMRTFLSPCVDDCGPYGQCKLLRTHNYLYAACECKAGWRGWGCTDSADALTYGFQLLSTLLLCLSNLMFLPPVVLAIRSRYVLEAAVYTFTMFFSTVCGGVCILSLGACAWWWVTVCISTTFSEGLGMSVPSLCLLQTETAVLPKLSCIDNGHFCKTHWSK

SEQ ID NO: 46709 - protein, 887 aa, Homo sapiens [sequence omitted]

SEQ ID NO: 46710 - protein, 944 aa, Homo sapiens
MILAYLHLPDLGRCSLVCRAWYELILSLDSTRWRQLCLGCTECRHPNWPNQPDVEPESWREAFKQHYLASKTWTKNALDLESSICFSLFRRRRERRTLSVGPGREFDSLGSALAMASLYDRIVLFPGVYEEQGEIILKVPVEIVGQGKLGEVALLASIDQHCSTTRLCNLVFTPAWFSPIMYKTTSGHVQFDNCNFENGHIQVHGPGTCQVKFCTFKNTHIFLHNVPLCVLENCEFVGSENNSVTVEGHPSADKNWAYKYLLGLIKSSPTFLPTEDSDFLMSLDLESRDQAWSPKTCDIVIEGSQSPTSPASSSPKPGSKAGSQEAEVGSDGERVAQTPDSSDGGLSPSGEDEDEDQLMYRLSYQVQGPRPVLGGSFLGPPLPGASIQLPSCLVLNSLQQELQKDKEAMALANSVQGCLIRKCLFRDGKGGVFVCSHGRAKMEGNIFRNLTYAVRCIHNSKIIMLRNDIYRCRASGIFLRLEGGGLIAGNNIYHNAEAGVDIRKKSNPLILCNQIHHGLRSGIVVLGNGKGIIRNNQIFSNKEAGIYILYHGNPVVSGNHIFKGRAAGIAVNENGKGLITENVIRENQWGGVDIRRGGIPVLRSNLICFGYSDGVVVGDEGKGLIEGNTIYANKGCGVWMMSSSLPHVTSNHVSYNGLYGVAVFSQKDGSSELPRGHRAQENFSEDGDAILWETELEKEDDPLRRPITIALVESNSINHNGASGLYVQSSEALHVITNVIHANGDRGITVAQSSQPTRVANNSISCNRQSGVKVEAQCKVELRGNGIYDNRGHGIITKGDSTIVIENDIIGNRGSGLQLLPRSDTKVIKNRIHSFRAYGIAVRGRAKALVQENIIFQGKTSKTIFQQISNNRECIMQNNKFLVFKKKSDTWRLVNPPARPHLENSLRRPSAAHNGQKVTAMATRITARVEGGYHSNRSVFCTIL

SEQ ID NO: 46711 - protein, 18 aa, Homo sapiens
MKRCLVIWCTLIPVTFGL

SEQ ID NO: 46712 - protein, 102 aa, Homo sapiens
MEPEMVCIDSCGRANGMGVIGQDGLLFKVTLGLIRKLLAPDCEIIQEVGKLYPLEIVFGMNGRIWVKAKTIQQTLILANILEACEHMTSDQRKQIFSRLAES

SEQ ID NO: 46713 - protein, 412 aa, Homo sapiens
MTSLYGSIHPADSVYLSTRTHGAVFNLEYSPDGSVLTVACEQTEVLLFDPISSKHIKTLSEAHEDCVNNIRFLDNRLFATCSDDTTIALWDLRKLNTKVCTLHGHTSWVKNIEYDTNTRLLVTSGFDGNVIIWDTNRYTEDGCPHKKFFHTRFLMRMRLTPDCSKMLISTSSGYLLILHDLDLTKSLEVGSYPILRARRTTSSSDLTTSSSSSGPRVSGSPCHHSDSNSSEKHMSRASQREGVSPRNSLEVVTPEVLGESDHGNCITSLQLHPKGWATLLRCSSNSDDEECTCVYEFQEGAPVRPVSPRCSLRLTHYIEEANVGRGYIKELCFSPDGRMISSPHGYGIRLLGFDKQCSELVDCLPKEASPLRVIRSLYSHNDVVLTTKFSPTHCQIASGCLSGRVSLYQPKF

SEQ ID NO: 46714 - protein, 401 aa, Homo sapiens
MCRLDYCGGSGEPGGVQRAFSASSASGAAGCCCASSGAGAAASSSSSSGSPHLYRSSSERRPATPAEVRYISPKHRLIKVESAAGGGAGDPLGGACAGGRTWSPTACGGKKLLNKCAASAAEESGAGKKDKVTIADDYSDPFDAKNDLKSKAGKGESAGYMEPYEAQRIMTEFQRQESVRSQHKGIQLYDTPYEPEGQSVDSDSESTVSPRLRESKLPQDDDRPADEYDQPWEWNRVTIPALAAQFNGNEKRQSSPSPSRDRRRQLRAPGGGFKPIKHGSPEFCGILGERVDPAVPLEKQIWYHGAISRGDAENLLRLCKECSYLVRNSQTSKHDYSLSLRSNQGFMHMKLAKTKEKYVLGQNSPPFDSVPEVIHYYTTRKLPIKGAEHLSLLYPVAVRTL

SEQ ID NO: 46715 - protein, 282 aa, Homo sapiens [sequence omitted]

SEQ ID NO: 46716 - protein, 677 aa, Homo sapiens
MNAAYSGYVYTHRLFHRGEDEPYSEPYADYGGLQEHVYEEIGDAPELDARDGLRLYEQERDEAAAYRQEALGARLHHYDERSDGESDSPEKEAEFAPYPRMDSYEQEEDIDQIVAEVKQSMSSQSLDKAAEDMPEAEQDLERPPTPAGGRPDSPGLQAPAGQQRAVGPAGGGEAGQRYSKEKRDAISLAIKDIKEAIEEVKTRTIRSPYTPDEPKEPIWVMRQDISPTRDCDDQRPMDGDSPSPGSSSPLGAESSSTSLHPSDPVEASTNKESRKSLASFPTYVEVPGPCDPEDLIDGIIFAANYLGSTQLLSDKTPSKNVRMMQAQEAVSRIKMAQKLAKSRKKAPEGESQPMTEVDLFISTQRIKVLNADTQETMMDHPLRTISYIADIGNIVVLMARRRMPRSNSQENVEASHPSQDGKRQYKMICHVFESEDAQLIAQSIGQAFSVAYQEFLRANGINPEDLSQKEYSDLLNTQDMYNDDLIHFSKSENCKDVFIEKQKGEILGVVIVESGWGSILPTVIIANMMHGGPAEKSGKLNIGDQIMSINGTSLVGLPLSTCQSIIKGLKNQSRVKLNIVRCPPVTTVLIRRPDLRYQLGFSVQNGIICSLMRGGIAERGGVRVGHRIIEINGQSVVATPHEKIVHILSNAVGEIHMKTMPAAMYRLLTAQEQPVYI

SEQ ID NO: 46717 - protein, 322 aa, Homo sapiens [sequence omitted]

SEQ ID NO: 46718 - protein, 219 aa, Homo sapiens
MTRTSKGNRIACMFVRCSPNAKYTLLFSHGNAVDLGQMSSFYIGLGSRINCNIFSYDYSGYGASSGKPTEKNLYADIEAAWLALRTRYGIRPENVIIYGQSIGTVPSVDLAARYESAAVILHSPLTSGMRVAFPDTKKTYCFDAFPNIDKISKITSPVLIIHGTEDEVIDFSHGLALFERCQRPVEPLWVEGAGHNDVELYGQYLERLKQFVSQELVNL

SEQ ID NO: 46719 - protein, 409 aa, Homo sapiens [sequence omitted]

SEQ ID NO: 46720 - protein, 766 aa, Homo sapiens
MYPQTRHPAPHQPAQPFKFTISESCDRIKEEFQFLQAQYHSLKLECEKLASEKTEMQRHYVMYYEMSYGLNIEMHKQAEIVKRLNAICAQVIPFLSQEHQQQVVQAVERAKQVTMAELNAIIGQQLQAQHLSHGHGLPVPLTPHPSGLQPPAIPPIGSSAGLLALSSALGGQSHLPIKDEKKHHDNDHQRDRDSIKSSSVSPSASFRGAEKHRNSADYSSESKKQKTEEKEIAARYDSDGEKSDDNLVVDVSNEDPSSPRGSPAHSPRENGLDKTRLLKKDAPISPASIASSSSTPSSKSKELSLNEKSTTPVSKSNTPTPRTDAPTPGSNSTPGLRPVPGKPPGVDPLASSLRTPMAVPCPYPTPFGIVPHAGMNGELTSPGAAYAGLHNISPQMSAAAAAAAAAAAYGRSPVVGFDPHHHMRVPAIPPNLTGIPGGKPAYSFHVSADGQMQPVPFPPDALIGPGIPRHARQINTLNHGEVVCAVTISNPTRHVYTGGKGCVKVWDISHPGNKSPVSQLDCLNRDNYIRSCRLLPDGRTLIVGGEASTLSIWDLAAPTPRIKAELTSSAPACYALAISPDSKVCFSCCSDGNIAVWDLHNQTLVRQFQGHTDGASCIDISNDGTKLWTGGLDNTVRSWDLREGRQLQQHDFTSQIFSLGYCPTGEWLAVGMENSNVEVLHVTKPDKYQLHLHESCVLSLKFAHCGKWFVSTGKDNLLNAWRTPYGASIFQSKESSSVLSCDISVDDKYIVTGSGDKKATVYEVIY

SEQ ID NO: 46721 - protein, 477 aa, Homo sapiens [sequence omitted]

SEQ ID NO: 46722 - protein, 466 aa, Homo sapiens [sequence omitted]

SEQ ID NO: 46723 - protein, 182 aa, Homo sapiens [sequence omitted]

SEQ ID NO: 46724 - protein, 24 aa, Homo sapiens
MHPPRRAVLQPRHGPAARTPPGRQ

SEQ ID NO: 46725 - protein, 237 aa, Homo sapiens
MMKKRTSHKKHRSSVGPSKPVSQPRRNIVGCRIQHGWKEGNGPVTQWKGTVLDQVPVNPSLYLIKYDGFDCVYGLELNKDERVSALEVLPDRVATSRISDAHLADTMIGKAVEHMFETEDGSKDEWRGMVLARAPVMNTWFYITYEKDPVLYMYQLLDDYKEGDLRIMPDSNDSPPAEREPGEVVDSLVGKQVEYAKEDGSKRTGMVIHQVEAKPSVYFIKFDDDFHIYVYDLVKTS

SEQ ID NO: 46726 - protein, 474 aa, Homo sapiens
MSAARKGRPGDEPLPRPPRGAPHASDQVLGPGVTYVVKYLGCIEVLRSMRSLDFSTRTQITREAISRVCEAVPGAKGAFKKRKPPSKMLSSILGKSNLQFAGMSISLTISTASLNLRTPDSKQIIANHHMRSISFASGGDPDTTDYVAYVAKDPVNRRACHILECCDGLAQDVIGSIGQAFELRFKQYLQCPTKIPALHDRMQSLDEPWTEEEGDGSDHPYYNSIPSKMPPPGGFLDTRLKPRPHAPDTAQFAGKEQTYYQGRHLGDTFGEDWQQTPLRQGSSDIYSTPEGKLHVAPTGEAPTYVNTQQIPPQAWPAAVSSAESSPRKDLFDMKPFEDALKNQPLGPVLSKAASVECISPVSPRAPDAKMLEELQAETWYQGEMSRKEAEGLLEKDGDFLVRKSTTNPGSFVLTGMHNGQAKHLLLVDPEGTIRTKDRVFDSISHLINHHLESSLPIVSAGSELCLQQPVERKQ

SEQ ID NO: 46727 - protein, 42 aa, Homo sapiens [sequence omitted]

SEQ ID NO: 46728 - protein, 131 aa, Homo sapiens
MVQALYEAPAYHLILEGILILWIIRLLFSKTYKLQERSDLTVKEKEELIEEWQPEPLVPPVPKDHPALNYNIVSGPPSHKTVVNGKECINFASFNFLGLLDNPRVKAAALASLKKYGVGTCGPRGFYGTFE

SEQ ID NO: 46729 - protein, 1041 aa, Homo sapiens
MKAVPGTEVPGHKNWVVSKFGRVLPVLHLKNQHKRKIIKYDPSKYCHNLKKIGEDFSNTIPISSLTWELEGGNDPMSKKRRGEFSDFHGPPKKIIKVQKDESSTGSLAMSTRPRRVIERPPLTQQQAAQKRTCDSITPSKSSPVPVSDTQKLKNLPFKTSGLETAKKRNSISDDDTDSEDELRMMIAKEENLQRTTQPSINESESDPFEVVRDDFKSGVHKLHSLIGLGIKNRVSCHDSDDDIMRNDREYDSGDTDEIIAMKKNVAKVKNSTEFSQMEKSTKKTSFKNRENCELSDHCIKLQKRKSNVESALSHGLKSLNRKSPSHSSSSEDADSASELADSEGGEEYNAMMKNCLRVNLTLADLEQLAGSDLKVPNEDTKSDGPETTTQCKFDRGSKSPKTPTGLRRGRQCIRPAEIVASLLEGEENTCGKQKPKENNLKPKFQAFKGVGCLYEKESMKKSLKDSVASNNKDQNSMKHEDPSIISMEDGSPYVNGSLGEVTPCQHAKKANGPNYIQPQKRQTTFESQDRKAVSPSSSEKRSKNPISRPLEGKKSLSLSAKTHNIGFDKDSCHSTTKTEASQEERSDSSGLTSLKKSPKVSSKDTREIKTDFSLSISNSSDVSAKDKHAEDNEKRLAALEARQKAKEVQKKLVHNALANLDGHPEDKPTHIIFGSDSECETEETSTQEQSHPGEEWVKESMGKTSGKLFDSSDDDESDSEDDSNRFKIKPQFEGRAGQKLMDLQSHFGTDDRFRMDSRFLETDSEEEQEEVNEKKTAEEEELAEEKKKALNVVQSVLQINLSNSTNRGSVAAKKFKDIIHYDPTKQDHATYERKRDDKPKESKAKRKKKREEAEKLPEVSKEMYYNIAMDLKEIFQTTKYTSEKEEGTPWNEDCGKEKPEEIQDPAALTSDAEQPSGFTFSFFDSDTKDIKEETYRVETVKPGKIVWQEDPRLQDSSSEEEDVTEETDHRNSSPGEASLLEKETTRFFFFSKNDERLQGSDLFWRGVGSNMSRNSWEARTTNLRMDCRKKHKDAKRKMKPK

SEQ ID NO: 46730 - protein, 346 aa, Homo sapiens
MYCDNRKLKTIPNIPMHIQQLYLQFNEIEAVTANSFINATHLKEINLSHNKIKSQKIDYGVFAKLPNLLQLHLEHNNLEEFPFPLPKSLERLLLGYNEISKLQTNAMDGLVNLTMLDLCYNYLHDSLLKDKIFAKMEKLMQLNLCSNRLESMPPGLPSSLMYLSLENNSISSIPEKYFDKLPKLHTLRMSHNKLQDIPYNIFNLPNIVELSVGHNKLKQAFYIPRNLEHLYLQNNEIEKMNLTVMCPSIDPLHYHHLTYIRVDQNKLKEPISSYIFFCFPHIHTIYYGEQRSTNGQTIQLKTQVFRRFPDDDDESEDHDDPDNAHESPEQEGAEGHFDLHYYENQE

SEQ ID NO: 46731 - protein, 338 aa, Homo sapiens
MKHKVCRYCMHQHLKVATGKWKQISKYCPLDLYSGNKQRMHFALKSLLQEAQNNLKIFKNGELIYGCKDARSPVADWSELAHHLKPFFFPSNGLASGPHCTRAVIRELVHVITRVLLSGSDKGRAGTLSPGLGPQGPRVCEASPFSRSLRCQGKNTPERSGLPKGCLLYKTLQVQMLDLLDIEGLYPLYNRVERYLEEFPEERKTLQIDGPYDEAFYQKLLDLSTEDDGTVAFALTKVQQYRVAMTAKDCSIMIALSPCLQDASSDQRPVVPSSRSRFAFSVSVLDLDLKPYESIPHQYKLDGKIVNYYSKTVRAKDNAVMSTRFKESEDCTLVLHKV

SEQ ID NO: 46732 - protein, 378 aa, Homo sapiens
MRSDTPAMLNPANVPTHLMVLCCVLRYMVQWPGARILRRQELDAFLAQALSPKLYEPDQLQELKIENLDPRGIQLSALFMSGVDMALFANDACGQPIPWEHCCPWMYFDGKLFQSKLLKASREKTPLIDLCDGQADQAAKVEKMRQSVLEGLSFSRQSHTLPFPPPPALPFYPASAYPRHFGPVPPSQGRGRGFAGVQPIPSQGGKLEIAGTVVGHWAGSRRGRGGRGPFPLQVVSVGGPARGRPRGVISTPVIRTFGRGGRYYGRGYKNQAAIQGRPPYAASAEEVAKELKSKSGESKSSAMSSDGSLAENGVMAEEKPAPQMNGSTGDARAPSHSESALNNDSKTCNTNPHLNALSTDSACRREAALEAAVLNKEE

SEQ ID NO: 46733 - protein, 699 aa, Homo sapiens
MACGGRACKYENPARWSEQEQAIKGVYSSWVTDNILAMARPSSELLEKYHIIDQFLSHGIKTIINLQRPGEHASCGNPLEQESGFTYLPEAFMEAGIYFYNFGWKDYGVASLTTILDMVKVMTFALQEGKVAIHCHAGLGRTGVLIACYLVFATRMTADQAIIFVRAKRPNSIQTRGQLLCVREFTQFLTPLRNIFSCCDPKAHAVTLPQYLIRQRHLLHGYEARLLKHVPKIIHLVCKLLLDLAENRPVMMKDVSEGPGLSAEIEKTMSEMVTMQLDKELLRHDSDVSNPPNPTAVAADFDNRGMIFSNEQQFDPLWKRRNVECLQPLTHLKRRLSYSDSDLKRAENLLEQGETPQTVPAQILVGHKPRQQKLISHCYIPQSPEPDLHKEALVRSTLSFWSQSKFGGLEGLKDNGSPIFHGRIIPKEAQQSGAFSADVSGSHSPGEPVSPSFANVHKDPNPAHQQVSHCQCKTHGVGSPGSVRQNSRTPRSPLDCGSSPKAQFLVEHETQDSKDLSEAASHSALQSELSAEARRILAAKALANLNESVEKEELKRKVEMWQKELNSRDGAWERICGERDPFILCSLMWSWVEQLKEPVITKEDVDMLVDRRADAAEALFLLEKGQHQTILCVLHCIVNLQTIPVDVEEAFLAHAIKAFTKVNFDSENGPTVYNTLKKIFKHTLEEKRKMTKDGPKPGL

SEQ ID NO: 46734 - protein, 1256 aa, Homo sapiens
MYNRQWKLEHLCYKSGELITETGYMDQIIEYLYPCLIITPLDCFWEGAKLQSGTAYLLGKPPLRWTNFDPLEFLEELKKINYQVDSWEEMLNKAEVGHGYMDRPCLNPADPDCPATAPNKNSTKPLDMALVLNGGCHGLSRKYMHWQEELIVGGTVKNSTGKLVSAHALQTMFQLMTPKQMYEHFKGYEYVSHINWNEDKAAAILEAWQRTYVEVVHQSVAQNSTQKVLSFTTTTLDDILKSFSDVSVIRVASGYLLMLAYACLTMLRWDCSKSQGAVGLAGVLLVALSVAAGLGLCSLIGISFNAATTQVLPFLALGVGVDDVFLLAHAFSETGQNKRIPFEDRTGECLKRTGASVALTSISNVTAFFMAALIPIPALRAFSLQAAVVVVFNFAMVLLIFPAILSMDLYRREDRRLDIFCCFTSPCVSRVIQVEPQAYTDTHDNTRYSPPPPYSSHSFAHETQITMQSTVQLRTEYDPHTHVYYTTAEPRSEISVQPVTVTQDTLSCQSPESTSSTRDLLSQFSDSSLHCLEPPCTKWTLSSFAEKHYAPFLLKPKAKVVVIFLFLGLLGVSLYGTTRVRDGLDLTDIVPRETREYDFIAAQFKYFSFYNMYIVTQKADYPNIQHLLYDLHRSFSNVKYVMLEENKQLPKMWLHYFRDWLQGLQDAFDSDWETGKIMPNNYKNGSDDGVLAYKLLVQTGSRDKPIDISQLTKQRLVDADGIINPSAFYIYLTAWVSNDPVAYAASQANIRPHRPEWVHDKADYMPETRLRIPAAEPIEYAQFPFYLNGLRDTSDFVEAIEKVRTICSNYTSLGLSSYPNGYPFLFWEQYIGLRHWLLLFISVVLACTFLVCAVFLLNPWTAGIIVMVLALMTVELFGMMGLIGIKLSAVPVVILIASVGIGVEFTVHVALAFLTAIGDKNRRAVLALEHMFAPVLDGAVSTLLGVLMLAGSEFDFIVRYFFAVLAILTILGVLNGLVLLPVLLSFFGPYPEVSPANGLNRLPTPSPEPPPSVVRFAMPPGHTHSGSDSSDSEYSSQTTVSGLSEELRHYEAQQGAGGPAHQVIVEATENPVFAHSTVVHPESRHHPPSNPRQQPHLDSGSLPPGRQGQQPRRDPPREGLWPPPYRPRRDAFEISTEGHSGPSNRARWGPRGARSHNPRNPASTAMGSSVPGYCQPITTVTASASVTVAVHPPPVPGPGRNPRGGLCPGYPETDHGLFEDPHVPFHVRCERRDSKVEVIELQDVECEERPRGSSSN

SEQ ID NO: 46735 - protein, 170 aa, Homo sapiens
MLERAERRSYREYRPYETERQADFTAEKFPDEKVPELEVEEETQVQEMTLDEWKNLQEQTRPKPEFNIRKPESTVPSKAVVIHKSKYRDDMVKDDYEDDSHVFRKPANDITSQLEINFGNLPRPGRGARGGTRGGRGRIRRAENYGPRAEVVMQDVAPNPDDPEDFPALS

SEQ ID NO: 46736 - protein, 173 aa, Homo sapiens
MIGTIVLAFICLYLFIVIEFCVFVYVRDELDVLENNLESYITFTNHSGVLTPVILQVKELISVTKGVWVATILPAYLTCVSYLFHILVCYRKHMKRLWAGDKHFLPLKFHNPASSESMVAIARYSGWQIAYILWGYLIIHMVQSLCGMAIMYSLVLPIVQTRAWKCCKGWALG

SEQ ID NO: 46737 - protein, 1564 aa, Homo sapiens
MGFSAWIGMLYMDHYHINPVLVSFCHILITNHREKKLQQSTKYWCLNQSAESLRICAMRGGENRPPARVQSSSEELELRHQSLDAFPGRRLPGRGIQPAAKMSSVGKVTQVPNGKAYQQIFQAEVQLVHSLAATRKRAAERSVTLKSGRIPMMKKVETPEGEVMSPRQQKWMHSLPNDWIMENPVLHREKERAKREKARESENTIAAREVRGLMDTIVPEKISTSTFQRQAEHKRKSYESALASFQEEIAQVGKEMEPLIVDTGGLFLKKLTESDEEMNRLFLKVENDTNLEDYTIQALLELWDKVAGRLLLRKQEIKELDEALHSLEFSRTDKLKSVLKKYAEVIEKTSYLMRPEVYRLINEEAMVMNYALLGNRKALAQLFVNLMESTLQQELDSRHRWQGLVDTWKALKKEALLQSFSEFMASESIHTPPAVTKELEVMLKTQNVLQQRRLKHLCTICDLLPPSYSKTQLTEWHSSLNSLNKELDTYHVDCMMRIRLLYEKTWQECLMHVQNCKKQLLDWKAFTEEEAETLVNQFFFQMVGALQGKVEEDLELLDKSFETLADQTEWQSSHLFKYFQEVVQLWEAHQSELLVQELELEKRMEQHRQKHSLESQVQEAHLDRLLDQLRQQSDKETLAFHLEKVKDYLKNMKSRYECFHTLLTKEVMEYPAIMLKELNSYSSALSQYFFVREIFEQNLAGEVIFKFRQPEAHEKPSQKRVKKLRKKQGSKEDMTRSEESISSGTSTARSVEEVEEENDQEMESFITEEVLGQQKKSPLHAKMDESKEGSIQGLEEMQVEREGSLNPSLNEENVKGQGEKKEESEEEDEKEEEEEEEKLEEEKEEKEAQEEQESLSVGEEEDKEEGLEEIYYEDMESFTISSGNTYFVFVPLEEEHCRKSHSTFSAMFINDTSSAKFIEQVTIPSRLILEIKKQLFSEGGNFSPKEINSLCSRLEKEAARIELVESVIMLNMEKLENEYLDQANDVINKFESKFHNLSVDLIFIEKIQRLLTNLQVKIKCQVAKSNSQTNGLNFSLQQLQNKIKTCQESRGEKTTVTTEELLSFVQTWKEKLSQRIQYLNCSLDRVSMTELVFTNTILKDQEEDSDILTSSEALEEEAKLDVVTPESFTQLSRVGKPLIEDPAVDVIRKLLQLPNTKWPTHHCDKDPSQTGFKRHRCQPENSGKKAVPSASATSAGSLQTTHPPLSHSFTPHPKPNKMERKYRVLGDKPPPAAEDFKGIILTLLWESSENLLTVAEEFYRKEKRPVTRPDCMCDTFDQCAENISKKILEYQSQANKYHNSCLIELRIQIRRFEELLPQVCWLVMENFKEHHWKKFFTSVKEIRGQFEEQQKRLEKRKDKNAQKLHLNLGHPVHFQEMESLHLSEEERQEELDSMIRMNKEKLEECTRRNGQVFITNLATFTEKFLLQLDEVVTIDDVQVARMEPPKQKLSMLIRRKLAGLSLKEESEKPLIERGSRKWPGIKPTEVTIQNKILLQPTSSISTTKTTLGHLAAVEARDAVYLKYLASFEEELKRIQDDCTSQIKEAQRWKDSWKQSLHTIQGLYV

SEQ ID NO: 46738 - protein, 1089 aa, Homo sapiens
MLRAVLQSHKNGVALPRLQGEYRSLTGDWIPFKQLGFPTLEAYLRSVPAVVRIETSRSGEITCYAMACTETARIAQLVARQRSSKRKTGRQVNCQMRVKKTMPFFLEGKPKATLRQPGFASNFSVGKKPNPAPLRDKGNSVGVKPDAEMSPYMLHTTLGNEAFKDIPVQRHVTMSTNNRFSPKASLQPPLQMHLSRTSTKEMSDNLNQTVEKPNVKPPASYTYKMDEVQNRIKEILNKHNNGIWISKLPHFYKELYKEDLNQGILQQFEHWPHICTVEKPCSGGQDLLLYPAKRKQLLRSELDTEKVPLSPLPGPKQTPPLKGCPTVMAGDFKEKVADLLVKYTSGLWASALPKAFEEMYKVKFPEDALKNLASLSDVCSIDYISGNPQKAILYAKLPLPTDKIQKDAGQAHGDNDIKAMVEQEYLQVEESIAESANTFMEDITVPPLMIPTEASPSVLVVELSNTNEVVIRYVGKDYSAAQELMEDEMKEYYSKNPKITPVQAVNVGQLLAVNAEEDAWLRAQVISTEENKIKVCYVDYGFSENVEKSKAYKLNPKFCSLSFQATKCKLAGLEVLSDDPDLVKVVESLTCGKIFAVEILDKADIPLVVLYDTSGEDDININATCLKAICDKSLEVHLQVDAMYTNVKVTNICSDGTLYCQVPCKGLNKLSDLLRKIEDYFHCKHMTSECFVSLPFCGKICLFHCKGKWLRVEITNVHSSRALDVQFLDSGTVTSVKVSELREIPPRFLQEMIAIPPQAIKCCLADLPQSIGMWTPDAVLWLRDSVLNCSDCSIKVTKVDETRGIAHVYLFTPKNFPDPHRSINRQITNADLWKHQKDVFLSAISSGADSPNSKNGNMPMSGNTGENFRKNLTDVIKKSMVDHTSAFSTEELPPPVHLSKPGEHMDVYVPVACHPGYFVIQPWQEIHKLEVLMEEMILYYSVSEERHIAVEKDQVYAAKVENKWHRVLLKGILTNGLVSVYELDYGKHELVNIRKVQPLVDMFRKLPFQAVTAQLAGVKCNQWSEEASMVFRNHVEKKPLVALVQTVIENANPWDRKVVVYLVDTSLPDTDTWIHDFMSEYLIELSKVN

SEQ ID NO: 46739 - protein, 489 aa, Homo sapiens
MSLINPSSSLKAELDGSTKKKYSFAKKKAFALFVKTKEVPTKRSFECKEKLWKCCRQLFTDQTSIHRHVATQHADEIYHQTASILKQLAVTLSTSKSLSSADEKNPLKECLPHSHDVSAWLPDISCFNPDELISGQGSEEGEVLLYYCYHDLEDPQWICAWQTALCQHLHLTGKIRIAAEGINGTVGGSKLATRLYVEVMLSFPLFKDDLCKDDFKTSKGGAHCFPELRVGVFEEIVPMGISPKKISYKKPGIHLSPGEFHKEVEKFLSQANQEQSDTILLDCRNFYESKIGRFQGCLAPDIRKFSYFPSYVDKNLELFREKRVLMYCTGGIRCERGSAYLKAKGVCKEVFQLKGGIHKYLEEFPDGFYKGKLFVFDERYALSYNSDVVSECSYCGARWDQYKLCSTPQCRQLVLTCPACQGQGFTACCVTCQDKGSRKVSGPMQDSFKEECECTARRPRIPRELLQHVRQPVSPEPGPDADEDGPVLM

SEQ ID NO: 46740 - protein, 507 aa, Homo sapiens [sequence omitted]

SEQ ID NO: 46741 - protein, 215 aa, Homo sapiens [sequence omitted]

SEQ ID NO: 46742 - protein, 790 aa, Homo sapiens
MKRWEFHNSPPAPPATPDAALAGNGPVLHLELGQEEAELEEFLCPVKTPPGLVGVAAALQPFPALQNISLKHLGTEIQNTMHNIRGNKQAQGTGHEPPGEDSPQSGEPQREEQPLASDASTPGREPEDSPKPAPKPSLTISFAQKAKRQNNTFPFFSEGITRNRTAQEKVAALEQQVLMLTKELKSQKELVKILHKALEAAQQEKRASSAYLAAAEDKDRLELVRHKVRQIAELGRRVEALEQERESLAHTASLREQQVQELQQHVQLLMDKNHAKQQVICKLSEKVTQDFTHPPDQSPLRPDAANRDFLSQQGKIEHLKDDMEAYRTQNCFLNSEIHQVTKIWRKVAEKEKALLTKCAYLQARNCQVESKYLAGLRRLQEALGDEASECSELLRQLVQEALQWEAGEASSDSIELSPISKYDEYGFLTVPDYEVEDLKLLAKIQALESRSHHLLGLEAVDRPLRERWAALGDLVPSAELKQLLRAGVPREHRPRVWRWLVHLRVQHLHTPGCYQELLSRGQAREHPAARQIELDLNRTFPNNKHFTCPTSSFPDKLRRVLLAFSWQNPTIGYCQGLNRLAAIALLVLEEEESAFWCLVAIVETIMPADYYCNTLTASQVDQRVLQDLLSEKLPRLMAHLGQHHVDLSLVTFNWFLVVFADSLISNILLRVWDAFLYEGTKVVFRYALAIFKYNEKEILRLQNGLEIYQYLRFFTKTISNSRKLMNIAFNDMNPFRMKQLRQLRMVHRERLEAELRELEQLKAEYLERRASRRRAVSEGCASEDEVEGEA

SEQ ID NO: 46743 - protein, 517 aa, Homo sapiens
MPRPPVPANALGARGEAVRLQLQGEELRLQEESVRLHQINIYLSDRISLHRRLPERWNPLCKEKKYDYDNLPRTSVIIAFYNEAWSTLLRTVYSVLETSPDILLEEVILVDDYSDREHLKERLANELSGLPKVRLIRANKREGLVRARLLGASAARGDVLTFLDCHCECHEGWLEPLLQRIHEEESAVVCPVIDVIDWNTFEYLGNSGEPQIGGFDWRLVFTWHTVPERERIRMQSPVDVIRSPTMAGGLFAVSKKYFEYLGSYDTGMEVWGGENLEFSFRIWQCGGVLETHPCSHVGHVFPKQAPYSRNKALANSVRAAEVWMDEFKELYYHRNPRARLEPFGDVTERKQLRDKLQCKDFKWFLETVYPELHVPEDRPGFFGMLQNKGLTDYCFDYNPPDENQIVGHQVILYLCHGMGQNQFFEYTSQKEIRYNTHQPEGCIAVEAGMDTLIMHLCEETAPENQKFILQEDGSLFHEQSKKCVQAARKESSDSFVPLLRDCTNSDHQKWFFKERML

SEQ ID NO: 46744 - protein, 362 aa, Homo sapiens
MLMVYICHNRTVIHHRVPNEEDPSLDRPFISEGTTLKDLIYDMTTSGSGSGLPLLVQRTIARTIVLQESIGKGRFGEVWRGKWRGEEVAVKIFSSREERSWFREAEIYQTVMLRHENILGFIAADNKDNGTWTQLWLVSDYHEHGSLFDYLNRYTVTVEGMIKLALSTASGLAHLHMEIVGTQGKPAIAHRDLKSKNILVKKNGTCCIADLGLAVRHDSATDTIDIAPNHRVGTKRYMAPEVLDDSINMKHFESFKRADIYAMGLVFWEIARRCSIGGIHEDYQLPYYDLVPSDPSVEEMRKVVCEQKLRPNIPNRWQSCEALRVMAKIMRECWYANGAARLTALRIKKTLSQLSQQEGIKM

SEQ ID NO: 46745 - protein, 238 aa, Homo sapiens
MLMVYICHNRTVIHHRVPNEEDPSLDRPFISEGTTLKDLIYDMTTSGSGSGLPLLVQRTIARTIVLQESIGKGRFGEVWRGKWRGEEVAVKIFSSREERSWFREAEIYQTVMLRHENILGFIAADNKDNGTWTQLWLVSDYHEHGSLFDYLNRYTVTVEGMIKLALSTASGLAHLHMEIVGTQGKPAIAHRDLKSKNILVKKNGTCCIADLGLAVRHDSATDTIDIAPNHRVGTKRNS

SEQ ID NO: 46746 - protein, 344 aa, Homo sapiens
MLHPIFEEASDVIKEEFPNENQVVFARVDCDQHSDIAQRYRISKYPTLKLFRNGMMMKREYRGQRSVKALADYIRQQKSDPIQEIRDLAEITTLDRSKRNIIGYFEQKDSDNYRVFERVANILHDDCAFLSAFGDVSKPERYSGDNIIYKPPGHSAPDMVYLGAMTNFDVTYNWIQDKCVPLVREITFENGEELTEEGLPFLILFHMKEDTESLEIFQNEVARQLISEKGTINFLHADCDKFRHPLLHIQKTPADCPVIAIDSFRHMYVFGDFKDVLIPGKLKQFVFDLHSGKLHREFHHGPDPTDTAPGEQAQDVASSPPESSFQKLAPSEYRYTLLRDRDEL

SEQ ID NO: 46747 - protein, 864 aa, Homo sapiens [sequence omitted]

SEQ ID NO: 46748 - protein, 2201 aa, Homo sapiens [sequence omitted]

SEQ ID NO: 46749 - protein, 18 aa, Homo sapiens
MTSKEIILGLCLLSLGST

SEQ ID NO: 46750 - protein, 1375 aa, Homo sapiens
MFFCQHCDYGNRTVKGVLIHYQKKHRDFKANADVIRQHTATIRSLCDRNQKKPASCVLVSPSNLERDKTKLRALKCRQCSYTSPYFYALRKHIKKDHPALKATVTSIMRWAFLDGLIEAGYHCEWCIYSHTEPNGLLLHYQRRHPEHYVDYTYMATKLWAGPDPSPPSLTMPAEAKTYRCRDCVFEAVSIWDITNHYQAFHPWAMNGDESVLLDIIKEKDAVEKPILSSEELAGPVNCENSIPTPFPEQEAECPEDARLSPEKSLQLASANPAISSTPYQCTVCQSEYNNLHGLLTHYGKKHPGMKVKAADFAQDIDINPGAVYKCRHCPYINTRIHGVLTHYQKRHPSIKVTAEDFVHDVEQSADISQNDVEETSRIFKQGYGAYRCKLCPYTHGTLEKLKIHYEKYHNQPEFDVFSQSPPKLPVPLEPEMTTEVSPSQVSITEEEVGEEPVSTSHFSTSHLVSHTVFRCQLCKYFCSTRKGIARHYRIKHNNVRAQPEGKNNLFKCALCAYTNPIRKGLAAHYQKRHDIDAYYTHCLAASRTISDKPNKVIIPSPPKDDSPQLSEELRRAVEKKKCSLCSFQSFSKKGIVSHYMKRHPGVFPKKQHASKLGGYFTAVYADEHEKPTLMEEEERGNFEKAEVEGEAQEIEWLPFRCIKCFKLSFSTAELLCMHYTDHHSRDLKRDFIILGNGPRLQNSTYQCKHCDSKLQSTAELTSHLNIHNEEFQKRAKRQERRKQLLSKQKYADGAFADFKQERPFGHLEEVPKIKERKVVGYKCKFCVEVHPTLRAICNHLRKHVQYGNVPAVSAAVKEADDPAHLFLDGLEAAKDASGALVGRVDGEHCLLDGMLEDETRPGGYHCSQCDRVLMSMQGLRSHERSHLALAMFTREDKYSCQYCSFVSAFRHNLDRHMQTHHGHHKPFRCKLCSFKSSYNSRLKTHILKAHAGEHAYKCSWCSFSTMTISQLKEHSLKVHGKALTLPRPRIVSLLSSHSHHSSQKATPAEEVEDSNDSSYSEPPDVQQQLNHYQSAALARNNSRVSPVPLSGAAAGTEQKTEAVLHCEFCEFSSGYIQSIRRHYRDKHGGKKLFKCKDCSFYTGFKSAFTMHVEAGHSAVPEEGPKDLRCPLCLYHTKYKRNMIDHIVLHREERVVPIEVCRSKLSKYLQGVVFRCDKCTFTCSSDESLQQHIEKHNELKPYKCQLCYYETKHTEELDSHLRDEHKVSRNFELVGRVNLDQLEQMKEKMESSSSDDEDKEEEMNSKAEDRELMRFSDHGAALNTEKRFPCEFCGRAFSQGSEWERHVLRHGMALNDTKQVSREEIHPKEIMENSVKMPSIEEKEDDEAIGIDFSLKNETVAICVVTADKSLLENAEAKKE

SEQ ID NO: 46751 - protein, 513 aa, Homo sapiens
MRQPPGESDMAVSDALLPSFSTFASGPAGREKTLRQAGAPNNRWREELSHMKRLPPVLPGRPYDLAAATVATDLESGGAGAACGGSNLAPLPRRETEEFNDLLDLDFILSNSLTHPPESVAATVSSSASASSSSSPSSSGPASAPSTCSFTYPIRAGNDPGVAPGGTGGGLLYGRESAPPPTAPFNLADINDVSPSGGFVAELLRPELDPVYIPPQQPQPPGGGLMGKFVLKASLSAPGSEYGSPSVISVSKGSPDGSHPVVVAPYNGGPPRTCPKIKQEAVSSCTHLGAGPPLSNGHRPAAHDFPLGRQLPSRTTPTLGLEEVLSSRDCHPALPLPPGFHPHPGPNYPSFLPDQMQPQVPPLHYQGQSRGFVARAGEPCVCWPHFGTHGMMLTPPSSPLELMPPGSCMPEEPKPKRGRRSWPRKRTATHTCDYAGCGKTYTKSSHLKAHLRTHTGEKPYHCDWDGCGWKFARSDELTRHYRKHTGHRPFQCQKCDRAFSRSDHLALHMKRHF

SEQ ID NO: 46752 - protein, 44 aa, Homo sapiens
MIHQGIVVLVSWESLHHAKSEIISDPGVQGYSRSRESSVLLSPN

SEQ ID NO: 46753 - protein, 1787 aa, Homo sapiens
MELLVHLNKRIKSRPKIQLPVETLLVQYQDPAAVSFVTNFTIIYVKMGYPRLPVEKQCELAPTLLTAMEGKPQPQQDSLMHLLIPTLFHMKYPVESSKSASPFNLAEKPKTVQLLLDFMLDVLLMPYGYVLNESQSRQNSSSAQGSSSNSGGGSGIPQPPPGMSFYAAKRVIGDNPWTPEQLEQCKLGIVKFIEAEQVPELEAVLHLVIASSDTRHSVATAADLELKSKQSLIDWNNPAIINKMYKVYLGDIPLKTKEGAVLKPELKRDPVSTRVKLKIVPHLLRSRQAAETFPANIQVVYDGLFGTNTNSKLRTLSLQFVHHICITCPEIKIKPLGPMLLNGLTKLINEYKEDPKLLSMAYSAVGKLSSRMPHLFTKDIALVQQLFEALCKEEPETRLAIQEALSMMVGAYSTLEGAQRTLMEALVASYLIKPEVQVRQVAVKFASTVFPSDHIPSRYLLLLAAGDPREEVHGEAQRVLRCLPGRNRKESTSEQMPSFPEMVYYIQEKASHRMKTPVKYMTGTTVLPFNPAAFGEIVLYLRMCLAHSAGVVPTSQSLADMQDHAPAIGRYIRTLMSSGQMAPSSSNKSGETNPVQIYIGLLQQLLAGVGGLPVMYCLLEAVSVYPEKLATKFVDKTEWIKSLMNNSKEEMRELAALFYSVVVSTVSGNELKSMIEQLIKTTKDNHSPEIQHGSLLALGFTVGRYLAKKKMRMSEQQDLERNADTLPDQEELIQSATETIGSFLDSTSPLLAIAACTALGEIGRNGPLPIPSEGSGFTKLHLVESLLSRIPSSKETNKMKERAIQTLGYFPVGDGDFPHQKLLLQGLMDSVEAKQIELQFTIGEAITSAAIGTSSVAARDAWQMTEEEYTPPAGAKVNDVVPWVLDVILNKHIISPNPHVRQAACIWLLSLVRKLSTHKEVKSHLKEIQSAFVSVLSENDELSQDVASKGLGLVYELGNEQDQQELVSTLVETLMTGKRVKHEVSGETVVFQGGALGKTPDGQGLSTYKELCSLASDLSQPDLVYKFMNLANHHAMWNSRKGAAFGFNVIATRAGEQLAPFLPQLVPRLYRYQFDPNLGIRQAMTSIWNALVTDKSMVDKYLKEILQDLVKNLTSNMWRVRESSCLALNDLLRGRPLDDIIDKLPEIWETLFRVQDDIKESVRKAAELALKTLSKVCVKMCDPAKGAAGQRTIAALLPCLLDKGMMSTVTEVRALSINTLVKISKSAGAMLKPHAPKLIPALLESLSVLEPQVLNYLSLRATEQEKAAMDSARLSAAKSSPMMETINMCLQYLDVSVLGELVPRLCELIRSGVGLGTKGGCASVIVSLTTQCPQDLTPYSGKLMSALLSGLTDRNSVIQKSCAFAMGHLVRTSRDSSTEKLLQKLNGWYMEKEEPIYKTSCALTIHAIGRYSPDVLKNHAKEVLPLAFLGMHEIADEEKSEKEECNLWTEVWQENVPGSFGGIRLYLQELITITQKALQSQSWKMKAQGAIAMASIAKQTSSLVPPYLGMILTALLQGLAGRTWAGKEELLKAIACVVTACSAELEKSVPNQPSTNEILQAVLKECSKENVKYKIVAISCAADILKATKEDRFQEFSNIVIPLIKKNSLESSGVRTTKNEEENEKEKELQLEYLLGAFESLGKAWPRNAETQRCYRQELCKLMCERLKLSTWKVQLGVLQSMNAFFQGLMLLEEEHADPEALAEILLETCKSITYSLENKTYSSVRTEALSVIELLLKKLEESKQWECLTSECRVLLIESLATMEPDSRPELQEKAALLKKTLENLE

SEQ ID NO: 46754 - protein, 297 aa, Homo sapiens
MNVNTRGTYLASKACIPYLKKSKVAHILNISPPLNLNPVWFKQHCAYTIAKYGMSMYVLGMAEEFKGEIAVNALWPKTAIHTAAMDMLGGPGIESQCRKVDIIADAAYSIFQKPKSFTGNFVIDENILKEEGIENFDVYAIKPGHPLQPDFFLDEYPEAVSKKVESTGAVPEFKEEKLQLQPKPRSGAVEETFRIVKDSLSDDVVKATQAIYLFELSGEDGGTWFLDLKSKGGNVGYGEPSDQADVVMSMTTDDFVKMFSGKLKPTMAFMSGKLKIKGNMALAIKLEKLMNQMNARL

SEQ ID NO: 46755 - protein, 551 aa, Homo sapiens
MISKLEKGEAPWLGKGKRPSQGCPSKIARPKQKETDGKVQKDDDQLENIQKSQNKLLREVAVKKKTQAKKNGSDCGSLGKKNNLHKKHVPSKKRLLKFESCGKILKQNLDLPDHSRNCVKRKSDAAKEHKKSFNHSLSDTRKGKKQTGKKHEKLSSHSSSDKCNKTGKKHDKLCCHSSSHIKQDKIQTGEKHEKSPSLSSSTKHEKPQACVKPYECNQCGKVLSHKQGLIDHQRVHTGEKPYECNECGIAFSQKSHLVVHQRTHTGEKPYECIQCGKAHGHKHALTDHLRIHTGEKPYECAECGKTFRHSSNLIQHVRSHTGEKPYECKECGKSFRYNSSLTEHVRTHTGEIPYECNECGKAFKYSSSLTKHMRIHTGEKPFECNECGKAFSKKSHLIIHQRTHTKEKPYKCNECGKAFGHSSSLTYHMRTHTGESPFECNQCGKGFKQIEGLTQHQRVHTGEKPYECNECGKAFSQKSHLIVHQRTHTGEKPYECNECEKAFNAKSQLVIHQRSHTGEKPYECNECGKTFKQNASLTKHVKTHSEDKSHE

SEQ ID NO: 46756 - protein, 1087 aa, Homo sapiens
MVRPNNYSTFYDDQRQNWSIMFESEKAAVEFNKQVCIAKCNSTSSLDAVLSQDLIVADGPAVEVGDSLEVAYTGWLFQNHVLGQVFDSTANKDKLLRLKLGSGKVIKGWEDGMLGMKKGGKRLLIVPPACAVGSEGVIGWTQATDSILVFEVEVRRVKFARDSGSDGHSVSSRDSAAPSPIPGADNLSADPVVSPPTSIPFKSGEPALRTKSNSLSEQLAINTSPDAVKAKLISRMAKMGQPMLPILPPQLDSNDSEIEDVNTLQGGGQPVVTPSVQPSLHPAHPALPQMTSQAPQPSVTGLQAPSAALMQVSSLDSHSAVSGNAQSFQPYAGMQAYAYPQASAVTSQLQPVRPLYPAPLSQPPHFQGSGDMASFLMTEARQHNTEIRMAVSKVADKMDHLMTKVEELQKHSAGNSMLIPSMSVTMETSMIMSNIQRIIQENERLKQEILEKSNRIEEQNDKISELIERNQRYVEQSNLMMEKRNNSLQTATENTQARVLHAEQEKAKVTEELAAATAQVSHLQLKMTAHQKKETELQMQLTESLKETDLLRGQLTKVQAKLSELQETSEQAQSKFKSEKQNRKQLELKVTSLEEELTDLRVEKESLEKNLSERKKKSAQERSQAEEEIDEIRKSYQEELDKLRQLLKKTRVSTDQAAAEQLSLVQAELQTQWEAKCEHLLASAKDEHLQQYQEVCAQRDAYQQKLVQLQEKCLALQAQITALTKQNEQHIKELEKNKSQMSGVEAAASDPSEKVKKIMNQVFQSLRREFELEESYNGRTILGTIMNTIKMVTLQLLNQQEQEKEESSSEEEEEKAEERPRRPSQEQSASASSGQPQAPLNRERPESPMVPSEQVVEEAVPLPPQALTTSQDGHRRKGDSEAEALSEIKDGSLPPELSCIPSHRVLGPPTSIPPEPLGPVSMDSECEESLAASPMAAKPDNPSGKVCVREVAPDGPLQESSTRLSLTSDPEEGDPLALGPESPGEPQPPQLKKDDVTSSTGPHKELSSTEAGSTVAGAALRPSHHSQRSSLSGDEEDELFKGATLKALRPKAQPEEEDEDEVSMKGRPPPTPLFGDDDDDDDIDWLG

SEQ ID NO: 46757 - protein, 284 aa, Homo sapiens
MPLSRLPLRVGQKEFFFPLPLLVPPISWLLLSESQPRLVPGSPVIRPGFQRACVAAACTVAARCPGRGVGDRSQSGASYRPICGPKVGGPTEMLRGMYLTRNGNLQRRHTMKEAKDMKNKLGIFRRRNESPGAPPAGKADKMMKSFKPTSEEALKWGESLEKLLVHKYGLAVFQAFLRTEFSEENLEFWLACEDFKKVKSQSKMASKAKKIFAEYIAIQACKEVNLDSYTREHTKDNLQSVTRGCFDLAQKRIFGLMEKDSYPRFLRSDLYLDLINQKKMSPPL

SEQ ID NO: 46758 - protein, 405 aa, Homo sapiens
MKARQPPGPGAGDTYSMVSYSDTGSSTGSHGTSTTVSSARNTLDLEETGEAVQGNINALPDVSVDDVRSTSQGLSSFKPLPRPPPLAQGNDLPLGQPRKLGREDLQPPSSMPSCSGTVFSAPQNRSPPAGTAPTPGTSSAQDLPSSPIYASVSPANPSSKRPLDAHLALVNQHPIGPFPRVQSPPHLKSPSAEATVAGGCLLPPSPSGHPDQTGTNQHFVMVEVHRPDSEPDVNEVRALPQTRTASTLSQLSDSGQTLSEDSGVDAGEAEASAPGRGRQSVSTKSRSSKELPRNERPTDGANKPPGLLEPTSTLVRVKKSAATLGIAIEGGANTRQPLPRIVTIQRGGSAHNCGQLKVGHVILEVNGLTLRGKEHREAARIIAEAFKTKDRDYIDFLVTEFNVML

SEQ ID NO: 46759 - protein, 630 aa, Homo sapiens [sequence omitted]

SEQ ID NO: 46760 - protein, 12 aa, Homo sapiens
MLRLPLSLPLTL

SEQ ID NO: 46761 - protein, 838 aa, Homo sapiens
MSASRLAGTLIPAMAFLSCVRPESWEPCVEVVPNITYQCMELNFYKIPDNLPFSTKNLDLSFNPLRHLGSYSFFSFPELQVLDLSRCEIQTIEDGAYQSLSHLSTLILTGNPIQSLALGAFSGLSSLQKLVAVETNLASLENFPIGHLKTLKELNVAHNLIQSFKLPEYFSNLTNLEHLDLSSNKIQSIYCTDLRVLHQMPLLNLSLDLSLNPMNFIQPGAFKEIRLHKLTLRNNFDSLNVMKTCIQGLAGLEVHRLVLGEFRNEGNLEKFDKSALEGLCNLTIEEFRLAYLDYYLDDIIDLFNCLTNVSSFSLVSVTIERVKDFSYNFGWQHLELVNCKFGQFPTLKLKSLKRLTFTSNKGGNAFSEVDLPSLEFLDLSRNGLSFKGCCSQSDFGTTSLKYLDLSFNGVITMSSNFLGLEQLEHLDFQHSNLKQMSEFSVFLSLRNLIYLDISHTHTRVAFNGIFNGLSSLEVLKMAGNSFQENFLPDIFTELRNLTFLDLSQCQLEQLSPTAFNSLSSLQVLNMSHNNFFSLDTFPYKCLNSLQVLDYSLNHIMTSKKQELQHFPSSLAFLNLTQNDFACTCEHQSFLQWIKDQRQLLVEVERMECATPSDKQGMPVLSLNITCQMNKTIIGVSVLSVLVVSVVAVLVYKFYFHLMLLAGCIKYGRGENIYDAFVIYSSQDEDWVRNELVKNLEEGVPPFQLCLHYRDFIPGVAIAANIIHEGFHKSRKVIVVVSQHFIQSRWCIFEYEIAQTWQFLSSRAGIIFIVLQKVEKTLLRQQVELYRLLSRNTYLEWEDSVLGRHIFWRRLRKALLDGKSWNPEGTVGTGCNWQEATSI

SEQ ID NO: 46762 - protein, 1892 aa, Homo sapiens
MDLVLEEDVTVPGTLSGCSGLVPSVPDDLDGINPNAGLGNGLLPNVSEETVSPTRARNMKDFENQITELKKENFNLKLRIYFLEERMQQEFHGPTEHIYKTNIELKVEVESLKRELQEREQLLIKASKAVESLAEAGGSEIQRVKEDARKKVQQVEDLLTKRILLLEKDVTAAQAELEKAFAGTETEKALRLRLESKLSEMKKMHEGDLAMALVLDEKDRLIEELKLSLKSKEALIQCLKEEKSQMACPDENVSSGELRGLCAAPREEKERETEAAQMEHQKERNSFEERIQALEEDLREKEREIATEKKNSLKRDKAIQGLTMALKSKEKKVEELNSEIEKLSAAFAKAREALQKAQTQEFQGSEDYETALSGKEALSAALRSQNLTKSTENHRLRRSIKKITQELSDLQQERERLEKDLEEAHREKSKGDCTIRDLRNEVEKLRNEVNEREKAMENRYKSLLSESNKKLHNQEQVIKHLTESTNQKDVLLQKFNEKDLEVIQQNCYLMAAEDLELRSEGLITEKCSSQQPPGSKTIFSKEKKQSSDYEELIQVLKKEQDIYTHLVKSLQESDSINNLQAELNKIFALRKQLEQDVLSYQNLRKTLEEQISEIRRREEESFSLYSDQTSYLSICLEENNRFQVEHFSQEELKKKVSDLIQLVKELYTDNQHLKKTIFDLSCMGFQGNGFPDRLASTEQTELLASKEDEDTIKIGEDDEINFLSDQHLQQSNEIMKDLSKGGCKNGYLRHTESKISDCDGAHAPGCLEEGAFINLLAPLFNEKATLLLESRPDLLKVVRELLLGQLFLTEQEVSGEHLDGKTEKTPKQKGELVHFVQTNSFSKPHDELKLSCEAQLVKAGEVPKVGLKDASVQTVATEGDLLRFKHEATREAWEEKPINTALSAEHRPENLHGVPGWQAALLSLPGITNREAKKSRLPILIKPSRSLGNMYRLPATQEVVTQLQSQILELQGELKEFKTCNKQLHQKLILAEAVMEGRPTPDKTLLNAQPPVGAAYQDSPGEQKGIKTTSSVWRDKEMDSDQQRSYEIDSEICPPDDLASLPSCKENPEDVLSPTSVATYLSSKSQPSAKVSVMGTDQSESINTSNETEYLKQKIHDLETELEGYQNFIFQLQKHSQCSEAIITVLCGTEGAQDGLSKPKNGSDGEEMTFSSLHQVRYVKHVKILGPLAPEMIDSRVLENLKQQLEEQEYKLQKEQNLNMQLFSEIHNLQNKFRDLSPPRYDSLVQSQARELSLQRQQIKDGHGICVISRQHMNTMIKAFEELLQASDVDYCVAEGFQEQLNQCAELLEKLEKLFLNGKSVGVEMNTQNELMERIEEDNLTYQHLLPESPEPSASHALSDYETSEKSFFSRDQKQDNETEKTSVMVNSFSQDLLMEHIQEIRTLRKRLEESIKTNEKLRKQLERQGSEFVQGSTSIFASGSELHSSLTSEIHFLRKQNQALNAMLIKGSRDKQKENDKLRESLSRKTVSLEHLQREYASVKEENERLQKEGSEKERHNQQLIQEVRCSGQELSRVQEEVKLRQQLLSQNDKLLQSLRVELKAYEKLDEEHRRLREASGEGWKGQDPFRDLHSLLMEIQALRLQLERSIETSSTLQSRLKEQLARGAEKAQEGALTLAVQAVSIPEVPLQPDKHDGDKYPMESDNSFDLFDSSQAVTPKSVSETPPLSGNDTDSLSCDSGSSATSTPCVSRLVTGHHLWASKNGRHVLGLIEDYEALLKQISQGQRLLAEMDIQTQEAPSSTSQELGTKGPHPAPLSKFVSSVSTAKLTLEEAYRRLKLLWRVSLPEDGQCPLHCEQIGEMKAEVTKLHKKLFEQEKKLQNTMKLLQLSKRQEKVIFDQLVVTHKILRKARGNLELRPGGAHPGTCSPSRPGS

SEQ ID NO: 46763 - protein, 1347 aa, Homo sapiens
MALVLDEKDRLIEELKLSLKSKEALIQCLKEEKSQMACPDENVSSGELRGLCAAPREEKERETEAAQMEHQKERNSFEERIQALEEDLREKEREIATEKKNSLKRDKAIQGLTMALKSKEKKVEELNSEIEKLSAAFAKAREALQKAQTQEFQGSEDYETALSGKEALSAALRSQNLTKSTENHRLRRSIKKITQELSDLQQERERLEKDLEEAHREKSKGDCTIRDLRNEVEKLRNEVNEREKAMENRYKSLLSESNKKLHNQEQVIKHLTESTNQKDVLLQKFNEKDLEVIQQNCYLMAAEDLELRSEGLITEKCSSQQPPGSKTIFSKEKKQSSDYEELIQVLKKEQDIYTHLVKSLQESDSINNLQAELNKIFALRKQLEQDVLSYQNLRKTLEEQISEIRRREEESFSLYSDQTSYLSICLEENNRFQVEHFSQEELKKKVSDLIQLVKELYTDNQHLKKTIFDLSCMGFQGNGFPDRLASTEQTEIMKDLSKGGCKNGYLRHTESKISDCDGAHAPGCLEEGAFINLLAPLFNEKATLLLESRPDLLKVVRELLLGQLFLTEQEVSGEHLDGKTEKTPKQKGELVHFVQTNSFSKPHDELKLSCEAQLVKAGEVPKVGLKDASVQTVATEGDLLRFKHEATREAWEEKPINTALSAEHRPENLHGVPGWQAALLSLPGITNREAKKSRLPILIKPSRSLGNMYRLPATQEVVTQLQSQILELQGELKEFKTCNKQLHQKLILAEAVMEGRPTPDKTLLNAQPPVGAAYQDSPGEQKGIKTTSSVWRDKEMDSDQQRSYEIDSEICPPDDLASLPSCKENPEDVLSPTSVATYLSSKSQPSAKVSVMGTDQSESINTSNETEYLKQKIHDLETELEGYQNFIFQLQKHSQCSEAIITVLCGTEGAQDGLSKPKNGSDGEEMTFSSLHQVRYVKHVKILGPLAPEMIDSRVLENLKQQLEEQEYKLQKEQNLNMQLFSEIHNLQNKFRDLSPPRYDSLVQSQARELSLQRQQIKDGHGICVISRQHMNTMIKAFEELLQASDVDYCVAEGFQEQLNQCAELLEKLEKLFLNGKSVGVEMNTQNELMERIEEDNLTYQHLLPESPEPSASHALSDYETSEKSFFSRDQKQDNETEKTSVMVNSFSQDLLMEHIQEIRTLRKRLEESIKTNEKLRKQLERQGSEFVQGSTSIFASGSELHSSLTSEIHFLRKQNQALNAMLIKGSRDKQKENDKLRESLSRKTVSLEHLQREYASVKEENERLQKEGSEKERHNQQLIQEVRCSGQELSRVQEEVKLRQQLLSQNDKLLQSLRVELKAYEKLDEEHRRLRGTEALLTLRLLCFGL

SEQ ID NO: 46764 - protein, 430 aa, Homo sapiens [sequence omitted]

SEQ ID NO: 46765 - protein, 819 aa, Homo sapiens
MEMYKEFAEHITNHYLGLCAALEPILSAKTKEEMASALVHILQSTGKVKDFLTDLMMSEVDRCGDNEHLIFRENTLATKAIEEYLKLVGQKYLQDALGEFIKALYESDENCEVDPSKCSAADLPEHQGNLKMCCELAFCKIINSYCVFPRELKEVFASWRQECSSRGRPDISERLISASLFLRFLCPAIMSPSLFNLLQEYPDDRTARTLTLIAKVTQNLANFAKFGSKEEYMSFMNQFLEHEWTNMQRFLLEISNPETLSNTAGFEGYIDLGRELSSLHSLLWEAVSQLEQSIVSKLGPLPRILRDVHTALSTPGSGQLPGTNDLASTPGSGSSSISAGLQKMVIENDLSGLIDFTRLPSPTPENKDLFFVTRSSGVQPSPARSSSYSEANEPDLQMANGGKSLSMVDLQDARTLDGEAGSPAGPDVLPTDGQAAAAQLVAGWPARATPVNLAGLATVRRAGQTPTTPGTSEGAPGRPQLLAPLSFQNPVYQMAAGLPLSPRGLGDSGSEGHSSLSSHSNSEELAAAAKLGSFSTAAEELARRPGELARRQMSLTEKGGQPTVPRQNSAGPQRRIDQPPPPPPPPPPAPRGRTPPNLLSTLQYPRPSSGTLASASPDWVGPSTRLRQQSSSSKGDSPELKPRAVHKQGPSPVSPNALDRTAAWLLTMNAQLLEDEGLGPDPPHRDRLRSKDELSQAEKDLAVLQDKLRISTKKLEEYETLFKCQEETTQKLVLEYQARLEEGEERLRRQQEDKDIQMKGIISRLMSVEEELKKDHAEMQAAVDSKQKIIDAQEKRIASLDAANARLMSALTQLKESMH

SEQ ID NO: 46766 - protein, 253 aa, Homo sapiens [sequence omitted]

SEQ ID NO: 46767 - protein, 37 aa, Homo sapiens
MERLIKKLSMTCRSHLDEEEEQQKQKDLQEKISGKER

SEQ ID NO: 46768 - protein, 878 aa, Homo sapiens
MQSIIDKLQSPESFAKSVQELTIVLQRTGDPANLNRLRPHLELLANIDPNPDAVSPTWEQLENAMVAVKTVVHGLVDFIQNYSRKGHETPQPQPNSKYKTSMCRDLRQQGGCPRGTNCTFAHSQEELEKYRLRNKKINATVRTFPLLNKVGVNNTVTTTAGNVISVIGSTETTGKIVPSTNGISNAENSVSQLISRSTDSTLRALETVKKVGKVGANGQNAAGPSADSVTENKIGSPPKTPVSNVAATSAGPSNVGTELNSVPQKSSPFLTRVPVYPPHSENIQYFQDPRTQIPFEVPQYPQTGYYPPPPTVPAGVAPCVPRFVRSNNVPESSLPPASMPYADHYSTFSPRDRMNSSPYQPPPPQPYGPVPPVPSGMYAPVYDSRRIWRPPMYQRDDIIRSNSLPPMDVMHSSVYQTSLRERYNSLDGYYSVACQPPSEPRTTVPLPREPCGHLKTSCEEQIRRKPDQWAQYHTQKAPLVSSTLPVATQSPTPPSPLFSVDFRADFSESVSGTKFEEDHLSHYSPWSCGTIGSCINAIDSEPKDVIANSNAVLMDLDSGDVKRRVHLFETQRRTKEEDPIIPFSDGPIISKWGAISRSSRTGYHTTDPVQATASQGSATKPISVSDYVPYVNAVDSRWSSYGNEATSSAHYVERDRFIVTDLSGHRKHSSTGDLLSLELQQAKSNSLLLQREANALAMQQKWNSLDEGRHLTLNLLSKEIELRNGELQSDYTEDATDTKPDRDIELELSALDTDEPDGQSEPIEEILDIQLGISSQNDQLLNGMAVENGHPVQQHQKEPPKQKKQSLGEDHVILEEQKTILPVTSCFSQPLPVSISNASCLPITTSVSAGNLILKTHVMSEDKNDFLKPVANGKMVNS

SEQ ID NO: 46769 - protein, 136 aa, Homo sapiens
MFDYGLRELFKQNFEDLHCKFYQLERLMQEYIPDLYNHFLDISLEAHMYASQWFLTLFTAKFPLYMVFHIIDLLLCEGISVIFNVALGLLKTSKDDLLLTDFEGALKFFRVQLPKRYRSEENAKKLMELACNMKVK

SEQ ID NO: 46770 - protein, 33 aa, Homo sapiens
MRRRLNKHEENLKTKKQQRKERLYPLRKYAVKA

SEQ ID NO: 46771 - protein, 1319 aa, Homo sapiens
MQEDESYLLQVLRYLIEFELKESDNPRRLLRRGTCAFSILFKLFSEGLFSAKLFLTATLHEPIMQLLVEDEDHLETDPNKLIERFSPSQQEKLFGEKGSDRFRQKVQEMVESNEAKLVALVNKFIGYLKQNTYCFPHSLRWIVSQMYKTLSCVDRLEVGEVRAMCTDLLLACFICPAVVNPEQYGIISDAPINEVARFNLMQVGRLLQQLAMTGSEEGDPRTKSSLGKFDKSCVAAFLDVVIGGRAVETPPLSSVNLLEGLSRTVVYITYSQLITLVNFMKSVMSGDQLREDRMALDNLLANLPPAKPGKSSSLEMTPYNTPQLSPATTPANKKNRLPIATRSRSRTNMLMDLHMDHEGSSQETIQEVQPEEVLVISLGTGPQLTPGMMSENEVLNMQLSDGGQGDVPVDENKLHGKPDKTLRFSLCSDNLEGISEGPSNRSNSVSSLDLEGESVSELGAGPSGSNGVEALQLLEHEQATTQDNLDDKLRKFEIRDMMGLTDDRDISETVSETWSTDVLGSDFDPNIDEDRLQEIAGAAAENMLGSLLCLPGSGSVLLDPCTGSTISETTSEAWSVEVLPSDSEAPDLKQEERLQELESCSGLGSTSDDTDVREVSSRPSTPGLSVVSGISATSEDIPNKIEDLRSECSSDFGGKDSVTSPDMDEITHGAHQLTSPPSQSESLLAMFDPLSSHEGASAVVRPKVHYARPSHPPPDPPILEGAVGGNEARLPNFGSHVLTPAEMEAFKQRHSYPERLVRSRSSDIVSSVRRPMSDPSWNRRPGNEERELPPAAAIGATSLVAAPHSSSSSPSKDSSRGETEERKDSDDEKSDRNRPWWRKRFVSAMPKAPIPFRKKEKQEKDKDDLGPDRFSTLTDDPSPRLSAQAQVAEDILDKYRNAIKRTSPSDGAMANYESTEVMGDGESAHDSPRDEALQNISADDLPDSASQAAHPQDSAFSYRDAKKKLRLALCSADSVAFPVLTHSTRNGLPDHTDPEDNEIVCFLKVQIAEAINLQDKNLMAQLQETMRCVCRFDNRTCRKLLASIAEDYRKRAPYIAYLTRCRQGLQTTQAHLERLLQRVLRDKEVANRYFTTVCVRLLLESKEKKIREFIQDFQKLTAADDKTAQVEDFLQFLYGAMAQDVIWQNASEEQLQDAQLAIERSVMNRIFKLAFYPNQDGDILRDQVLHEHIQRLSKVVTANHRALQIPEVYLREAPWPSAQSEIRTISAYKTPRDKVQCILRMCSTIMNLLSLANEDSVPGADDFVPVLVFVLIKANPPCLLSTVQYISSFYASCLSGEESYWWMQFTAAVEFIKTIDDRK

SEQ ID NO: 46772 - protein, 1346 aa, Homo sapiens
MQEDESYLLQVLRYLIEFELKESDNPRRLLRRGTCAFSILFKLFSEGLFSAKLFLTATLHEPIMQLLVEDEDHLETDPNKLIERFSPSQQEKLFGEKGSDRFRQKVQEMVESNEAKLVALVNKFIGYLKQNTYCFPHSLRWIVSQMYKTLSCVDRLEVGEVRAMCTDLLLACFICPAVVNPEQYGIISDAPINEVARFNLMQVGRLLQQLAMTGSEEGDPRTKSSLGKFDKSCVAAFLDVVIGGRAVETPPLSSVNLLEGLSRTVVYITYSQLITLVNFMKSVMSGDQLREDRMALDNLLANLPPAKPGKSSSLEMTPYNTPQLSPATTPANKKNRLPIATRSRSRTNMLMDLHMDHEGSSQETIQEVQPEEVLVISLGTGPQLTPGMMSENEVLNMQLSDGGQGDVPVDENKLHGKPDKTLRFSLCSDNLEGISEGPSNRSNSVSSLDLEGESVSELGAGPSGSNGVEALQLLEHEQATTQDNLDDKLRKFEIRDMMGLTDDRDISETVSETWSTDVLGSDFDPNIDEDRLQEIAGAAAENMLGSLLCLPGSGSVLLDPCTGSTISETTSEAWSVEVLPSDSEAPDLKQEERLQELESCSGLGSTSDDTDVREVSSRPSTPGLSVVSGISATSEDIPNKIEDLRSECSSDFGGKDSVTSPDMDEITHDFLYILQPKQHFQHIEAEADMRIQLSSSAHQLTSPPSQSESLLAMFDPLSSHEGASAVVRPKVHYARPSHPPPDPPILEGAVGGNEARLPNFGSHVLTPAEMEAFKQRHSYPERLVRSRSSDIVSSVRRPMSDPSWNRRPGNEERELPPAAAIGATSLVAAPHSSSSSPSKDSSRGETEERKDSDDEKSDRNRPWWRKRFVSAMPKAPIPFRKKEKQEKDKDDLGPDRFSTLTDDPSPRLSAQAQVAEDILDKYRNAIKRTSPSDGAMANYESTEVMGDGESAHDSPRDEALQNISADDLPDSASQAAHPQDSAFSYRDAKKKLRLALCSADSVAFPVLTHSTRNGLPDHTDPEDNEIVCFLKVQIAEAINLQDKNLMAQLQETMRCVCRFDNRTCRKLLASIAEDYRKRAPYIAYLTRCRQGLQTTQAHLERLLQRVLRDKEVANRYFTTVCVRLLLESKEKKIREFIQDFQKLTAADDKTAQVEDFLQFLYGAMAQDVIWQNASEEQLQDAQLAIERSVMNRIFKLAFYPNQDGDILRDQVLHEHIQRLSKVVTANHRALQIPEVYLREAPWPSAQSEIRTISAYKTPRDKVQCILRMCSTIMNLLSLANEDSVPGADDFVPVLVFVLIKANPPCLLSTVQYISSFYASCLSGEESYWWMQFTAAVEFIKTIDDRK

SEQ ID NO: 46773 - protein, 1292 aa, Homo sapiens
MQEDESYLLQVLRYLIEFELKESDNPRRLLRRGTCAFSILFKLFSEGLFSAKLFLTATLHEPIMQLLVEDEDHLETDPNKLIERFSPSQQEKLFGEKGSDRFRQKVQEMVESNEAKLVALVNKFIGYLKQNTYCFPHSLRWIVSQMYKTLSCVDRLEVGEVRAMCTDLLLACFICPAVVNPEQYGIISDAPINEVARFNLMQVGRLLQQLAMTGSEEGDPRTKSSLGKFDKSCVAAFLDVVIGGRAVETPPLSSVNLLEGLSRTVVYITYSQLITLVNFMKSVMSGDQLREDRMALDNLLANLPPAKPGKSSSLEMTPYNTPQLSPATTPANKKNRLPIATRSRSRTNMLMDLHMDHEGSSQETIQEVQPEEVLVISLGTGPQLTPGMMSENEVLNMQLSDGGQGDVPVDENKLHGKPDKTLRFSLCSDNLEGISEGPSNRSNSVSSLDLEGESVSELGAGPSGSNGVEALQLLEHEQATTQDNLDDKLRKFEIRDMMGLTDDRDISETVSETWSTDVLGSDFDPNIDEDRLQEIAGAAAENMLGSLLCLPGSGSVLLDPCTGSTISETTSEAWSVEVLPSDSEAPDLKQEERLQELESCSGLGSTSDDTDVREVSSRPSTPGLSVVSGISATSEDIPNKIEDLRSECSSDFGGKDSVTSPDMDEITHGAHQLTSPPSQSESLLAMFDPLSSHEGASAVVRPKVHYARPSHPPPDPPILEGAVGGNEARLPNFGSHVLTPAEMEAFKQRHSYPERLVRSRSSDIVSSVRRPMSDPSWNRRPGNEERELPPAAAIGATSLVAAPHSSSSSPSKDSSRGETEERKDSDDEKSDRNRPWWRKRFVSAMPKDDPSPRLSAQAQVAEDILDKYRNAIKRTSPSDGAMANYESTEVMGDGESAHDSPRDEALQNISADDLPDSASQAAHPQDSAFSYRDAKKKLRLALCSADSVAFPVLTHSTRNGLPDHTDPEDNEIVCFLKVQIAEAINLQDKNLMAQLQETMRCVCRFDNRTCRKLLASIAEDYRKRAPYIAYLTRCRQGLQTTQAHLERLLQRVLRDKEVANRYFTTVCVRLLLESKEKKIREFIQDFQKLTAADDKTAQVEDFLQFLYGAMAQDVIWQNASEEQLQDAQLAIERSVMNRIFKLAFYPNQDGDILRDQVLHEHIQRLSKVVTANHRALQIPEVYLREAPWPSAQSEIRTISAYKTPRDKVQCILRMCSTIMNLLSLANEDSVPGADDFVPVLVFVLIKANPPCLLSTVQYISSFYASCLSGEESYWWMQFTAAVEFIKTIDDRK

SEQ ID NO: 46774 - protein, 497 aa, Homo sapiens
MCEMVLIDHDVDLEKIHPPSMPGDSGSEIQGSNGETQGYVYAQSVDITSSWDFGIRRRSNTAQRLERLRKERQNQIKCKNIQWKERNSKQSAQELKSLFEKKSLKEKPPISGKQSILSVRLEQCPLQLNNPFNEYSKFDGKGHVGTTATKKIDVYLPLHSSQDRLLPMTVVTMASARVQDLIGLICWQYTSEGREPKLNDNVSAYCLHIAEDDGEVDTDFPPLDSNEPIHKFGFSTLALVEKYSSPGLTSKESLFVRINAAHGFSLIQVDNTKVTMKEILLKAVKRRKGSQKVSGPQYRLEKQSEPNVAVDLDSTLESQSAWEFCLVRENSSRADGVFEEDSQIDIATVQDMLSSHHYKSFKVSMIHRLRFTTDVQLGISGDKVEIDPVTNQKASTKFWIKQKPISIDSDLLCACDLAEEKSPSHAIFKLTYLSNHDYKHLYFESDAATVNEIVLKVNYILESRASTARADYFAQKQRKLNRRTSFSFQKEKKSGQQ

SEQ ID NO: 46775 - protein, 461 aa, Homo sapiens
MCEMVLIDHDVDLEKIHPPSMPGDSGSEIQGSNGETQGYVYAQSVDITSSWDFGIRRRSNTAQRLERLRKERQNQIKCKNIQWKERNSKQSAQELKSLFEKKSLKEKPPISGKQSILSVRLEQCPLQLNNPFNEYSKFDGKGHVGTTATKKIDVYLPLHSSQDRLLPMTVVTMASARVQDLIGLICWQYTSEGREPKLNDNVSAYCLHIAEDDGEVDTDFPPLDSNEPIHKFGFSTLALVEKYSSPGLTSKESLFVRINAAHGFSLIQVDNTKVTMKEILLKAVKRRKGSQKVSGSRADGVFEEDSQIDIATVQDMLSSHHYKSFKVSMIHRLRFTTDVQLGISGDKVEIDPVTNQKASTKFWIKQKPISIDSDLLCACDLAEEKSPSHAIFKLTYLSNHDYKHLYFESDAATVNEIVLKVNYILESRASTARADYFAQKQRKLNRRTSFSFQKEKKSGQQ

SEQ ID NO: 46776 - protein, 288 aa, Homo sapiens
MPEVKDLSEALPETSMDPITGVGVVASRNRAPTGYDVVAQTADGVDADLWKDGLFKSKVTRYLCFTRSFSKENSHLGNVLVDMKLIDIKDTLPVGFIPIQETVDTQEVAFRKKRLCIKFIPRDSTEAAICDIRIMGRTKQAPPQYTFIGELNSMGIWYRMGRVPRNHDSSQPTTPSQSSAASTPAPNLPRHISLTLPATFRGRNSTRTDYEYQHSNLYAISAMDGVPFMISEKFSCVPESMQPFDLLGITIKSLAEIEKEYEYSFRTEQSAAARLPPSPTRCQQIPQS

SEQ ID NO: 46777 - protein, 401 aa, Homo sapiens
MLEGEDLRSPSPGWKIISGSPPEQALSEASFQDPCVEMPPGDSDHGTSDLEKSFNLRPVLSPQQRVPVEARPRKCETHTESFKNSEILKPHRAKPYACNECGKAFSYCSSLSQHQKSHTGEKPYECSECGKAFSQSSSLIQHQRIHTGEKPYKCSECGRAFSQNANLTKHQRTHTGEKPYRCSECEKAFSDCSALVQHQRIHTGEKPYECSDCGKAFRHSANLTNHQRTHTGEKPYKCSECGKAFSYCAAFIQHQRIHTGEKPYRCAACGKAFSQSANLTNHQRTHTGEKPYKCSECGKAFSQSTNLIIHQKTHTGEKPYKCNECGKFFSESSALIRHHIIHTGEKPYECNECGKAFNQSSSLSQHQRIHTGVKPYECSECGKAFRCSSAFVRHQRLHAGE

SEQ ID NO: 46778 - protein, 198 aa, Homo sapiens [sequence omitted]

SEQ ID NO: 46779 - protein, 12 aa, Homo sapiens
MRLPARLAGSGV

SEQ ID NO: 46780 - protein, 219 aa, Homo sapiens
MLEALEEGGPPLTLGLEGEHQRSNAALALQLAHCWLQRQDRHGAGEPKASRPGLLWQLPLAPVFQPTSHMRLGLRNTEWPGRTQVLRRGPLTWYLDGAHTASSAQACVRWFRQALQGRERPSGGPEVRVLLFNATGDRDPAALLKLLQPCQFDYAVFCPNLTEVSSTGNADQQNFTVTLDQVLLRCLEHQQHWNHLDEEQASPDLWSAPSPEPGGLSVR

SEQ ID NO: 46781 - protein, 366 aa, Homo sapiens
MQSLRDLGVKISEQQAEKILKSMDKNGTMTIDWNEWRDYHLLHPVENIPEIILYWKHSTIFDVGENLTVPDEFTVEERQTGMWWRHLVAGGGAGAVSRTCTAPLDRLKVLMQVHASRSNNMGIVGGFTQMIREGGARSLWRGNGINVLKIAPESAIKFMAYEQIKRLVGSDQETLRIHERLVAGSLAGAIAQSSIYPMEVLKTRMALRKTGQYSGMLDCARRILAREGVAAFYKGYVPNMLGIIPYAGIDLAVYETLKNAWLQHYAVNSADPGVFVLLACGTMSSTCGQLASYPLALVRTRMQAQASIEGAPEVTMSSLFKHILRTEGAFGLYRGLAPNFMKVIPAVSISYVVYENLKITLGVQSR

SEQ ID NO: 46782 - protein, 817 aa, Homo sapiens
MAVSRGLPPQQPQQPLLNLQGTNSASLLNGSMLQRALLLQQLQGNLRGYGMASPGLAAPSLTPPQLATPNLQQFFPQATRQSLLGPPPVGVPMNPSQFNLSGRNPQKQARTSSSTTPNRKTMPVEDKSDPPEGSEEAAEPRMDTPEDQDLPPCPEDIAKEKRTPAPEPEPCEASELPAKRLRSSEEPTEKEPPGQLQVKAQPQARMTVPKQTQTPDLLPEALEAQVLPRFQPRVLQVQAQVQSQTQPRIPSTDTQVQPKLQKQAQTQTSPEHLVLQQKQVQPQLQQEAEPQKQVQPQVQPQAHSQGPRQVQLQQEAEPLKQVQPQVQPQAHSQPPRQVQLQLQKQVQTQTYPQVHTQAQPSVQPQEHPPAQVSVQPPEQTHEQPHTQPQVSLLAPEQTPVVVHVCGLEMPPDAVEAGGGMEKTLPEPVGTQVSMEEIQNESACGLDVGECENRAREMPGVWGAGGSLKVTILQSSDSRAFSTVPLTPVPRPSDSVSSTPAATSTPSKQALQFFCYICKASCSSQQEFQDHMSEPQHQQRLGEIQHMSQACLLSLLPVPRDVLETEDEEPPPRRWCNTCQLYYMGDLIQHRRTQDHKIAKQSLRPFCTVCNRYFKTPRKFVEHVKSQGHKDKAKELKSLEKEIAGQDEDHFITVDAVGCFEGDEEEEEDDEDEEEIEVEEELCKQVRSRDISREEWKGSETYSPNTAYGVDFLVPVMGYICRICHKFYHSNSGAQLSHCKSLGHFENLQKYKAAKNPSPTTRPVSRRCAINARNALTALFTSSGRPPSQPNTQDKTPSKVTARPSQPPLPRRSTRLKT

SEQ ID NO: 46783 - protein, 846 aa, Homo sapiens
MEDLIPLVNRLQDAFSAIGQNADLDLPQIAVVGGQSAGKSSVLENFVGRDFLPRGSGIVTRRPLVLQLVNATTEYAEFLHCKGKKFTDFEEVRLEIEAETDRVTGTNKGISPVPINLRVYSPHVLNLTLVDLPGMTKVPVGDQPPDIEFQIRDMLMQFVTKENCLILAVSPANSDLANSDALKVAKEVDPQGQRTIGVITKLDLMDEGTDARDVLENKLLPLRRGYIGVVNRSQKDIDGKKDITAALAAERKFFLSHPSYRHLADRMGTPYLQKVLNQQLTNHIRDTLPGLRNKLQSQLLSIEKEVEEYKNFRPDDPARKTKALLQMVQQFAVDFEKRIEGSGDQIDTYELSGGARINRIFHERFPFELVKMEFDEKELRREISYAIKNIHGIRTGLFTPDLAFEATVKKQVQKLKEPSIKCVDMVVSELTATIRKCSEKLQQYPRLREEMERIVTTHIREREGRTKEQVMLLIDIELAYMNTNHEDFIGFANAQQRSNQMNKKKTSGNQDEILVIRKGWLTINNIGIMKGGSKEYWFVLTAENLSWYKDDEEKEKKYMLSVDNLKLRDVEKGFMSSKHIFALFNTEQRNVYKDYRQLELACETQEEVDSWKASFLRAGVYPERVGDKEKASETEENGSDSFMHSMDPQLERQVETIRNLVDSYMAIVNKTVRDLMPKTIMHLMINNTKEFIFSELLANLYSCGDQNTLMEESAEQAQRRDEMLRMYHALKEALSIIGDINTTTVSTPMPPPVDDSWLQVQSVPAGRRSPTSSPTPQRRAPAVPPARPGSRGPAPGPPPAGSALGGAPPVPSRPGASPDPFGPPPQVPSRPNRAPPGVPRITISDP

SEQ ID NO: 46784 - protein, 846 aa, Homo sapiens
MEDLIPLVNRLQDAFSAIGQNADLDLPQIAVVGGQSAGKSSVLENFVGRDFLPRGSGIVTRRPLVLQLVNATTEYAEFLHCKGKKFTDFEEVRLEIEAETDRVTGTNKGISPVPINLRVYSPHVLNLTLVDLPGMTKVPVGDQPPDIEFQIRDMLMQFVTKENCLILAVSPANSDLANSDALKVAKEVDPQGQRTIGVITKLDLMDEGTDARDVLENKLLPLRRGYIGVVNRSQKDIDGKKDITAALAAERKFFLSHPSYRHLADRMGTPYLQKVLNQQLTNHIRDTLPGLRNKLQSQLLSIEKEVEEYKNFRPDDPARKTKALLQMVQQFAVDFEKRIEGSGDQIDTYELSGGARINRIFHERFPFELVKMEFDEKELRREISYAIKNIHGIRTGLFTPDMAFETIVKKQVKKIREPCLKCVDMVISELISTVRQCTKKLQQYPRLREEMERIVTTHIREREGRTKEQVMLLIDIELAYMNTNHEDFIGFANAQQRSNQMNKKKTSGNQDEILVIRKGWLTINNIGIMKGGSKEYWFVLTAENLSWYKDDEEKEKKYMLSVDNLKLRDVEKGFMSSKHIFALFNTEQRNVYKDYRQLELACETQEEVDSWKASFLRAGVYPERVGDKEKASETEENGSDSFMHSMDPQLERQVETIRNLVDSYMAIVNKTVRDLMPKTIMHLMINNTKEFIFSELLANLYSCGDQNTLMEESAEQAQRRDEMLRMYHALKEALSIIGDINTTTVSTPMPPPVDDSWLQVQSVPAGRRSPTSSPTPQRRAPAVPPARPGSRGPAPGPPPAGSALGGAPPVPSRPGASPDPFGPPPQVPSRPNRAPPGVPRITISDP

SEQ ID NO: 46785 - protein, 25 aa, Homo sapiens
MGKLAVIRGVTTKELYPEFGLDMND

SEQ ID NO: 46786 - protein, 275 aa, Homo sapiens
MEGSEEKELTLTATSVPSFINHPLVCGPAFAHLKVGVGHRLDAQASGVLVLGVGHGCRLLTDMYNAHLTKDYTVRGLLGKATDDFREDGRLVEKTTYDHVTREKLDRILAVIQGSHQKALVMYSNLDLKTQEAYEMAVRGLIRPMNKSPMLITGIRCLYFAPPEFLLEVQCMHETQKELRKLVHEIGLELKTTAVCTQVRRTRDGFFTLDSALLRTQWDLTNIQDAIRAATPQVAAELEKSLSPGLDTKQLPSPGWSWDSQGPSSTLGLERGAGQ

SEQ ID NO: 46787 - protein, 241 aa, Homo sapiens
MPLRARSDGAGPLYSHHLPTSPLQKGLLAAGSAAMALYNPYRHDMVAVLGETTGHRTLKVLRDQMRRDPEGAQILQERPRISTSTLDLGKLQSLPEGSLGREYLRFLDVNRVSPDTRAPTRFVDDEELAYVIQRYREVHDMLHTLLGMPTNILGEIVVKWFEAVQTGLPMCILGAFFGPIRLGAQSLQVLVSELIPWAVQNGRRAPCVLNLYYERRWEQSLRALREELGITAPPMHVQGLA

SEQ ID NO: 46788 - protein, 72 aa, Homo sapiens
MPLRARSDGAGPLYSHHLPTSPLQKGLLAAGSAAMALYNPYRHDSWIPPKRTESESESAVEGEMGVKPKVCL

SEQ ID NO: 46789 - protein, 498 aa, Homo sapiens
MAKLGVEAALINTNLRRDALLHCLTTSRARALVFGSEMASAICEVHASLDPSLSLFCSGSWEPGAVPPSTEHLDPLLKDAPKHLPSCPDKGFTDKLFYIYTSGTTGLPKAAIVVHSRYYRMAALVYYGFRMRPNDIVYDCLPLYHSAGNIVGIGQCLLHGMTVVIRKKFSASRFWDDCIKYNCTIVQYIGELCRYLLNQPPREAENQHQVRMALGNGLRQSIWTNFSSRFHIPQVAEFYGATECNCSLGNFDSQVGACGFNSRILSFVYPIRLVRVNEDTMELIRGPDGVCIPCQPGEPGQLVGRIIQKDPLRRFDGYLNQGANNKKIAKDVFKKGDQAYLTGDVLVMDELGYLYFRDRTGDTFRWKGENVSTTEVEGTLSRLLDMADVAVYGVEVPGTEGRAGMAAVASPTGNCDLERFAQVLEKELPLYARPIFLRLLPELHKTGTYKFQKTELRKEGFDPAIVKDPLFYLDAQKGRYVPLDQEAYSRIQAGEEKL

SEQ ID NO: 46790 - protein, 762 aa, Homo sapiens
MPPGKSSARPVGCKWENPPHCLEITPPSSEKLVSVMRLSDLSTEDDDSGHCKMNRYDKKIDSLMNAVGCLKSEVKMQKGERQMAKRFLEERKEELEEVAHELAETEHENTVLRHNIERMKEEKDFTILQKKHLQQEKECLMSKLVEAEMDGAAAAKQVMALKDTIGKLKTEKQMTCTDINTLTRQKELLLQKLSTFEETNRTLRDLLREQHCKEDSERLMEQQGALLKRLAEADSEKARLLLLLQDKDKEVEELLQEIQCEKAQAKTASELSKSMESMRGHLQAQLRSKEAENSRLCMQIKNLERSGNQHKAEVEAIMEQLKELKQKGDRDKESLKKAIRAQKERAEKSEEYAEQLHVQLADKDLYVAEALSTLESWRSRYNQVVKEKGDLELEIIVLNDRVTDLVNQQQTLEEKMREDRDSLVERLHRQTAEYSAFKLENERLKASFAPMEDKLNQAHLEVQQLKASVKNYEGMIDNYKSQVMKTRLEADEVAAQLERCDKENKILKDEMNKEIEAARRQFQSQLADLQQLPDILKITEAKLAECQDQLQGYERKNIDLTAIISDLRSRIEHQGDKLEMAREKHQASQKENKQLSLKVDELERKLEATSAQNIEFLQVIAKREEAIHQSQLRLEEKTRECGTLARQLESAIEDARRQVEQTKEHALSKERAAQNKILDLETQLSRTKTELSQLRRSRDDADRRYQSRLQDLKDRLEQSESTNRSMQNYVQFLKSSYANVFGDGPYSTFLTSSPIRSRSPPA

SEQ ID NO: 46791 - protein, 759 aa, Homo sapiens
MICLPCKWVTKDSCNDSFRGWAAPGPEPTYPNSTILPTPDTGPTGIKYDLDRHQYNYVDAVCYENRLHWFAKYFPYLVLLHTLIFLACSNFWFKFPRTSSKLEHFVSILLKCFDSPWTTRALSETVVEESDPKPAFSKMNGSMDKKSSTVSEDVEATVPMLQRTKSRIEQGIVDRSETGVLDKKEGEQAKALFEKVKKFRTHVEEGDIVYRLYMRQTIIKVIKFILIICYTVYYVHNIKFDVDCTVDIESLTGYRTYRCAHPLATLFKILASFYISLVIFYGLICMYTLWWMLRRSLKKYSFESIREESSYSDIPDVKNDFAFMLHLIDQYDPLYSKRFAVFLSEVSENKLRQLNLNNEWTLDKLRQRLTKNAQDKLELHLFMLSGIPDTVFDLVELEVLKLELIPDVTIPPSIAQLTGLKELWLYHTAAKIEAPALAFLRENLRALHIKFTDIKEIPLWIYSLKTLEELHLTGNLSAENNRYIVIDGLRELKRLKVLRLKSNLSKLPQVVTDVGVHLQKLSINNEGTKLIVLNSLKKMANLTELELIRCDLERIPHSIFSLHNLQEIDLKDNNLKTIEEIISFQHLHRLTCLKLWYNHIAYIPIQIGNLTNLERLYLNRNKIEKIPTQLFYCRKLRYLDLSHNNLTFLPADIGLLQNLQNLAITANRIETLPPELFQCRKLRALHLGNNVLQSLPSRVGELTNLTQIELRGNRLECLPVELGECPLLKRSGLVVEEDLFNTLPPEVKERLWRADKEQA

SEQ ID NO: 46792 - protein, 577 aa, Homo sapiens [sequence omitted]

SEQ ID NO: 46793 - protein, 132 aa, Homo sapiens
MWFFSVYSFLFLYLRMHQTNNARFLDLLWRHVLSLGLLAVAFLVSYSRVYLLYHTWSQVLYGGIAGGLMAIAWFIFTQEVLTPLFPRIAAWPVSEFFLIRDTSLIPNVLWFEYTVTRAEARNRQRKLGTKLQ

SEQ ID NO: 46794 - protein, 89 aa, Homo sapiens
MWFFSVYSFLFLYLRMHQTNNARFLDLLWRHVLSLGLLAVAFLVSYSRPVSEFFLIRDTSLIPNVLWFEYTVTRAEARNRQRKLGTKLQ

SEQ ID NO: 46795 - protein, 83 aa, Homo sapiens
MPGWPSMVGLEAEAGRQLWAGVGWVGSGGGEALAVLAGAPPRLLFTLPPGPEAPCVQASPWLFSSLALGSAGFPDCSHISPAP

SEQ ID NO: 46796 - protein, 88 aa, Homo sapiens
MLASRSASLLKSYSQEAAIEQPVAPRPTALSPDYLSWTASSPYSTVPPYSPGSSGPATPGVNMANSIASLRLKAKEFSLHHSQVPTVN

SEQ ID NO: 46797 - protein, 145 aa, Homo sapiens [sequence omitted]

SEQ ID NO: 46798 - protein, 219 aa, Homo sapiens
MKTGGMVDMKKLKERGKDKISEEEDLHLGTSFSAETNRRDEDADMMKYIETELKKRKGIVEHEEQKVKPKNAEDCLYELPENIRVSSAKKTEEMLSNQMLSGIPEVDLGIDAKIKNIISTEDAKARLLAEQQNKKKDSETSFVPTNMAVNYVQHNRFYHEELNAPIRRNKEEPKARPLRVGDTEKPEPERSPPNRKRPANEKATDDYHYEKFKKMNRRY

SEQ ID NO: 46799 - protein, 533 aa, Homo sapiens
MNDYAGQHEVISENMASQIIVDLARYVQELKQERKSNFHDGRKAQQHIETCWKQLESSKRRFERDCKEADRAQQYFEKMDADINVTKADVEKARQQAQIRHQMAEDSKADYSSILQKFNHEQHEYYHTHIPNIFQKIQEMEERRIVRMGESMKTYAEVDRQVIPIIGKCLDGIVKAAESIDQKNDSQLVIEAYKSGFEPPGDIEFEDYTQPMKRTVSDNSLSNSRGEGKPDLKFGGKSKGKLWPFIKKNKLMSLLTSPHQPPPPPPASASPSAVPNGPQSPKQQKEPLSHRFNEFMTSKPKIHCFRSLKRGGATPEDFSNLPPEQRRKKLQQKVDELNKEIQKEMDQRDAITKMKDVYLKNPQMGDPASLDHKLAEVSQNIEKLRVETQKFEAWLAEVEGRLPARSEQARRQSGLYDSQNPPTVNNCAQDRESPDGSYTEEQSQESEMKVLATDFDDEFDDEEPLPAIGTCKALYTFEGQNEGTISVVEGETLYVIEEDKGDGWTRIRRNEDEEGYVPTSYVEVCLDKNAKDS

SEQ ID NO: 46800 - protein, 538 aa, Homo sapiens
MNDYAGQHEVISENMASQIIVDLARYVQELKQERKSNFHDGRKAQQHIETCWKQLESSKRRFERDCKEADRAQQYFEKMDADINVTKADVEKARQQAQIRHQMAEDSKADYSSILQKFNHEQHEYYHTHIPNIFQKIQEMEERRIVRMGESMKTYAEVDRQVIPIIGKCLDGIVKAAESIDQKNDSQLVIEAYKSGFEPPGDIEFEDYTQPMKRTVSDNSLSNSRGEGKPDLKFGGKSKGKLWPFIKKNKLMSLLTSPHQPPPPPPASASPSAVPNGPQSPKQQKEPLSHRFNEFMTSKPKIHCFRSLKRGLSLKLGATPEDFSNLPPEQRRKKLQQKVDELNKEIQKEMDQRDAITKMKDVYLKNPQMGDPASLDHKLAEVSQNIEKLRVETQKFEAWLAEVEGRLPARSEQARRQSGLYDSQNPPTVNNCAQDRESPDGSYTEEQSQESEMKVLATDFDDEFDDEEPLPAIGTCKALYTFEGQNEGTISVVEGETLYVIEEDKGDGWTRIRRNEDEEGYVPTSYVEVCLDKNAKDS

SEQ ID NO: 46801 - protein, 527 aa, Homo sapiens
MNDYAGQHEVISENMASQIIVDLARYVQELKQERKSNFHDGRKAQQHIETCWKQLESSKRRFERDCKEADRAQQYFEKMDADINVTKADVEKARQQAQIRHQMAEDSKADYSSILQKFNHEQHEYYHTHIPNIFQKIQEMEERRIVRMGESMKTYAEVDRQVIPIIGKCLDGIVKAAESIDQKNDSQLVIEAYKSGFEPPGDIEFEDYTQPMKRTVSDNSLSNSRGEGKPDLKFGGKSKGKLWPFIKKNKPPPPPPASASPSAVPNGPQSPKQQKEPLSHRFNEFMTSKPKIHCFRSLKRGGATPEDFSNLPPEQRRKKLQQKVDELNKEIQKEMDQRDAITKMKDVYLKNPQMGDPASLDHKLAEVSQNIEKLRVETQKFEAWLAEVEGRLPARSEQARRQSGLYDSQNPPTVNNCAQDRESPDGSYTEEQSQESEMKVLATDFDDEFDDEEPLPAIGTCKALYTFEGQNEGTISVVEGETLYVIEEDKGDGWTRIRRNEDEEGYVPTSYVEVCLDKNAKGAKTYI

SEQ ID NO: 46802 - protein, 363 aa, Homo sapiens [sequence omitted]

SEQ ID NO: 46803 - protein, 382 aa, Homo sapiens
MGEKSFSVHNNGGAVSFQFFFNISTDDQEGLYSLYFHKCLGKELPSDKFTFSLDIEITEKNPDSYLSAGEIPLPKLYISMAFFFFLSGTIWIHILRKRRNDVFKIHWLMAALPFTKSLSLVFHAIDYHYISSQGFPIEGWAVVYYITHLLKGALLFITIALIGTGWAFIKHILSDKDKKIFMIVIPLQVLANVAYIIIESTEEGTTEYGLWKDSLFLVDLLCCGAILFPVVWSIRHLQEASATDGKGDSMGPLQQRANLRAGSRIAAINLAKLKLFRHYYVLIVCYIYFTRIIAFLLKLAVPFQWKWLYQLLDETATLVFFVLTGYKFRPASDNPYLQLSQEEEDLEMESVVTTSGVMESMKKVKKVTNGSVEPQGEWEGAV

SEQ ID NO: 46804 - protein, 559 aa, Homo sapiens
MKAEGFVDALHRVRQIAAKIDSIPHLNNSTPLVDPSVYGYGVQKRPLDDGVGNQLGALVHQRTVITEEFKVPDKMVGFIIGRGGEQISRIQAESGCKIQIASESSGIPERPCVLTGTPESIEQAKRLLGQIVDRCRNGPGFHNDIDSNSTIQEILIPASKVGLVIGRGGETIKQLQERTGVKMVMIQDGPLPTGADKPLRITGDAFKVQQAREMVLEIIREKDQADFRGVRGDFNSRMGGGSIEVSVPRFAVGIVIGRNGEMIKKIQNDAGVRIQFKPDDGISPERAAQVMGPPDRCQHAAHIISELILTAQERDGFGGLAAARGRGRGRGDWSVGAPGGVQEITYTVPADKCGLVIGKGGENIKSINQQSGAHVELQRNPPPNSDPNLRRFTIRGVPQQIEVARQLIDEKVGGTNLGAPGAFGQSPFSQPPAPPHQNTFPPRSSGCFPNMAAKVNGNPHSTPVSGPPAFLTQGWGSTYQAWQQPTQQVPSQQSQPQSSQPNYSKAWEDYYKKQSHAASAAPQASSPPDYTMAWAEYYRQQVAFYGQTLGQAQAHSQEQ

SEQ ID NO: 46805 - protein, 2000 aa, Homo sapiens
MKFPIHHLALSCDNLTLSACMMSSEYGSIIAFFDVRTFSNEAKQQKRPFAYHKLLKDAGGMVIDMKWNPTVPSMVAVCLADGSIAVLQVTETVKVCATLPSTVAVTSVCWSPKGKQLAVGKQNGTVVQYLPTLQEKKVIPCPPFYESDHPVRVLDVLWIGTYVFAIVYAAADGTLETSPDVVMALLPKKEEKHPEIFVNFMEPCYGSCTERQHHYYLSYIEEWDLVLAASAASTEVSILARQSDQINWESWLLEDSSRAELPVTDKSDDSLPMGVVVDYTNQVEITISDEKTLPPAPVLMLLSTDGVLCPFYMINQNPGVKSLIKTPERLSLEGERQPKSPGSTPTTPTSSQAPQKLDASAAAAPASLPPSSPAAPIATFSLLPAGGAPTVFSFGSSSLKSSATVTGEPPSYSSGSDSSKAAPGPGPSTFSFVPPSKASLAPTPAASPVAPSAASFSFGSSGFKPTLESTPVPSVSAPNIAMKPSFPPSTSAVKVNLSEKFTAAATSTPVSSSQSAPPMSPFSSASKPAASGPLSHPTPLSAPPSSVPLKSSVLPSPSGRSAQGSSSPVPSMVQKSPRITPPAAKPGSPQAKSLQPAVAEKQGHQWKDSDPVMAGIGEEIAHFQKELEELKARTSKACFQVGTSEEMKMLRTESDDLHTFLLEIKETTESLHGDISSLKTTLLEGFAGVEEAREQNERNRDSGYLHLLYKRPLDPKSEAQLQEIRRLHQYVKFAVQDVNDVLDLEWDQHLEQKKKQRHLLVPERETLFNTLANNREIINQQRKRLNHLVDSLQQLRLYKQTSLWSLSSAVPSQSSIHSFDSDLESLCNALLKTTIESHTKSLPKVPAKLSPMKQAQLRNFLAKRKTPPVRSTAPASLSRSAFLSQRYYEDLDEVSSTSSVSQSLESEDARTSCKDDEAVVQAPRHAPVVRTPSIQPSLLPHAAPFAKSHLVHGSSPGVMGTSVATSASKIIPQGADSTMLATKTVKHGAPSPSHPISAPQAAAAAALRRQMASQAPAVNTLTESTLKNVPQVVNVQELKNNPATPSTAMGSSVPYSTAKTPHPVLTPVAANQAKQGSLINSLKPSGPTPASGQLSSGDKASGTAKIETAVTSTPSASGQFSKPFSFSPSGTGFNFGIITPTPSSNFTAAQGATPSTKESSQPDAFSSGGGSKPSYEAIPESSPPSGITSASNTTPGEPAASSSRPVAPSGTALSTTSSKLETPPSKLGELLFPSSLAGETLGSFSGLRVGQADDSTKPTNKASSTSLTSTQPTKTSGVPSGFNFTAPPVLGKHTEPPVTSSATTTSVAPPAATSTSSTAVFGSLPVTSAGSSGVISFGGTSLSAGKTSFSFGSQQTNSTVPPSAPPPTTAATPLPTSFPTLSFGSLLSSATTPSLPMSAGRSTEEATSSALPEKPGDSEVSASAASLLEEQQSAQLPQAPPQTSDSVKKEPVLAQPAVSNSGTAASSTSLVALSAEATPATTGVPDARTEAVPPASSFSVPGQTAVTAAAISSAGPVAVETSSTPIASSTTSIVAPGPSAEAAAFGTVTSGSSVFAQPPAASSSSAFNQLTNNTATAPSATPVFGQVAASTAPSLFGQQTGSTASTAAATPQVSSSGFSSPAFGTTAPGVFGQTTFGQASVFGQSASSAASVFSFSQPGFSSVPAFGQPASSTPTSTSGSVFGAASSTSSSSSFSFGQSSPNTGGGLFGQSNAPAFGQSPGFGQGGSVFGGTSAATTTAATSGFSFCQASGFGSSNTGSVFGQAASTGGIVFGQQSSSSSGSVFGSGNTGRGGGFFSGLGGKPSQDAANKNPFSSASGGFGSTATSNTSNLFGNSGAKTFGGFASSSFGEQKPTGTFSSGGGSVASQGFGFSSPNKTGGFGAAPVFGSPPTFGGSPGFGGVPAFGSAPAFTSPLGSTGGKVFGEGTAAASAGGFGFGSSSNTTSFGTLASQNAPTFGSLSQQTSGFGTQSSGFSGFGSGTGGFSFGSNNSSVQGFGGWRS

SEQ ID NO: 46806 - protein, 1990 aa, Homo sapiens
MKFPIHHLALSCDNLTLSACMMSSEYGSIIAFFDVRTFSNEAKQQKRPFAYHKLLKDAGGMVIDMKWNPTVPSMVAVCLADGSIAVLQVTETVKVCATLPSTVAVTSVCWSPKGKQLAVGKQNGTVVQYLPTLQEKKVIPCPPFYESDHPVRVLDVLWIGTYVFAIVYAAADGTLETSPDVVMALLPKKEEKHPEIFVNFMEPCYGSCTERQHHYYLSYIEEWDLVLAASAASTEVSILARQSDQINWESWLLEDSSRAELPVTDKSDDSLPMGVVVDYTNQVEITISDEKTLPPAPVLMLLSTDGVLCPFYMINQNPGVKSLIKTPERLSLEGERQPKSPGSTPTTPTSSQAPQKLDASAAAAPASLPPSSPAAPIATFSLLPAGGAPTVFSFGSSSLKSSATVTGEPPSYSSGSDSSKAAPGPGPSTFSFVPPSKASLAPTPAASPVAPSAASFSFGSSGFKPTLESTPVPSVSAPNIAMKPSFPPSTSAVKVNLSENSSQSAPPMSPFSSASKPAASGPLSHPTPLSAPPSSVPLKSSVLPSPSAGRSAQGSSSPVPSMVQKSPRITPPAAKPGSPQAKSLQPAVAEKQGHQWKDSDPVMAGIGEEIAHFQKELEELKARTSKACFQVGTSEEMKMLRTESDDLHTFLLEIKETTESLHGDISSLKTTLLEGFAGVEEAREQNERNRDSGYLHLLYKRPLDPKSEAQLQEIRRLHQYVKFAVQDVNDVLDLEWDQHLEQKKKQRHLLVPERETLFNTLANNREIINQQRKRLNHLVDSLQQLRLYKQTSLWSLSSAVPSQSSIHSFDSDLESLCNALLKTTIESHTKSLPKVPAKLSPMKQAQLRNFLAKRKTPPVRSTAPASLSRSAFLSQRYYEDLDEVSSTSSVSQSLESEDARTSCKDDEAVVQAPRHAPVVRTPSIQPSLLPHAAPFAKSHLVHGSSPGVMGTSVATSASKIIPQGADSTMLATKTVKHGAPSPSHPISAPQAAAAAALRRQMASQAPAVNTLTESTLKNVPQVVNVQELKNNPATPSTAMGSSVPYSTAKTPHPVLTPVAANQAKQGSLINSLKPSGPTPASGQLSSGDKASGTAKIETAVTSTPSASGQFSKPFSFSPSGTGFNFGIITPTPSSNFTAAQGATPSTKESSQPDAFSSGGGSKPSYEAIPESSPPSGITSASNTTPGEPAASSSRPVAPSGTALSTTSSKLETPPSKLGELLFPSSLAGETLGSFSGLRVGQADDSTKPTNKASSTSLTSTQPTKTSGVPSGFNFTAPPVLGKHTEPPVTSSATTTSVAPPAATSTSSTAVFGSLPVTSAGSSGVISFGGTSLSAGKTSFSFGSQQTNSTVPPSAPPPTTAATPLPTSFPTLSFGSLLSSATTPSLPMSAGRSTEEATSSALPEKPGDSEVSASAASLLEEQQSAQLPQAPPQTSDSVKKEPVLAQPAVSNSGTAASSTSLVALSAEATPATTGVPDARTEAVPPASSFSVPGQTAVTAAAISSAGPVAVETSSTPIASSTTSIVAPGPSAEAAAFGTVTSGSSVFAQPPAASSSSAFNQLTNNTATAPSATPVFGQVAASTAPSLFGQQTGSTASTAAATPQVSSSGFSSPAFGTTAPGVFGQTTFGQASVFGQSASSAASVFSFSQPGFSSVPAFGQPASSTPTSTSGSVFGAASSTSSSSSFSFGQSSPNTGGGLFGQSNAPAFGQSPGFGQGGSVFGGTSAATTTAATSGFSFCQASGFGSSNTGSVFGQAASTGGIVFGQQSSSSSGSVFGSGNTGRGGGFFSGLGGKPSQDAANKNPFSSASGGFGSTATSNTSNLFGNSGAKTFGGFASSSFGEQKPTGTFSSGGGSVASQGFGFSSPNKTGGFGAAPVFGSPPTFGGSPGFGGVPAFGSAPAFTSPLGSTGGKVFGEGTAAASAGGFGFGSSSNTTSFGTLASQNAPTFGSLSQQTSGFGTQSSGFSGFGSGTGGFSFGSNNSSVQGFGGWRS

SEQ ID NO: 46807 - protein, 81 aa, Homo sapiens [sequence omitted]

SEQ ID NO: 46808 - protein, 201 aa, Homo sapiens [sequence omitted]

SEQ ID NO: 46809 - protein, 1267 aa, Homo sapiens
MGNVYHPPTYHDMLPAFMCSPKSSENQGTVERGSFPLPQLRLEPRVPFRQFQMNDQDGKENRLGLSRPLRPLRQLVERAPRPTIINAENLKGLDDLDADADDGWAGLHEEVDYSEKLKFSDDEEEEEVVKDGRPKWNSWDPRRQRQLSMSSADSADAKRTREEGKDWAEAVGASRVVRKAPDPQPPPRKLHGWAPGPDYQKSSMGSMFRQQSIEDKEDKPPPRQKFIQSEMSEAVERARKRREEEERRAREERLAACAAKLKQLDQKCKQARKAGEARKQAEKEVPWSPSAEKASPQENGPAVHKGSPEFPAQETPTTFPEEAPTVSPAVAQSNSSEEEAREAGSPAQEFKYQKSLPPRFQRQQQQQQQEQLYKMQHWQPVYPPPSHPQRTFYPHHPQMLGFDPRWMMMPSYMDPRITPTRTPVDFYPSALHPSGLMKPMMPQESLNGTGCRSEDQNCVPPLQERKVTPIDSPPVWSPEGYMALQSKGYPLPHPKSSDTLAMDMRVRSPDEALPGGLSGCSSGSGHSPYALERAAHASADLPEASSKKAEKEAKLAAPRAGEQGEAMKQFDLNYGSAIIENCGSSPGEESEVGSMVGEGFIEVLTKKQRRLLEEERRKKEQAVQVPVKGRGLSSRIPPRFAKKQNNLCLEQGDVTVPGSSLGTEIWESSSQALPVQAPANDSWRKAVTAFSSTETGSAEQGFKSSQGDSGVDLSAESRESSATSSQRSSPYGTLKPEEMSGPGLAEPKADSHKEQAPKPSEQKDSEQGSGQSKEHRPGPIGNERSLKNRKGSEGAERLQGAVVPPVNGVEIHVDSVLPVPPIEFGVSPKDSDFSLPPGSASGPTGSPVVKLQDALASNAGLTQSIPILRRDHHIQRAIGLSPMSFPTADLTLKMESARKAWENSPSLPEQSSPGGAGSGIQPPSSVGASSGVNYSSFGGVSMPPMPVASVAPSASMPGSHLPPLYLDGHVFASQPRLVPQTIPQQQSYQQAAAAQQIPISLHTSLQAQAQLGLRGGLPVSQSQEIFSSLQPFRSQVYMHPSLSPPSTMILSGGTALKPPYSAFPGMQPLEMVKPQSGSPYQPMSGNQALVYEGQLSQAAGLGASQMLDSQLPQLTMPLPRYGSGQQPLILPQSIQLPPGQSLSVGAPRRIPPPGSQPPVLNTSREPSQMEMKGFHFADSKQNVPSGGPVPSPQTYRPSSASPSGKPSGSAVNMGSVQGHYVQQAKQRVDEKPSLGAVKLQEAPSAASQMKRTGAIKPRAVKVEESKA

SEQ ID NO: 46810 - protein, 670 aa, Homo sapiens
MPEGSQAGREAGTDMQESQPTVGLDDETPQLLGPTHKKKSKKKKKKKSNHQEFEALAMPEGSQVGSEVGADMQESRPAVGLHGETAGIPAPAYKNKSKKKKKKSNHQEFEAVAMPESLESAYPEGSQVGSEVGTVEGSTALKGFKESNSTKKKSKKRKLTSVKRARVSGDDFSVPSKNSESTLFDSVEGDGAMMEEGVKSRPRQKKTQACLASKHVQEAPRLEPANEEHNVETAEDSEIRYLSADSGDADDSDADLGSAVKQLQEFIPNIKDRATSTIKRMYRDDLERFKEFKAQGVAIKFGKFSVKENKQLEKNVEDFLALTGIESADKLLYTDRYPEEKSVITNLKRRYSFRLHIGRNIARPWKLIYYRAKKMFDVNNYKGRYSEGDTEKLKMYHSLLGNDWKTIGEMVARSSLSVALKFSQISSQRNRGAWSKSETRKLIKAVEEVILKKMSPQELKEVDSKLQENPESCLSIVREKLYKGISWVEVEAKVQTRNWMQCKSKWTEILTKRMTNGRRIYYGMNALRAKVSLIERLYEINVEDTNEIDWEDLASAIGDVPPSYVQTKFSRLKAVYVPFWQKKTFPEIIDYLYETTLPLLKEKLEKMMEKKGTKIQTPAAPKQVFPFRDIFYYEDDSEGEDIEKESEGQAPCMAHACNSSTLGGQGRWII

SEQ ID NO: 46811 - protein, 601 aa, Homo sapiens [sequence omitted]

SEQ ID NO: 46812 - protein, 773 aa, Homo sapiens [sequence omitted]

SEQ ID NO: 46813 - protein, 111 aa, Homo sapiens [sequence omitted]

SEQ ID NO: 46814 - protein, 774 aa, Homo sapiens
MSQFLCLKNIRTFLKVCHDKFGLRNSELFDPFDLFDVRDFGKVISAVSRLSLHSIAQNKGIRPFPSEETTENDDDVYRSLEELADEHDLGEDIYDCVPCEDGGDDIYEDIIKVEVQQPMKMGMTEDDKRNCCLLEIQETEAKYYRTLEDIEKNYMSPLRLVLSPADMAAVFINLEDLIKVHHSFLRAIDVSVMVGGSTLAKVFLDFKERLLIYGEYCSHMEHAQNTLNQLLASREDFRQKVEECTLKVQDGKFKLQDLLVVPMQRVLKYHLLLKELLSHSAERPERQQLKEALEAMQDLAMYINEVKRDKETLRKISEFQSSIENLQVKLEEFGRPKIDGELKVRSIVNHTKQDRYLFLFDKVVIVCKRKGYSYELKEIIELLFHKMTDDPMNNKDVKKWSYGFYLIHLQGKQGFQFFCKTEDMKRKWMEQFEMAMSNIKPDKANANHHSFQMYTFDKTTNCKACKMFLRGTFYQGYMCTKCGVGAHKECLEVIPPCKFTSPADLDASGAGPGPKMVAMQNYHGNPAPPGKPVLTFQTGDVLELLRGDPESPWWEGRLVQTRKSGYFPSSSVKPCPVDGRPPISRPPSREIDYTAYPWFAGNMERQQTDNLLKSHASGTYLIRERPAEAERFAISIKFNDEVKHIKVVEKDNWIHITEAKKFDSLLELVEYYQCHSLKESFKQLDTTLKYPYKSRERSASRASSRSPVFTPRVIGTAVARYNFAARDMRELSLREGDVVRIYSRIGGDQGWWKGETNGRIGWFPSTYVEEEGIQ

SEQ ID NO: 46815 - protein, 1587 aa, Homo sapiens
MEAPPDGAADLVPLDRYDAARAKIAANLQWICAKAYGRDNIPEDLRDPFYVDQYEQEHIKPPVIKLLLSSELYCRVCSLILKGDQVAALQGHQSVIQALSRKGIYVMESDDTPVTESDLSRAPIKMSAHMAMVDALMMAYTVEMISIEKVVASVKRFSTFSASKELPYDLEDAMVFWINKVNLKMREITEKEVKLKQQLLESPAHQKVRYRREHLSARQSPYFPLLEDLMRDGSDGAALLAVIHYYCPEQMKLDDICLKEVTSMADSLYNIRLLREFSNEYLNKCFYLTLEDMLYAPLVLKPNVMVFIAELFWWFENVKPDFVQPRDVQELKDAKTVLHQKSSRPPVPISNATKRSFLGSPAAGTLAELQPPVQLPAEGCHRHYLHPEEPEYLGKGTAAFSPSHPLLPLRQKQQKSIQGEDIPDQRHRSNSLTRVDGQPRGAAIAWPEKKTRPASQPTPFALHHAASCEVDPSSGDSISLARSISKDSLASNIVNLTPQNQPHPTATKSHGKSLLSNVSIEDEEEELVAIVRADVVPQQADPEFPRASPRALGLTANARSPQGQLDTSESKPDSFFLEPLMPAVLKPAKEKQVITKEDERGEGRPRSIVSRRPSEGPQPLVRRKMTGSRDLNRTFTPIPCSEFPMGIDPTETGPLSVETAGEVCGGPLALGGFDPFPQGPSTDGFFLHVGRADEDTEGRLYVSCSKSPNSHDSEPWTLLRQDSDSDVVDIEEAEHDFMGEAHPVVFSRYIGEEESAKLQEDMKVKEHEDKDDASGRSSPCLSTASQMSSVSMASGSVKMTSFAERKLQRLNSCETKSSTSSSQKTTPDASESCPAPLTTWRQKREQSPSQHGKDPASLLASELVQLHMQLEEKRRAIEAQKKKMEALSARQRLKLGKAAFLHVVKKGKAEAAPPLRPEHFAKEYSQHNGEDCGDAVSKTEDFLVKEEQREELLHEPQDVDKESLAFAQQHKAKDPVALHELERNKVISAALLEDTVGEVVDVNECDLSIEKLNETISTLQQAILKISQQQEQLLMKSPTVPVPGSKNNSQDHKVKAPVHFVEPLSPTGVAGHRKAPRLGQGRNSRSGRPAELKVPKDRPQGSSRSKTPTPSVETLPHLRPFPASSHPRTPTDPGLDSALEPSGDPHGKCLFDSYRLHDESNQRTLTLSSSKDANILSEQMSLKEVLDASVKEVGSSSSDVSGKESVPVEEPLRSRASLIEVDLSDLKAPDEDGELVSLDGSADLVSEGDQKPGVGFFFKDEQKAEDELAKKRAAFLLKQQRKAEEARVRKQQLEAEVELKRDEARRKAEEDRVRKEEEKARRELIKQEYLRRKQQQILEEQGLGKPKSKPKKPRPKSVHREESCSDSGTKCSSTPDNLSRTQSGSSLSLASAATTEPESVHSGGTPSQRVESMEALPILSRNPSRSTDRDWETASAASSLASVAEYTGPKLFKEPSSKSNKPIIHNAISHCCLAGKVNEPHKNSILEELEKCDANHYIILFRDAGCQFRALYCYYPDTEEIYKLTGTGPKNITKKMIDKLYKYSSDRKQFNLIPAKTMSVSVDALTIHNHLWQPKRPAVPKKAQTRK

SEQ ID NO: 46816 - protein, 857 aa, Homo sapiens
MEALLQHTSEQEEMRAFPGPLAKDDTHKVDVINFAQNKAMKCLQNENLIDKESASLLWNFIVLLCRQNGTVVGTDIAELLLRDHRTVWLPGKSPNEANLIDFTNEAVEQVEEEESGEAQLSFLTGGPAAAASSLERETERFRELLLYGRKKDALESAMKNGLWGHALLLASKMDSRTHARVMTRFANSLPINDPLQTVYQLMSGRMPAASTCCGDEKWGDWRPHLAMVLSNLNNNMDVESRTMATMGDTLASRGLLDAAHFCYLMAQAGFGVYTKKTTKLVLIGSNHSLPFLKFATNEAIQRTEAYEYAQSLGAETCPLPSFQVFKFIYSCRLAEMGLATQAFHYCEAIAKSILTQPHLYSPVLISQLVQMASQLRLFDPQLKEKPEEESLAAPTWLVHLQQVERQIKEGAGVWHQDGALPQQCPGTPSSEMEQLDRPGLSQPGALGIANPLLAVPAPSPEHSSPSVRLLPSAPQTLPDGPLASPARVPMFPVPLPPGPLEPGPGCVTPGPALGFLEPSGPGLPPGVPPLQERRHLLQEARSPDPGIVPQEAPVGNSLSELSEENFDGKFANLTPSRTVPDSEAPPGWDRADSGPTQPPLSLSPAPETKRPGQAAKKETKEPKKGESWFFRWLPGKKKTEAYLPDDKNKSIVWDEKKNQWVNLNEPEEEKKAPPPPPTSMPKTVQAAPPALPGPPGAPVNMYSRRAAGTRARYVDVLNPSGTQRSEPALAPADFVAPLAPLPIPSNLFVPTPDAEEPQLPDGTGREGPAAARGLANPEPAPEPKVLSSAASLPGSELPSSRPEGSQGGEAPGDLPAAGGPPSGAMPFYNPAQLAQACATSGSSRLGRIGQRKHLVLN

SEQ ID NO: 46817 - protein, 78 aa, Homo sapiens [sequence omitted]

SEQ ID NO: 46818 - protein, 187 aa, Homo sapiens
MSIIGWFVRSFKYFYGLRFEVRDPRRLQEARPCVIVSNHQSILDMMGLMEVLPERCVQIAKRELLFLGPVGLIMYLGGVFFINRQRSSTAMTVMADLGERMVRENVPIVPVVYSSFSSFYNTKKKFFTSGTVTVQVLEAIPTSGLTAADVPALVDTCHRAMRTTFLHISKTPQENGATAGSGVQPAQ

SEQ ID NO: 46819 - protein, 219 aa, Homo sapiens [sequence omitted]

SEQ ID NO: 46820 - protein, 281 aa, Homo sapiens
MDQNKATLALLRSNIRRGAQDWALAKKYDQWTISKACGKNLPLRLAHCRSTMEVVREKLRKYVFDRVNMHNLLIHLVRRRGQKLESMQLELDSLRSQPDASKEELRLLQIIRQLENNIEKTMIKIITSQNIHLLYLDLLDYLKTVLAGYPIELDKLQNLVVNYCSELSDMKIMSQDAMMITDEVKEHEAKGGVLHRGAPGKGEPAQPAEEADRQDPHEGDQREVPPGPDGLGLPLEPDEHGDPEIEEKRDLHSRNGIPVGRDCCGGEGQECCTVLSRLGHH

SEQ ID NO: 46821 - protein, 434 aa, Homo sapiens
MRPYNWSYTQFSQFNKDDSLLLASGVFLGPHNSSSGEIAVISLDSFALLSRVRNKPYDVFGCWLTETSLISGNLHRIGDITSCSVLWLNNAFQDVESENVNVVKRLFKIQNLNASTVRTVMVADCSRFDSPDLLLEAGDPATSPCRIFDLGSDNEEVVAGPAPAHAKEGLRHFLDRVLEGRAQPQLSERMLETKVAELLAQGHTKPPERSATGAKSKYLIFTTGCLTYSPHQIGIKQILPHQMTTAGPVLGEGRGSDAFFDALDHVIDIHGHIIGMGLSPDNRYLYVNSRAWPNGAVVADPMQPPPIAEEIDLLVFDLKTMREVRRALRAHRAYTPNDECFFIFLDVSRDFVASGAEDRHGYIWDRHYNICLARLRHEDVVNSVVFSPQEQELLLTASDDATIKAWRSPRTMRVLQAPRPRPRTFFSWLASQRR

SEQ ID NO: 46822 - protein, 156 aa, Homo sapiens [sequence omitted]

SEQ ID NO: 46823 - protein, 517 aa, Homo sapiens
MDFAVLGLGDSSYAKFNFVAKKLHRRLLQLGGSALLPVCLGDDQHELGPDAAVDPWLRDLWDRVLGLYPPPPGLTEIPPGVPLPSKFTLLFLQEAPSTGSEGQRVAHPGSQEPPSESKPFLAPMISNQRVTGPSHFQDVRLIEFDILGSGISFAAGDVVLIQPSNSAAHVQRFCQVLGLDPDQLFMLQPREPDVSSPTRLPQPCSMRHLVSHYLDIASVPRRSFFELLACLSLHELEREKLLEFSSAQGQEELFEYCNRPRRTILEVLCDFPHTAAAIPPDYLLDLIPVIRPRAFSIASSLLTHPSRLQILVAVVQFQTRLKEPRRGLCSSWLASLDPGQGPVRVPLWVRPGSLAFPETPDTPVIMVGPGTGVAPFRAAIQERVAQGQTGNFLFFGCRWRDQDFYWEAEWQELEKRDCLTLIPAFSREQPPALFSALQEQKVYVQHRLRELGSLVWELLDRQGAYFYLAGNAKSMPADVSEALMSIFQEEGGLCSPDAAAYLARLQQTRRFQTETWA

SEQ ID NO: 46824 - protein, 432 aa, Homo sapiens
MDFAVLGLGDSSYAKFNFVAKKLHRRLLQLGGSALLPVCLGDDQHELGLPSKFTLLFLQEAPSTGSEGQRVAHPGSQEPPSESKPFLAPMISNQRVTGPSHFQDVRLIEFDILGSGISFAAGDVVLIQPSNSAAHVQRFCQVLGLDPDQLFMLQPREPDVSSPTRLPQPCSMRHLVSHYLDIASVPRRSFFELLACLSLHELEREKLLEFSSAQGQEELFEYCNRPRRTILEVLCDFPHTAAAIPPDYLLDLIPVIRPRAFSIASSLLTHPSRLQILVAVVQFQTRLKEPRRGLCSSWLASLDPGQGPVRVPLWVRPGSLAFPETPDTPVIMVGPGTGVAPFRAAIQERVAQGQTGNFLFFGCRWRDQDFYWEAEWQELEKRDCLTLIPAFSREQEQKVYVQHRLRELGSLVWELLDRQATPSPCQRTSRKP

SEQ ID NO: 46825 - protein, 501 aa, Homo sapiens
MDFAVLGLGDSSYAKFNFVAKKLHRRLLQLGGSALLPVCLGDDQHELGPDAAVDPWLRDLWDRVLGLYPPPPGLTEIPPGVPLPSKFTLLFLQEAPSTGSEGQRVAHPGSQEPPSESKPFLAPMISNQRVTGPSHFQDVRLIEFDILGSGISFAAGDVVLIQPSNSAAHVQRFCQVLGLDPDQLFMLQPREPDVSSPTRLPQPCSMRHLVSHYLDIASVPRRSFFELLACLSLHELEREKLLEFSSAQGQEELFEYCNRPRRTILEVLCDFPHTAAAIPPDYLLDLIPVIRPRAFSIASSLLILVAVVQFQTRLKEPRRGLCSSWLASLDPGQGPVRVPLWVRPGSLAFPETPDTPVIMVGPGTGVAPFRAAIQERVAQGQTGNFLFFGCRWRDQDFYWEAEWQELEKRDCLTLIPAFSREQEQKVYVQHRLRELGSLVWELLDRQGAYFYLAGNAKSMPADVSEALMSIFQEEGGLCSPDAAAYLARLQQTRRFQTETWA

SEQ ID NO: 46826 - protein, 859 aa, Homo sapiens
MGRDPLLLLQALQTLWSTRERKQLREEAWRGFAALDDPLAGLLDMLESCRGQRGEGPSLAAWISHQLQCWLQAQPCPSLAQHSLRLKQLQARAVKVLTESPPSLAAPLASIFQLQDADRSCLLAHVHRLHHEGRFREAATLGATLKLQSELGVEKMSIPLLLQDKVALVERYVAGFPDLQRRLLVLMDSWCQPGFDIKDVARRYPEVTSLSLEKLSPKALSRQVLRLQERYGVAPALCPNAAIQQRLAALRHLCHKRFVEKSLSQENWTDHVQGLVGQSPWLQEQLSQLLVSHSDPVTAAQCAMELLLPEERLPAAVAVELRRFRLQGRATEADSRLEVKDMKDRYYQLPIPRENVHLLASWEDLTRHEGALLQCHQVVGVDVEWTPVFVAGGRPRPSLLQVAVEGHVFLLDVLALSQPPTGQGAQAFSRLVAQLLSDPSITKLGYGMVGDLQKLGTSCPALAHVEKQILGGMDLLLVHRQMRVASVPAPAVDRARELRGLSLLVQQVLGTALDKTQQLSNWDRRPLCEEQVIYAAADAYCLLEVHQALCREPARFHLSEDLAGSRRPRHRERPGARKPPGLQKASAPAAPRQVPVAVAVSEGAAPQIPARAFRVVCDNMLQGLARSLRCLGVDARMLGNGEDHRRAAEVARQEGRIILTSGQPFHKLRAQVGAGRCLSVDCSLKAQQQAKAVLKHFNVRVTHADIFSRCQACNCDQYLKVSRDMMKQLMWLSSHQEGPRSSGDEATQSQAVQEPGPAPDAAPEGCTYDRPCRWLQMADLRAETPDMLADGTRLQLAGVPVGVLRTPGLRCFYCCTGCGKVFWDGSHLGRVATHFRDMLESAPSPCEPSPAPSPASSPF

SEQ ID NO: 46827 - protein, 188 aa, Homo sapiens
MEVDADGNGAKIFAYAFDKNRGRGSGRLLHELLWERHRGGVAPGFQVVHLNAVTVDNRLDNLQLVPWGWRPKAEETSSKQREQSLYWLAIQQLPTDPIEEQFPVLNVTRYYNANGDVVEEEENSCTYYECHYPPCTVIEKQLREFNICGRCQVARYCGSQCQQKDWPAHKKHCRERKRPFQHELEPER

SEQ ID NO: 46828 - protein, 377 aa, Homo sapiens
MVVSTKTPDRKLIFGKGNFEHLTEKIRGSPDITCVFLNVERMAAPTKKELEAAWGVEVFDRFTVVLHIFRCNARTKEARLQVALAEMPLHRSNLKRDVAHLYRGVGSRYIMGSGESFMQLQQRLLREKEAKIRKALDRLRKKRHLLRRQRTRREFPVISVVGYTNCGKTTLIKALTGDAAIQPRDQLFATLDVTAHAGTLPSRMTVLYVDTIGFLSQLPHGLIESFSATLEDVAHSDLILHVRDVSHPEAELQKCSVLSTLRGLQLPAPLLDSMVEVHNKVDLVPGYSPTEPNVVPVSALRGHGLQELKAELDAAVLKATGRQILTLRVRLAGAQLSWLYKEATVQEVDVIPEDGAADVRVIISNSAYGKFRKLFPG

SEQ ID NO: 46829 - protein, 62 aa, Homo sapiens
MPPNQSQIQTPTDLVSLVTQHHLIPPNQSQIQIPTDLVSLIRASNPTGWSLCCLPGSDVRVI

SEQ ID NO: 46830 - protein, 102 aa, Homo sapiens
MPNPNPNHPSSSGSFSDADLADGVSGGEGKGGSDGGGSHRKEGEEADAPGVIPGIVGAVVVAVAGAISSFIAYQKKKLCFKENGQLAGSLGPCIGIRREADG

SEQ ID NO: 46831 - protein, 85 aa, Homo sapiens [sequence omitted]

SEQ ID NO: 46832 - protein, 501 aa, Homo sapiens [sequence omitted]

SEQ ID NO: 46833 - protein, 557 aa, Homo sapiens [sequence omitted]

SEQ ID NO: 46834 - protein, 983 aa, Homo sapiens
MKQELQYKEKGVETLQEIDRKMSSTHTSYKLDEAQAIMSELRTIKKAICTGEKERRDLMHSLAKLTDSFKNSCSVTDSLVDFPHHVGVPGDAGVPQQFCDAGSQTDIIGEFVFDDKTRLVDRVRLNWQYEEARKRVANIQQQLARLDNESWPSTAEADRDRLQLIKEKEALLQELQLIIAQRRSAGDVARLEEERERLEEELRRARATSAQGATERILLQEKRNCLLMQLEEATRLTSYLQSQLKSLCASTLTVSSGSSRGSLASSRGSLASSRGSLSSVSFTDIYGLPQYEKPDAEGSQLLRFDLIPFDSLGRDAPFSEPPGPSGFHKQRRSLDTPQSLASLSSRSSLSSLSPPSSPLDTPFLPASRDSPLAQLADSCEGPGLGALDRLRAHASAMGDEDLPGMAALQPHGVPGDGEGPHERGPPPASAPVGGTVTLREDSAKRLERRARRISACLSDYSLASDSGVFEPLTKRNEDAEEPAYGDTASNGDPQIHVGLLRDSGSECLLVHVLQLKNPAGLAVKEDCKVHIRVYLPPLDSGTPNTYCSKALEFQVPLVFNEVFRIPVHSSALTLKSLQLYVCSVTPQLQEELLGIAQINLADYDSLSEMQLRWHSVQVFTSSEPSRTREAGCAGESSARDPAHTISISGKTDAVTVLLARTTAQLQAVERELAEERAKLEYTEEEVLEMERKEEQAEAISERSWQADSVDSGCSNCTQTSPPYPEPCCMGIDSILGHPFAAQAGPYSPEKFQPSPLKVDKETNTEDLFLEEAASLVKERPSRRARGSPFVRSGTIVRSQTFSPGARSQYVCRLYRSDSDSSTLPRKSPFVRNTLERRTLRYKQSCRSSLAELMARTSLDLELDLQASRTRQRQLNEELCALRELRQRLEDAQLRGQTDLPPWVLRDERLRGLLREAERQTRQTKLDYRHEQAAEKMLKKASKEIYQLRGQSHKEPIQVQTFREKIAFFTRPRINIPPLPADDV

SEQ ID NO: 46835 - protein, 747 aa, Homo sapiens [sequence omitted]

SEQ ID NO: 46836 - protein, 430 aa, Homo sapiens
MTSAEKVLCQFCDQDPAQDAVKTCVTCEVSYCDECLKATHPNKKPFTGHRLIEPIPDSHIRGLMCLEHEDEKVNMYCVTDDQLICALCKLVGRHRDHQVAALSERYDKLKQNLESNLTNLIKRNTELETLLAKLIQTCQHVETVKDQKVIGREKQQYYPRNRRKWVSNSLQARLMGRRCISRRERKLTLDVEKVNASRQEAKLTEECDLLIEIIQQRRQIIGTKIKEGKVMRLRKLAQQIANCKQCIERSASLISQAEHSLKENDHARFLQTAKNITERVSMATASSQVLIPEINLNDTFDTFALDFSREKKLLECLDYLTAPNPPTIREELCTASYDTITVHWTSDDEFSVVSYELQYTIFTGQANVVSEYLMAYLFLSLVAFFRLIAFLNLNFKGRQGRKEHTIFIDLSFLNKKVIALTCTTLVKTAG

SEQ ID NO: 46837 - protein, 118 aa, Homo sapiens
MTSAEKVLCQFCDQDPAQDAVKTCVTCEVSYCDECLKATHPNKKPFTGHRLIEPIPDSHIRGLMCLEHEDEKQNLESNLTNLIKRNTELETLLAKLIQTCQHVELECSVLFPRVAQWG

SEQ ID NO: 46838 - protein, 242 aa, Homo sapiens [sequence omitted]

SEQ ID NO: 46839 - protein, 794 aa, Homo sapiens
MGHPVYRGEKPQLHYAGDFTWNSMSGRSVRLRSVPIQSLSELERARLQEVAFYQLQQDCDLSCQITIPKDGQKRKKSLRKKLDSLGKEKNKDKEFIPQAFGMPLSQVIANDRAYKLKQDLQRDEQKDASDFVASLLPFGNKRQNKELSSSNSSLSSTSETPNESTSPNTPEPAPRARRRGAMSVDSITDLDDNQSRLLEALQLSLPAEAQSKKEKARDKKLSLNPIYRQVPRLVDSCCQHLEKHGLQTVGIFRVGSSKKRVRQLREEFDRGIDVSLEEEHSVHDVAALLKEFLRDMPDPLLTRELYTAFINTLLLEPEEQLGTLQLLIYLLPPCNCDTLHRLLQFLSIVARHADDNISKDGQEVTGNKMTSLNLATIFGPNLLHKQKSSDKEFSVQSSARAEESTAIIAVVQKMIENYEALFMVPPDLQNEVLISLLETDPDVVDYLLRRKASQSSSPDMLQSEVSFSVGGRHSSTDSNKASSGDISPYDNNSPVLSERSLLAMQEDAAPGGSEKLYRVPGQFMLVGHLSSSKSRESSPGPRLGKDLSEEPFDIWGTWHSTLKSGSKDPGMTGSSGDIFESSSLRAGPCSLSQGNLSPNWPRWQGSPAELDSDTQGARRTQAAAPATEGRAHPAVSRACSTPHVQVAGKAERPTARSEQYLTLSGAHDLSESELDVAGLQSRATPQCQRPHGSGRDDKRPPPPYPGPGKPAAAAAWIQGPPEGVETPTDQGGQAAEREQQVTQKKLSSANSLPAGEQDSPRLGDAGWLDWQRERWQIWELLSTDNPDALPETLV

SEQ ID NO: 46840 - protein, 334 aa, Homo sapiens
MSKRNFEDLGNHLTELETIYVTKEHLQETDVVRAVYRVLKNCPSVALKKKAKCLLSKWKAVYKQTHSKARNSPKLFPVRGNKEENSGPSHDPSQNETLGICSSNSLSSQDVAKLSEMIVPENRAIQLKPKEEHFGDGDPESTGKRSSELLDPTTPMRTKCIELLYAALTSSSTDQPKADLWQNFAREIEEHVFTLYSKNIKKYKTCIRSKVANLKNPRNSHLQQNLLSGTTSPREFAEMTVMEMANKELKQLRASYTESCIQEHYLPQVIDGTQTNKIKCRRCEKYNCKVTVIDRGTLFLPSWVRNSNPDEQMMTYVICNECGEQWYHSKWVCW

SEQ ID NO: 46841 - protein, 144 aa, Homo sapiens [sequence omitted]

SEQ ID NO: 46842 - protein, 1011 aa, Homo sapiens
MAQSNMFTVADVLSQDELRKKLYQTFKDRGILDTLKTQLRNQLIHELMHPVLSGELQPRSISVEGSSLLIGASNSLVADHLQRCGYEYSLSVFFPESGLAKEKVFTMQDLLQLIKINPTSSLYKSLVSGSDKENQKGFLMHFLKELAEYHQAKESCNMETQTSSTFNRDSLAEKLQLIDDQFADAYPQRIKFESLEIKLNEYKREIEEQLRAEMCQKLKFFKDTEIAKIKMEAKKKYEKELTMFQNDFEKACQAKSEALVLREKSTLERIHKHQEIETKEIYAQRQLLLKDMDLLRGREAELKQRVEAFELNQKLQEEKHKSITEALRRQEQNIKSFEETYDRKLKNELLKYQLELKDDYIIRTNRLIEDERKNKEKAVHLQEELIAINSKKEELNQSVNRVKELELELESVKAQSLAITKQNHMLNEKVKEMSDYSLLKEEKLELLAQNKLLKQQLEESRNENLRLLNRLAQPAPELAVFQKELRKAEKAIVVEHEEFESCRQALHKQLQDEIEHSAQLKAQILGYKASVKSLTTQVADLKLQLKQTQTALENEVYCNPKQSVIDRSVNGLINGNVVPCNGEISGDFLNNPFKQENVLARMVASRITNYPTAWVEGSSPDSDLEFVANTKARVKELQQEAERLEKAFRSYHRRVIKNSAKSPLAAKSPPSLHLLEAFKNITSSSPERHIFGEDRVVSEQPQVGTLEERNDVVEALTGSAASRLRGGTSSRRLSSTPLPKAKRSLESEMYLEGLGRSHIASPSPCPDRMPLPSPTESRHSLSIPPVSSPPEQKVGLYRRQTELQDKSEFSDVDKLAFKDNEEFESSFESAGNMPRQLEMGGLSPAGDMSHVDAAAAAVPLSYQHPSVDQKQIEEQKEEEKIREQQVKERRQREERRQSNLQEVLERERRELEKLYQERKMIEESLKIKIKKELEMENELEMSNQEIKDKSAHSENPLEKYMKIIQQEQDQESADKSSKKMVQEGSLVDTLQSSDKVESLTGFSHEELDDSW

SEQ ID NO: 46843 - protein, 971 aa, Homo sapiens
MAQSNMFTVADVLSQDELRKKLYQTFKDRGILDTLKTQLRNQLIHELMHPVLSGELQPRSISVEGSSLLIGASNSLVADHLQRCGYEYSLSVFFPESGLAKEKVFTMQDLLQLIKINPTSSLYKSLVSGSDKENQKGFLMHFLKELAEYHQAKESCNMETQTSSTFNRDSLAEKLQLIDDQFADAYPQRIKFESLEIKLNEYKREIEEQLRAEMCQKLKFFKDTEIAKIKMEAKKKYEKELTMFQNDFEKACQAKSEALVLREKSTLERIHKHQEIETKEIYAQRQLLLKDMDLLRGREAELKQRVEAFELYQLELKDDYIIRTNRLIEDERKNKEKAVHLQEELIAINSKKEELNQSVNRVKELELELESVKAQSLAITKQNHMLNEKVKEMSDYSLLKEEKLELLAQNKLLKQQLEESRNENLRLLNRLAQPAPELAVFQKELRKAEKAIVVEHEEFESCRQALHKQLQDEIEHSAQLKAQILGYKASVKSLTTQVADLKLQLKQTQTALENEVYCNPKQSVIDRSVNGLINGNVVPCNGEISGDFLNNPFKQENVLARMVASRITNYPTAWVEGSSPDSDLEFVANTKARVKELQQEAERLEKAFRSYHRRVIKNSAKSPLAAKSPPSLHLLEAFKNITSSSPERHIFGEDRVVSEQPQVGTLEERNDVVEALTGSAASRLRGGTSSRRLSSTPLPKAKRSLESEMYLEGLGRSHIASPSPCPDRMPLPSPTESRHSLSIPPVSSPPEQKVGLYRRQTELQDKSEFSDVDKLAFKDNEEFESSFESAGNMPRQLEMGGLSPAGDMSHVDAAAAAVPLSYQHPSVDQKQIEEQKEEEKIREQQVKERRQREERRQSNLQEVLERERRELEKLYQERKMIEESLKIKIKKELEMENELEMSNQEIKDKSAHSENPLEKYMKIIQQEQDQESADKSSKKMVQEGSLVDTLQSSDKVESLTGFSHEELDDSW

SEQ ID NO: 46844 - protein, 271 aa, Homo sapiens
MYPGSKNHQYHPVPTLGDRASPLSSPGCFECCIKCLGGVPYASLVATILCFSGVALFCGCGHVALAGTVAILEQHFSTNASDHALLSEVIQLMQYVIYGIASFFFLYGIILLAEGFYTTSAVKELHGEFKTTACGRCISGMFVFLTYVLGVAWLGVFGFSAVPVFMFYNIWSTCEVIKSPQTNGTTGVEQICVDIRQYGIIPWNAFPGKICGSALENICNTNEFYMSYHLFIVACAGAGATVIALLIYMMATTYNYAVLKFKSREDCCTKF

SEQ ID NO: 46845 - protein, 455 aa, Homo sapiens
MLDESFQWRKEISVNDLNESSIPRWLLEIGVIYLHGYDKEGNKLFWIRVKYHVKDQKTILDKKKLIAFWLERYAKRENGKPVTVMFDLSETGINSIDMDFVRFIINCFKVYYPKYLSKIVIFDMPWLMNAAFKIVKTWLGPEAVSLLKFTSKNEVQDYVSVEYLPPHMGGTDPFKYSYPPLVDDDFQTPLCENGPITSEDETSSKEDIESDGKETLETISNEEQTPLLKKINPTESTSKAEENEKVDSKVKAFKKPLSVFKGPLLHISPAEELYFGSTESGEKKTLIVLTNVTKNIVAFKVRTTAPEKYRVKPSNSSCDPGASVDIVVSPHGGLTVSAQDRFLIMAAEMEQSSGTGPAELTQFWKEVPRNKVMEHRLRCHTVESSKPNTLTLKDNAFNMSDKTSEDICLQLSRLLESNRKLEDQVQRCIWFQQLLLSLTMLLLAFVTSFFYLLYS

SEQ ID NO: 46846 - protein, 423 aa, Homo sapiens
MLDESFQWRKEISVNDLNESSIPRWLLEIGVIYLHGYDKEGNKLFWIRVKYHVKDQKTILDKKKLIAFWLERYAKRENGKPVTVMFDLSETGINSIDMDFVRFIINCFKVYYPKYLSKIVIFDMPWLMNAAFKIVKTWLGPEAVSLLKFTSKNEVQDYVSVEYLPPHMGGTDPFKYSYPPLVDDDFQTPLCENGPITSEDETSSKEDIESDGKETLETISNEEQTPLLKKINPTESTSKAEENEKVDSKVKAFKKPLSVFKGPLLHISPAEELYFGSTESGEKKTLIVLTNVTKNIVAFKVRTTAPEKYRVKPSNSSCDPGASVDIVVSPHGGLTVSAQDRFLIMAAEMEQSSGTGPAELTQFWKEVPRNKVMEHRLRCHTVESSKPNTLTLKDNAFNMSDKTSEDICLQFATSSCEMDCSPP

SEQ ID NO: 46847 - protein, 140 aa, Homo sapiens
MGGTDPFKYSYPPLVDDDFQTPLCENGPITSEDETSSKEDIESDGKETLETISNEEQTPLLKKINPTESTSKAEENEKVDSKVKAFKKPLSVFKGPLLHISPAEELYFGSTESGEKKTLIVLTNVTKNIVAFKGDIPNAK

SEQ ID NO: 46848 - protein, 744 aa, Homo sapiens
MNNAGDKWSAFLKEQSTLAQMYPLQEIQNLTVKLQLQALQQNGSSVLSEDKSKRLNTILNTMSTIYSTGKVCNPDNPQECLLLEPGLNEIMANSLDYNERLWAWESWRSEVGKQLRPLYEEYVVLKNEMARANHYEDYGDYWRGDYEVNGVDGYDYSRGQLIEDVEHTFEEIKPLYEHLHAYVRAKLMNAYPSYISPIGCLPAHLLGDMWGRFWTNLYSLTVPFGQKPNIDVTDAMVDQAWDAQRIFKEAEKFFVSVGLPNMTQGFWENSMLTDPGNVQKAVCHPTAWDLGKGDFRILMCTKVTMDDFLTAHHEMGHIQYDMAYAAQPFLLRNGANEGFHEAVGEIMSLSAATPKHLKSIGLLSPDFQEDNETEINFLLKQALTIVGTLPFTYMLEKWRWMVFKGEIPKDQWMKKWWEMKREIVGVVEPVPHDETYCDPASLFHVSNDYSFIRYYTRTLYQFQFQEALCQAAKHEGPLHKCDISNSTEAGQKLFNMLRLGKSEPWTLALENVVGAKNMNVRPLLNYFEPLFTWLKDQNKNSFVGWSTDWSPYADQSIKVRISLKSALGDKAYEWNDNEMYLFRSSVAYAMRQYFLKVKNQMILFGEEDVRVANLKPRISFNFFVTAPKNVSDIIPRTEVEKAIRMSRSRINDAFRLNDNSLEFLGIQPTLGPPNQPPVSIWLIVFGVVMGVIVVGIVILIFTGIRDRKKKNKARSGENPYASIDISKGENNPGFQNTDDVQTSF

SEQ ID NO: 46849 - protein, 186 aa, Homo sapiens
MYPVALVMLQEDELLSKMRFALVPKLVKEEVFWRNYFYRVSLIKQSAQLTALAAQQQAAGKEEKSNGREQDLPLAEAVRPKTPPVVIKSQLKTQEDEEEISTSPGVSEFVSDAFDACNLNQEDLRKEMEQLVLDKKQEETAVLEEDSADWEKELQQELQEYEVVTESEKRDENWDKEIEKMLQEEN

SEQ ID NO: 46850 - protein, 1510 aa, Homo sapiens
MLDLCAVSNAALARVLRQLSDVARHACSLFQELESDIQLTHRRVWALQGKLGGVQRVLSTLDPKQEAVPVSNLDIESKLSVYYRAPWHQQRNIFLPATRPPCVEELHRHARQSLQALRREHRSRSDRREQRAAAPLSIAAPPLPAYPPAHSQRRREFKDRHFLTSHPPEDEDTDVMLGQRPKNPIHNIPSTLDKQTNWSKALPLPTPEEKMKQDAQVISSCIIPINVTGVGFDREASIRCSLVHSQSVLQRRRKLRRRKTISGIPRRVQQEIDSDESPVARERNVIVHTNPDPSNTVNRISGTRDSECQTEDILIAAPSRRRIRAQRGQSIAASLSHSAGNISALADKGDTMFTPAVSSRTRSRSLPREGNRGGDAEPKVGAKPSAYEEGESFVGDHERTPNDFSEAPSSPSAQDHQPTLGLACSQHLHSPQHKLSERGRSRLSRMAADSGSCDISSNSDTFGSPIHCISTAGVLLSSHMDQKDDHQSSSGNWSGSSSTCPSQTSETIPPAASPPLTGSSHCDSELSLNTAPHANEDASVFVTEQYNDHLDKVRGHRANSFTSTVADLLDDPNNSNTSDSEWNYLHHHHDASCRQDFSPERPKADSLGCPSFTSMATYDSFLEKSPSDKADTSSHFSVDTEGYYTSMHFDCGLKGNKSYVCHYAALGPENGQGVGASPGLPDCAWQDYLDHKRQGRPSISFRKPKAKPTPPKRSSSLRKSDGNADISEKKEPKISSGQHLPHSSREMKLPLDFANTPSRMENANLPTKQEPSWINQSEQGIKEPQLDASDIPPFKDEVAESTHYADLWLLNDLKTNDPYRSLSNSSTATGTTVIECIKSPESSESQTSQSESRATTPSLPSVDNEFKLASPEKLAGLASPSSGYSSQSETPTSSFPTAFFSGPLSPGGSKRKPKVPERKSSLQQPSLKDGTISLSKDLELPIIPPTHLDLSALHNVLNKPFHHRHPLHVFTHNKQNTVGETLRSNPPPSLAITPTILKSVNLRSINKSEEVKQKEENNTDLPYLEESTLTTAALSPSKIRPHTANKSVSRQYSTEDTILSFLDSSAVEMGPDKLHLEKNSTFDVKNRCDPETITSAGSSLLDSNVTKDQVRTETEPIPENTPTKNCAFPTEGFQRVSAARPNDLDGKIIQYGPGPDETLEQVQKAPSAGLEEVAQPESVDVITSQSDSPTRATDVSNQFKHQFVMSRHHDKVPGTISYESEITSVNSFPEKCSKQENIASGISAKSASDNSKAEETQGNVDEASLKESSPSDDSIISPLSEDSQAEAEGVFVSPNKPRTTEDLFAVIHRSKRKVLGRKDSGDMSVRSKSRAPLSSSSSSASSITSPSSNVTTPNSQRSPGLIYRNAKKSNTSNEEFKLLLLKKGSRSDSSYRMSATEILKSPILPKPPGELTAESPQSTDDAHQGSQGAEALSPLSPCSPRVNAEGFSSKSFATSASARVGRSRAPPAASSSRYSVRCRLYNTPMQAISEGETENSDGSPHDDRSSQSST

SEQ ID NO: 46851 - protein, 387 aa, Homo sapiens [sequence omitted]

SEQ ID NO: 46852 - protein, 394 aa, Homo sapiens
MLAAVSRVLSGASQKPASRVLVASRNFANDATFEIKKCDLHRLEEGPPVTTVLTREDGLKYYRMMQTVRRMELKADQLYKQKIIRGFCHLCDGQFLLPLTQEACCVGLEAGINPTDHLITAYRAHGFTFTRGLSVREILAELTGRKGGCAKGKGGSMHMYAKNFYGGNGIVGAQVPLGAGIALACKYNGKDEVCLTLYGDGAANQGQIFEAYNMAALWKLPCIFICENNRYGMGTSVERAAASTDYYKRGDFIPGLRVDGMDILCVREATRFAAAYCRSGKGPILMELQTYRYHGHSMSDPGVSYRTREEIQEVRSKSDPIMLLKDRMVNSNLASVEELKEIDVEVRKEIEDAAQFATADPEPPLEELGYHIYSSDPPFEVRGANQWIKFKSVS

SEQ ID NO: 46853 - protein, 661 aa, Homo sapiens [sequence omitted]

SEQ ID NO: 46854 - protein, 632 aa, Homo sapiens [sequence omitted]

SEQ ID NO: 46855 - protein, 1030 aa, Homo sapiens
MEPVSKWSPSQVVDWMKGLDDCLQQYIKNFEREKISGDQLLRITHQELEDLGVSRIGHQELILEAVDLLCALNYGLETENLKTLSHKLNASAKNLQNFITGRRRSGHYDGRTSRKLPNDFLTSVVDLIGAAKSLLAWLDRSPFAAVTDYSVTRNNVIQLCLELTTIVQQDCTVYETENKILHVCKTLSGVCDHIISLSSDPLVSQSAHLEVIQLANIKPSEGLGMYIKSTYDGLHVITGTTENSPADRCKKIHAGDEVIQVNHQTVVGWQLKNLVNALREDPSGVILTLKKRPQSMLTSAPALLKNMRWKPLALQPLIPRSPTSSVATPSSTISTPTKRDSSALQDLYIPPPPAEPYIPRDEKGNLPCEDLRGHMVGKPVHKGSESPNSFLDQEYRKRFNIVEEDTVLYCYEYEKGRSSSQGRRESTPTYGKLRPISMPVEYNWVGDYEDPNKMKRDSRRENSLLRYMSNEKIAQEEYMFQRNSKKDTGKKSKKKGDKSNSPTHYSLLPSLQMDALRQDIMGTPVPETTLYHTFQQSSLQHKSKKKNKGPIAGKSKRRISCKDLGRGDCEGWLWKKKDAKSYFSQKWKKYWFVLKDASLYWYINEEDEKAEGFISLPEFKIDRASECRKKYAFKACHPKIKSFYFAAEHLDDMNRWLNRINMLTAGYAERERIKQEQDYWSESDKEEADTPSTPKQDSPPPPYDTYPRPPSMSCASPYVEAKHSRLSSTETSQSQSSHEEFRQEVTGSSAVSPIRKTASQRRSWQDLIETPLTSSGLHYLQTLPLEDSVFSDSAAISPEHRRQSTLPTQKCHLQDHYGPYPLAESERMQVLNGNGGKPRSFTLPRDSGFNHCCLNAPVSACDPQDDVQPPEVEEEEEEEEEEGEAAGENIGEKSESREEKLGDSLQDLYRALEQASLSPLGEHRISTKMEYKLSFIKRCNDPVMNEKLHRLRILKSTLKAREGEVAIIDKVLDNPDLTSKEFQQWKQMYLDLFLDICQNTTSNDPLSISSEVDVITSSLAHTHSYIETHV

SEQ ID NO: 46856 - protein, 981 aa, Homo sapiens
MEPVSKWSPSQVVDWMKGLDDCLQQYIKNFEREKISGDQLLRITHQELEDLGVSRIGHQELILEAVDLLCALNYGLETENLKTLSHKLNASAKNLQNFITGRRRSGHYDGRTSRKLPNDFLTSVVDLIGAAKSLLAWLDRSPFAAVTDYSVTRNNVIQLCLELTTIVQQDCTVYETENKILHVCKTLSGVCDHIISLSSDPLVSQSAHLEVIQLANIKPSEGLGMYIKSTYDGLHVITGTTENSPADRCKKIHAGDEVIQVNHQTVPLIPRSPTSSVATPSSTISTPTKRDSSALQDLYIPPPPAEPYIPRDEKGNLPCEDLRGHMVGKPVHKGSESPNSFLDQEYRKRFNIVEEDTVLYCYEYEKGRSSSQGRRESTPTYGKLRPISMPVEYNWVGDYEDPNKMKRDSRRENSLLRYMSNEKIAQEEYMFQRNSKKDTGKKSKKKGDKSNSPTHYSLLPSLQMDALRQDIMGTPVPETTLYHTFQQSSLQHKSKKKNKGPIAGKSKRRISCKDLGRGDCEGWLWKKKDAKSYFSQKWKKYWFVLKDASLYWYINEEDEKAEGFISLPEFKIDRASECRKKYAFKACHPKIKSFYFAAEHLDDMNRWLNRINMLTAGYAERERIKQEQDYWSESDKEEADTPSTPKQDSPPPPYDTYPRPPSMSCASPYVEAKHSRLSSTETSQSQSSHEEFRQEVTGSSAVSPIRKTASQRRSWQDLIETPLTSSGLHYLQTLPLEDSVFSDSAAISPEHRRQSTLPTQKCHLQDHYGPYPLAESERMQVLNGNGGKPRSFTLPRDSGFNHCCLNAPVSACDPQDDVQPPEVEEEEEEEEEEGEAAGENIGEKSESREEKLGDSLQDLYRALEQASLSPLGEHRISTKMEYKLSFIKRCNDPVMNEKLHRLRILKSTLKAREGEVAIIDKVLDNPDLTSKEFQQWKQMYLDLFLDICQNTTSNDPLSISSEVDVITSSLAHTHSYIETHV

SEQ ID NO: 46857 - protein, 152 aa, Homo sapiens
MVTMVEIDQMVIDGCKKYMRKTCGDVLDNLKGDCYQVLIEDCIPVLKRYAKEGREFDYVINDLTAVPISTSPEEDSTWEFLRLILDLSMKVLKQDGKYFTQGNCVNLTEALSLYEEQLGRLYCPVEFSKEIVCVPSYLELWVFYTVWKKAKP

SEQ ID NO: 46858 - protein, 92 aa, Homo sapiens
MEALPLLAATTPDHGRHRRLLLLPLLLFLLPAGAVQGWETEERPRTREEECHFYAGGQVYPGEASRVSVADHSLHLSKAKKVCKLHQTAKEI

SEQ ID NO: 46859 - protein, 96 aa, Homo sapiens
MYYFTYDPWIGKLLYLEDFFVMSDYRGFGIGSEILKNLSQVAMRCRCSSMHFLVAEWNEPSINFYKRRGASDLSSEEGWRLFKIDKEYLLKMATEE

SEQ ID NO: 46860 - protein, 293 aa, Homo sapiens
MKLKHILILQNKIDLVKESQAKEQYEQILAFVQGTVAEGAPIIPISAQLKYNIEVVCEYIVKKIPVPPRDFTSEPRLIVIRSFDVNKPGCEVDDLKGGVAGGSILKGVLKVGQEIEVRPGIVSKDSEGKLMCKPIFSKIVSLFAEHNDLQYAAPGGLIGVGTKIDPTLCRADRMVGQVLGAVGALPEIFTELEISYFLLRRLLGVRTEGDKKAAKVQKLSKNEVLMVNIGSLSTGGRVSAVKADLGKIVLTNPVCTEVGEKIALSRRVEKHWRLIGWGQIRRGVTIKPTVDDD

SEQ ID NO: 46861 - protein, 619 aa, Homo sapiens
MNRNRLLHINLGIHSPSSYHPGDGAQLNGGRTLVHSSSDGHIDPQHAAGKQLICLVQEPHSAPAVVAATPNYNPFFMNEQNRSAATPPSQPPQQPSSMQTGMNPSAMQGPSPPPPPPSYMHIPRYSTNPITVTVSQNLPSGQTVPRALQILPQIPSNLYGSPGSIYIRQTSQSSSGRQTPQSTPWQSSPQGPVPHYSQRPLPVYPHQQNYQPSQYSPKQQQIPQSAYHSPPPSQCPSPFSSPQHQVQPSQLGHIFMPPSPSTTPPHPYQQGPPSYQKQGSHSVAYLPYTASSLSKGSMKKIEITVEPSQRPGTAINRSPSPISNQPSPRNQHSLYTATTPPSSSPSRGISSQPKPPFSVNPVYITYTQPTGPSCTPSPSPRVIPNPTTVFKITVGRATTENLLNLVDQEERSAAPEPIQPISVIPGSGGEKGSHKYQRSSSSGSDDYAYTQALLLHQRARMERLAKQLKLEKEELERLKSEVNGMEHDLMQRRLRRVSCTTAIPTPEEMTRLRSMNRQLQINVDCTLKEVDLLQSRDSSDPCTIERKARRISVTSKVQADIHDTQAAAADEHRTGSTQSPRTQPRDEDYEGAPWNCDSCTFLNHPALNRCEQCEMPRYT
